United States Patent Application Publication US 2007/0054278 A1 - sequence listing, part 21

SEQ ID NO: 93680 - DNA, 287803 bp, Homo sapiens
acaaaagtaagagcagtaagagattaactgaagtctgaattcagagtaaatgccaaaaaagtttcttacagcagtgtaaaaattgtgacagtgaaaagaaataacctgactgaagtttgaaatgctacagttttgaggtaaaggatgttatggcaaactgaaaataatcttcccttaaaaaaataaagtcccttcttgttcatcgttatctgggaaactgaaatctggttctggtaataatgataatataattactattaaaaatgtgaaggtcagagatatgacagtaacacaatttatgtacataaagaacacaattgatttcgacaggaagatttccaacaagtattacagagcactccatagttgttgtgcattctttaaacttgatggttaaaaaaaaaaaaggttaaattctttttttaaactttttttttgaaatagcgtctccctctgtcacccaggctggagtgcagtactgctgtcatagctcactataaccttgaacttctcagctcaagtgatccttccaccttagcctcctgagtagctaagactgcaggtgcgcaacactacacttggcaattttttttttttttttttttttgagatggagtttagctcctgttgcccagcctggagtacaatggtgcaatctcggttcaccgcaacctccacctcctgagttcaagctattctcctgcctcagcctcacaagtagctgggattacagacatgcgccaccatgcccagctaattttgtatttttagtagagatggtgtttctccatgttggtcaggctggtctcgagctcccaacctcaggtgagccacccgcctcgacctcccaaagtgctgggattacaggcgttagccaccatgcctggcctaatttttaaatttttttgtagagatggggtcttgctatgttgctcagggagctcttgaactcctggcctgaagcaatctttctgccttagcctcccaaagtgttgggattacaggtgtgagccatcacctgacagtttttaaactattgaaaatattgtataatccaagaattatacaattaccttttagctgttggaacattgttgaagcactgaaactaacatttactgaggttaattttgaaacccttgtaaaatacatgacgtagaagtccagttgaggctatcctgctactaatactcaattagaggcagtaaacaatgttctttcataaattattgatattttaacagataaattgtctagataacatgtaaaatgctagtcaaagttatatttttgaaaacatctatatttaaatgtatttgctcagtaccaatttggcatgactttttgttgtgaacattttatattttaaatcatttttattaaaaaacataatacacctaatgactttggaatgtgatattgagttcttatgactaaaatttgaattttccactattttatgttaaggatttgatttatatcacaaacaaaaatgacttctatgaaggattttgttttgttctctgagtattccctgttcttatttcttggatatgaggccttattttcctattgttggcgggggagggaaatataatttttcctctaacctcataaaattgtagttagaacagagcccagtgacaaaagacagattaacaagagtaaaatgaaggagtttagtaatgtgtgcagtgtacatcacatgagagtaacttcagtggaaagtaactcaaagcagtggctgagaattctggcttgtatagcatcttcaacaaaggacaatacacttgtagagaaatgacaggaaaaaggaaaacagttttgggcttccaaatatgggaaaccgtggaaggtaaatgtatgtgaagaaactaatggagtaagattagtttgcagattcctctggtgctgtctctgggctgctatgacaactagaattgtttccagtaaagggcaatttatatcctctgtttaagcaaaaaagtgggaggataggaagagctcttcctgtgtttgctgcttcttaattgtctttagctaaaaaataattttttatcaaagaggcatattttggggttacatattctgttttttttccactatagaaagctatgtagaacaagtgtagagtctattgaactattattaggcaaatatcctcatacctatcacctaggtcaagaaatagaactgtgcttttcattcccataattctttgagcacttcttattttctggcacttcaagatattccagctttcttgtactttctttgtgtcagccctggaattagctatttcttcaaagagctctggatcatttgattggaaaaaatggttttacaaactgacatccgggcaatggttgtgctcatcactaccattattatcttgctcaaccagataatcttttaaaaaagttttaaagcactgaaagaatataatgatcttttcagagtttttgagacatgcaatttgaataattatgatgataaactgttgaaaacttacaaatagaaactaagcgatggataatattagatggggtatcaatgtatgatgaactacaagtattacttttttttttttttttttttgagacagagtctctctcttgtcacccaggctggagtgcaatggtgcgatcttggctcactgcaacctccgcctcccaggttcaagtgattctcctggctcagcctcctgagtagttgggattacaggcacacgccagcacgcctggctaatttttgtatttttagtagagacagggtttcaccatgttggccaggctggtctcgaactcctaacctcaggtgatccacttgcctccgcctcccaaagtgctgggattacaggtatgacccaccatgcccagccaaatattacattttctccttaaattttagtatggacgctccctcccctgtggagtattgcctctatttgtatcaatagccatagttaccaggcgcatttccaaatttttttttttttttttttttttttagttctttaggatctttgtgaatattggttggcagtggagaatatagtcttaaaatgtgttaaaacatatttaatgtcctcaatatcacaattggaagcctatctaggggtcatttctacagaaaagaaggtattggagcaactaagcatagaaaccatcataaagctgtcactttaagtgatcaatatatgaactattttcatcacaaattattaaatcctaatgactttggaatgtgatattgagttcttgtgactaaaatttgaattttccactatcgtatgttaacaatttggtttatttaacaaacaaaatgacttctatgaagagttttgttttgttctctgagtattccctgtttttatttcttggatatgaggccttattttcctaagaatattgatagtgatttttttttgaaggcctattttgctctctgcattagtttactaattttggcttacaacttttaagttaaaggatttcctaaaatatttgttggtctttggttattcgcccatatttaagaataaggctgagtagaaatgagtgaatggagggcttattaactgataagtttcactaaagagcaatggggtggttagtgagttgtcatttatttggctgctgccaaaatgtcttttttctttctctctctttttgtttttgtttttgtttttttttttttgagacagagtctggctctgtcacccagcctggagtgcagtggcagtatcagggcttactgcagccttgacttctgtaggctcaagtgaacttcctgccttggccccctagtttctgggactacaggtgtgtgcaaccaagctcggctaatttttttgaattttggtacaggcaaggtctcactatgttgcccaggctggtctcgaacttccgggttcaagcaatcctcccaccttggcctcagaaagtgctgggattatagctatgagccaccgtgcctggcccctagatgttattgaggtctttctcttggacattcagttttcctagagttgaaccttccagtttcttgcctggggcgcatatatgcctgactcctacagttttaggaaaaaagtgagttatagctgagggccttatcgttctgtaggtatgcatatgtggtatacatatgtagtaaaatacacatcacataaaatttaccattttagccatttgtaagtatacaattcagttgcattaattacattctcattgttgtgcaaccaatctgcagaactcttttcatcttaccaaactggaactctgcactgattaaacagtaaccccctggttgcctgagtccctggcaaccacaagtctactttctctattattttgacaactctaagtttctcatataaatagaaccatatatagtatttgtccttttgtgactggcttatttcacttagcttaatattcttaaagtttatccacgttgtggcatgtgtcagaaattccttctttatgaaggctgaataatattccattttaggtacatattatgttttgtttactcattcatcagttgatagacacctgggttgcttccacattttagctatagtgctgtggtgaacacggtatgcaaatatctgagaccctgctttcgattattttggctatgcatacccagaagtgaaattgctggctcacgtggagttctatttttaattttttgaggatgtatatacactttcatgtaatcactccttattgagctttactgtctaccacatctagtgttcctgagtgtggaaattctcttgttcacctcctgtcctcactcccttccaataagccatgtcttgtttggaggatgggcatagagttgagagtagtgatctggatatgtggggttggaaaggaaatttgagagcccaaaattctgcctgtgaactttgaactcaattttccaatctcctttgctacagctaagctctcccacccacatccggtgttttcctggaggctgtaggtaaatgtgtcaaaaaattcaattcattgaaagccagttcacttaaatgtccaacttgcaataacttttctattacctccttttttttttttttttgacggagtttcactctttcacccaggctgtggtgaagtggggcgatcttggctcactataacctccgcccccggggttcaagcgattctcctgcctcagcctcccaagtagctaggattataggtgtgcaccaccacgcctggctaatttttgtatttttagcagagacagggcatcaccatattggccaggctggtctcgacctcctgacctcaggtgatccacccacctcgacctcccaaattgctggaattacaggcgtgagccaccgtgcccggcctctattacctacctccttacgtttagttatcattttgtctccataaaagcattttaaggcaaattcaatttgattccgttccagtttccttgctgttgcagctagagtctgaggggcccagaggaaaaggaaaacccagaggggcataagaagaatatagaatattcatttttattcctgaggaagtacaaccaccatggatggaaatcagaagtcactaactagctgtttacttctgggcaaatcttttggctcgttggcccgaaaagtgcaaaacgagggtcacaattttcattcacagattgtatgtgtttacacacatactcacgaacgcttagcaaagttgaacctggagcaaatgtgttaatagcccttaaagggtcagtgtatgacgtcaccatagtaacaacaacagtgcgcatgcgtttttttttaaagagccggcgtgctcccggctcggctcagctcgcccccttccgtggagtgctgcgcccccgtttccccaggctgcccctcccagcaggagccaattcgccaatcacagccctccttttcctgacgtcattggcgcgtgccccggtttcaaaagctcgggggcgggcttctgagttcgcgcatgcgcctctgtgcgtttgtcccatgctggttccgtgagtctggccttaggtgtctcgtgtctggggttgatccgagctgtcgycgccgccgccgcaatgggcaaaacggccaactctccgggttcgggagcccgacccgacccggtgcggagcttcaatcgctggaagaaaaaacacagccataggcagaacaaaaagaagcagttgaggaagcaactgaagaaacccgaatggcaggtcgagcgcgagagtatcagccgcctcatgcagaactatgaaaaggtgaggccggcgctggggagggggctcgggccggccagcagcggggcagcgtctcactgcggcgaggagttgcagagtggaggcggcggatctgtcaccgggacccggccrggaatgagaggtcacgccgggtgccacagctcaaacctctgcaccgttctggccactcttctgcttgccacactgttcctaaaaaaataatagaaatgcggccktacctaagggtagggagactaatgctgtaatagctacagtcatattcatattaataatactgatgacaatagtggtaataatgacacctacatttttaagcactcaccatgtgcttacagtaattgtttgacttgatctgaggtatggatattaataatcctatttaacagatgagataattgaggttctaagaggaatgaaacttgtccgaatctttcacgcttagtaggtggygtggaattggaagctagatccatgtctttctaatcccaaagcctttgcttttaaccatgaagccagactgcatccctcaacatcatctatgctccttcctgtggccacctcattttctccacaggcttcatgtccccatccaagaattggcctagaaaagctggaccgctggtctgtttctgtcacctatcatccccacattgtagctggtgttcccagatgagtatacctgtaatgatcactttgacctcctgacttcttcccccaacctccagactccacaggtctgtcaattcctcttttccctttccctaaatcccatgtttgttggtcttcacccacatctttcagcttctcagcccccttctagtgcagtacaatcagggatttaacagatggaacattcttgtaactaaggttgccattgtaacaaattaccacaaacttggcggcttaaaacaacagagatcttgaggtcaggagttygagaccagcctgaccaacatggtgaaaccccgcctctactaaaaatacaaaaaaattagctgggcctagtggtgggtgcctgtaatcccagctactcgggaggctgaggcaagagaatcgcttgaacccgggaggcagaggttgcagtgagcccagatcgcaccattgcactccagactgggtgacatgagtgagactctgtcttaaacaaacaaacaaaaaagcccagcaacaacagagatttaccttgtcacagttctggaggccatacgtctgaaatcagtttcactgggccaaaatcaaggtgtcagcagggacttgctccctccagaggttctaggggagaatctgtttcctgcctcttgtagcttctggtggctgctggcattccttggcctgtggctgcataactccagtctctgccttctcctgtgtcagtctatctctgttcctctgttataagggcgcttacgattgcgtttagggcctacacagataatccaggataatcaccccatcccaagatctttaatttaatcacatctgaaaagtcacttttgccatgtaaggtaacattcatcccttccagaagttaatacatggacatgagttgggatcattttcagcaccacatcctagctccaccatctcagcagaccgtagagctagaaacctaggagcagtcttagctacttctctcttacctactcttatatccagtcggtcacactgctgatctgttctgcttacatttttcaaatgcttcttcatccctactgcattgtcttcagtccccatcatctcttgcctggattactatagtaaatattgctttcaacagggatcagcaaactttctctgtaaatgatagtgaatgttttcagctttgtagtcctaagggtggaactactcaattgttcccttgtaatacaaaagctgccatagaaatacttaaatgaatgggtgttgtttttcagtaaaactttaattagtgaaacaggtggctgatgggctttgtcmcctaggccttaaaccttttaatttgtcctctgtacttctgctagaatgattctttccaagatgaagatctaatcattttactgccgattagaacccttccttggctcacagttacttttagaaaaattgtcaaatacagcgtgtcaacatgttctagtctgctgcagagtaagttatttgtggtcaggctgacctggtttaaatctcactcttcaggtattggctagccaggtttcttcatccctctaagtctcagtttcttctttcaaaaaaccgaagttattagccacccagagtgttgtaaggcccaaatgagataatgtgtatacaccaagtggtacatgataggcatatatgaaggaacagcttgcagttttgtgaattgtacatgcttcttgtgcttctcatcctggtacttgatgtttccactgtgtgcagtgagcatacccatctgcccactctaaggaaaggtactcttccttcaagatttagtgcaaacttctcttcatcacctcccctgaccgagttagggctactgtgcatctgtagcattttgtagatacctttatgacaacatttatcaactgtctgcgatgattggcttctttaacttttttaaaaaaactctcctactagaccatgaacattcaaggtcagcaaccagtgatacactcgtctttgcactccccagagtctggtagcacagtgcttgtccttgaataggtgctcagtcagtgtttagatgttgtttgctgtaagactagacctttcccaggtggctttgctctggttggcagcattggattattcttttttgtttcttgtaattgtgaacatttatcaaacttttattcatgctggctttccgtatactcaccacaaataaccctgtgaaattgttcccattatacaggtgagacaactttaaggcacagcaaggttaaataatttgtgtaaggttaaacagctaagaagtgaaaaaggagttctaagccaggtagtctgataccagtgcaccaaaccagtaggctttactgcattgcatttatttaaatcccatttgtttcattgttgaaggagcagctttttcccccgctaagcattgttctgttttacttctttaattttagaaatattttcttaagatttggttgagaaataaatgcagtgtgaaatcagttgtcaaggttagcaatactaggatataattatttgaatagcaggattatcattctctaggtaaacaaggtgcaggccctcactatgtggctcctcaggtggtagcattgtacataaaacttactacatagccatggtacacaggtggtgctcagtagcctcactggtgaactactgaacaatttgattccgaaaccttttaaaacaatttgacaggcacttgtctaggcgggtgtgagtatatatggaaaaaaaatacgtgcccaagtccctagggaacctgggcatgtaggggttgatacagtttgacacgttatattagtatgcataaaatgttataatagtaagtttgtaacatgtacctcagtgctgtggagttagaggatggtgtaattaggggaagttgagttatcctatactgagctccttctggtcagatgcattacaaaaaacatgcttcttctgggtatgcttcccttcctcctggtggttgcagcctcacgtctggcttggggagctgatgtgggctggatttcatcccctgcatctcagtcttagcagatttcattgtggtgcatacaaactgtccagtggtttgcagttgccaagagtggagctaagctttttttttttttttaagatggagtctcactctatcacccaggctagagtacagtggcaccatcatggctcactgtagccttgacctcctgggctcaagtgacccacccaactcagcctcctgagtagctaggactacaggtgcatgccaccaggcctggctaatttttttggtaatttttgtagagatggagtcttactgtatttcccaggctggtcttgaactcctgtgctcaagcgaactgcccacctgtaattccaaagtgctgggattacaggtgtgagccactgtgcctggtggagctagttcttgaatgatgagttcatcagatagaaaagattggcaaggatgttctaggtggagggaacatggggaaatacagagaggtgaaaatgcatggcattctttgagggaggaaatgctccttggagtgttggatgcattcctgagttggcttcagatgggttcgagaagaaggttggactgtgatgacattggaggctgcagcatgcagtataatggcttcttaaagtgtccacatcctaatacctggaacctgtgaatatgttagatggtaaggggtaattaaggttgctaatcagctgaccttaaagtagggcgattatcctggattaggtgggcccaatgtaatcacaggtgtccttagatgtggaagagrgaggcggaagagtcagtgtcagaatgacgtgatgtgagaaagacttggagtctgttgctgactttaaagacagaagagggtcaccacctaggaatgtgggcagcctctagaagctggaaaaggcggggaaatggactctgccgtagagtcatcagaaaataacgcagccctgctgccacctagattttagccaagcgaaacctattgtggacttttgacctccagagctctaaggtaatatatttgtgttggtttaagccactatttgtggtaatttattacagtaacagtaggaaatttatacagaggccatgctcaaagactttatctggaagccatgggaagtatgtggcgggactctgtatagagagaatatatctgagctgtaaaggttggagggtaagagatcargtaggagactggagactattggtagagtctaggtcttgggtcctttgagaggcagatgacaaaatgggattgggtgaactggagctttaggggttacaggcacaggagggggaatgtccgtgaaggctgaaggagagggaacaggagtagggagggaaaggagagaaggatggaaggagcagcaggtaggaaggtaggaagagtctcagactgcagcacagttccaagaaagattcagccaggctgatggggagtcactgatccaaaattgtccatcagaggaatccccgggcctgcagtagcactgctgagccccgccattgactaggagcagcccgggggaagcatggcttttccatggtgggtctagaggaggcacagctggcattgtcagtcaactatgcttctcacagcaggagggtggtgtatttctaaggggtggtgtgtgttggaggggctgctggaaaactggggattgaggctcactgagaaatgttgagctagctgtgttagttcagcagctgtttttactattgctgaatgactctttgcatctgggattcatttagactgtaatcagctgtactgcatagaaactgcattcaaatcctgattttttttttttaaatcaaaatttggtctggtgtagttgaggcggtttgctgttcttctcttgacggcaacaggtggagcattctagggcgtttcaatgcttttttcatcaggcattattcactttagcgagaaataggcattaccagagagttgtgagaagtataagaggatggtcaaatgtcacccttttctcctccgcttttcaacttttccaacagccgtgggaagcctttaataaggaccatccctgaaatatctcttccctgaattcagaagaatagtgagacagatttgtagactgagtatgagtattatggagatgtaagtgatttttcccccctaagaaagggataaagggaaggagaaagagttatttttttgaggtagagtctcgctctgttgcccaggctggagtgcagtggctctatctctgctcaccacaacctctgcctcctgggttcaaacgattctcctgcctcagcctcccaagtagctgggattacaggcgcacgccactgcatctggctaatttttataattttagtagagacagggtttcgccatgttggccaggctggtcttgaactcctgaccccaggtgatccgcctgccttggcctcccaaagtgttgggattacaggcgtgagccatcgtgcctggctgggttattttctttgtaggaaccgtagccatctcctgctgtggctgctatgtaatccttggaatataacagaatatctagagcagggtcagcaaactctttttctgtaaagggctggatagtctgtgttaggctttatggtccatacagtctccgcaacaactacatagacaataaataaatgaattattgtagttgtgctcgaataaaactttacttactaaaataggcagcaaattggatttggcccgtaggctgtagtttgctgggccctattttagaacatcaacagaatcaaaagttccttttcttcgtcttcttttaaagaatatggcgcctgtaatcccagcactttgggaagccgaggcgggtggatcacgaggtcaggagatcaagaccatcctggctaacacgatgaaaccccgtctctactaaaaatacagaaaaaattagctgggcgtggtggtgggcgcctgtagccccagctacttgggaggctgaggcaggagaatggcgtgaacccgggaggtggagcttgcagtgagccaagttcgcgccactgcactccagcctgggcgacacagcgagactccatctcggaaaaaaaaaaaaaaaaaaaaaaaaggaatatggtatatagttttctgttgtaatgcttgattgaagagtgttggagcagtttcattcttctaaactttccctccaggaggttaactgactttaggaagatagatgtgctgtgcaatgttttgtttgaggagctcgctttgcctgtactgtgtctcttgctggggattgaagagtgtgttggcagcctgcctccttctgtaggcattccattccctttgaaaacagctttttagctgataataccacgagtgctagagtgagcyacacctaattttaatgccttgtttggaagattatcttctaattgaggttccttgctgggacagtatgttatttgaataaaccgttcttctaatgctggtacactgattctgcctcctttccagtgatatctgaaatgatttgtagggattaagacaatgttttaatatttgtattttcagcattggagggcacagagtaaacactgcctgggcaatgttaagaatcataggaaagatgtgtagattgtaaaatgaagtacaactgtcatccttttactgcctagagtgtaatttaaataaatgaaccatacaaatgcagctttttccttttgcgaatcatgtataatttggcagcatatttccagaactgagcagtagttcctgccttcagcatctgtaataaaataattctcctgagcagctgaaatgaaattcagaaaattgggtttgtgctaataaagaacatcagtaatgaatatttgaataatgtaaagttagcaaaatgttacttattgtggcttcaaagcatgacagacatttcccctgtgttgaaataatactcctccttcagtaaccccaaaatgaatagttatcaggttggatttcataggccactgatttatggttaaaactttgaaaggattgtgctaacaagaaatatttctccaactaatttcactcttttttccaaattgtgtgtatagaactattttcattgtgatctgtggtttgtggtaattttgtccttgtttcttaaattgakatcccttgaaggatgataggaagtaaattttcttcctaaaattgatgtggttggtgatgctttactgtgttcaacattttggaggtcagatagtagtatgtgtggtgtgtgtgtattgggtgacttttttttccttaccaattgaaatgcttacaaatgtatattcgattcagggacagcctcttcagggcatatttcgttacagaaggaatgatggcttttaattagaagcgatgattgaattcaaccctgaattaccaaggatgagctgggcaatacaatgtagagaagaaatggctgtgtcgtgaaacaaatgagttaccctgattcctttttctttttttccagataaatgtaaatgaaatcacaagattttcagattttcccttgtccaaaaaaacattgaaaggtaagtatatggtgatcttgggatgtgttattggatttcttggcatttttgataaatgggagaagatttagagggtttagcctgaaaaatcttattttggcaaattttgatatcatgaaaaccaatgaaaataagcaatattcaagttttaacagtacgttattctcattctttctggactaattaaaagaaaaacaagtttccagcatcctctgaataaaatgaaatctaattttgttagttaaaataagcaagggaacaaaccaagatgcaacaccctttgtatctgtttgctagggctgagatgacaaaatatcagactgagtggcttaaacaacagagactgattttctcacagttctggaagttggaagtctgggatcaagatgttggtggcattggtttcctcttaaggcaaaataagggaaggatttgttccaggcctccttggcttgtggatggctgccctcttgctgcctttttatttttggatacataaaaattgtatatatttggccaggtgtggtggctcatgcctgtaatcccagtactttgggaggccgaggtgggtggatcacagggtcaggagtttgagaccagcctggccaacatggtgaaaccccgtctctactaaaaatacaaaaattagctgggtgtggtggcgggcacctgtaatcccagctacaggctgaggcaggggaatcacttgaacctgggaggcgggttcatgccactctactccagcctgggcaacagagtgagacaccgtctcaaaaaaaaaaattgtatatatttacagtgtatacatgatgctttgaaatatgtatatgctgtggaatggctaaatcaaactaattgtatatgtgctaatattacctcatccttttgtgtttagaactcttaaaatctacttagtattttttcttttttcagtatattttaattaactatagcagtatatattaagagagatatataatagatctctcttttttttttttaagatagggtcttgctccgtcacccagggtgcagtgcagttgtgtgatcttagctcactgcatcctcagccttctgggctcaagtgatcctcccatctcagcctcctgagtagttggaactgcaggtgcatgccactgtgcctggctaatttttaaaaatttttggtagagatagagttttgccatgttgcccaggctagtcttgagctcctgaactttaaggaatctgcctgccttggcctcccaaagtgctgggattataggcgtgagccaccacgcctggcctacaatagatctcttgaagttcttccttctaactgaaattttgtatgtttgatgaacatcttcccactctccttacttcccccagcttctggtaactaccattctaccctctgctcctttgaatttggcttttttagattctacatataagtgagattatgtggcatctttattgctgtgcctggtttatttcagttaacataaggtcctccaggttcatccatgttgttgtaaataacaggatttcctttttaaaggctgagtcatattccatttgtgtgtgtgtgtgtgtgtgtgtgtgtgtgtgtgtgtatgtgtatgtatataacatatattttctttactcattcatggacacttaggttgatttcatatcttggcttctgtgaataatgctgcaatgaacatgtgagcacaaatacttttcaaagtagtggttttattaataaaccctttggattatacccaggagtggagtaggtggatcacagaataacttgtctctcttcacatggttttccctctgtgcatgtggacccttggtgtctctttgttcaagtttcttctcataaagacaccgtttgtgttggatcagagyccacccctatggggctctaacttaatcaacctctttaaaggccctgtctccaagtatagttatgttctgaggtacgaggcattagggcttcaacataggaattttgggggacacaactcacttagcctataataccatcctacagggatcttctaaagtataattcttccctccatgttgccaggtttgcaagaagctcagtaccgtttggtgactgagatacagaagcagaccattggattggctttgcaaggtaaagatgtacttggagcggccaaaactggatctggcaagactctggcttttcttgttccagtaagtacattgtcrttgggtcagactgtctgttatacaattttataacattctgtgcccagatgcagattatataaagagatgttttcatgttagatttcatgatagaytggctagaatgcrmgcttcatcaaacaggagccacatgtgtgtcttgttctcaccattttccccaggttctagcacagtgccttgcatgtggcaggcactcaataacttactgaatgaatgaactattgtgccttgacaagtcattacattcttgatggaagtggastgctccagtatggcaggttaaagtggttctgtgctgcagtaggactggtgggagacagtttctgctctcacccttgtgagcctgccagtggcatttatacttgccaccttgtttaggataaagctgaaatatgctcagtttaaggagctttaggcatttgttgagaattttctgggacattgctatcggtcttttatggcagcaaaacagtagagcttcttaggctttcacttccatctctgttacgttggtctcctaatttttcattcctataaaatgacccagaaaaatctcattttagtttttgttccaaatattgcaaaaaccacttttctcttaaatcctagtgtgtttttgcccccttaaaaaaaaaggctccctatagctagataattcagttactatataactacagcagctacatgggtgaaagtttatttacttatttttatttttttttgagatgaagtcatgctgtgttgcccaggctggagtgcagtggtgcaatcttggctcactgcaacctctgcctcccaggttcaagcgattctttctgcctcagcctcccaagtagctgagattacagatgtgggctaccacgccaagctgatttttgtatttttggtaaatacggggtttcatcatattggtcaggctggtcttgaactcctgacctcaagtgatgcacccgcctcctcctccaaagttctgggatcaggcgtgagccactgcgcccagccaaaagttttagtgtggttatttagaaaatgataaatattattcttaagtgtgttgtaaaggtctttgggttgtacatacctttcactgatagccagtttcctgatggcatggctctggcagcagctgaactaccgtggggtttcttttccctttcctctgagttgggggtggatggttstgatggaagataaacaaaatcatttactttggactggataaaacttgagtggtatgccttctgcttggaagatccctttgatttggaggggcaaggttgagatgcaggtcaaaaagctgacttctgatgacttactgaacatgaatttgctgtctttttgaggtgctggaagccttatatcgtckgcaatggacttcaacagatgggctgggggttctcataatatcacctacgagagaactggcctatcagacctttgaggttctccgaaaagtaggaaagaatcatgacttctcagctggtctcatcattggtggaaaggtttgtccttttgtctatgtccttcctttccttctgtaacctatactggagtactgtggccgatgacagggaggcagcagagacttcatctaaacagactgacctagaccagggcctcatgggatagtagcacttggtgtggtcgctgctatctacgatctggttgccaattttgcaggcccagaaagtccatttttttttgtcggggaatctgaattgattagcctctctaagacatatttactctaatcctgtaaagttatttgttgatattcattgggaaagatatttccatatatgaactagtaccttttaataaggtatctatctaagaggctgaataattcagaggattgctacatcagcagcgtaagaaaggaaggtagactctttagaggaatgtttatagtaggtcaagataagacctgctgctcacttttgttctatcttatagcacatctagaatgcctstatctgctagaatctccactagactgtgaggataaatacttcaatttttatgcaaacatgcacaaaagaagaaagaatagcatcacaaacccttacgtacctgttgcctaactttaacaattaacaacattctgttttttcccaccgcctccaggactgtgagaagtggttcttgtatcaaggagagaacctcggcttttttcagttcacaaagtacagtccttgagcggtgtcagagtctgttcaatgtccctgggtcctgaattaaagaatgagagtgattccagtttatgtcagttctgatccaaataggaaatcctgacttggagtattcatttgattatttttttttcttagcctcaaaatcctgggtatgaataagaatttagaactctgagctccttatgtcttcctgtaaagacttttatttagcccagaaatgtggatatggttcagaaatacaagggaaaagttatgtttatttccaagagtatctaaaatgttgtgatgaaatgcccatgcagatggcttttatagctttggtacacaggctgctgagagtgatgtgtctgtgtaatcaaaataaataactgttttcaggatctaaaacacgaagctgagaggatcaacaacataaatatactcgtgtgcacaccaggtcggcttcttcaacacatggatgaaacagtatcttttcatgctaccgacctccaaatgttaggtgagtcaaatcaattkctaatttaaaaaaaaaaaaagctcagacttaggagagagcccttatacatttttatgatagaaattttatgttagataaatgttatgattcaaaacaaacttaaaaattactgaaacattttggcatttgggctctaaacccagaaagtaaaagtagacttaaaaaaatcagaagaatgtatgtacgcttatatgtgaaattaggcacgttagtattagaccatgccaaggtttttaacacctgcttctaataacttgaaaggtcaaatkggcatttttttaaatgaactttttcttttttgctkgggaatactacctgatgtgtatttttaaatcaactttatctttgaacatttttgatttgtaggaaagttgcagtggagagttcctgcattatccttcagctggtttcccctaatttttttttttttttttttttttttttatacagagtttcgctctgttgctaggctggagtacggkggcatgatctcggctcatgggttcaagtgattctcctgcctcagcctcccgatagctgggactacaggtgtgcaccaccacgcccagctaatttttgtatttttagtagaggcggggtttcacaatgttggccaggatggtcttgacctcttgaccttgtgatctgcccaccttggcctcccaaagtgctgggattacaggcctgagccactgtgcccagccttcccctggtgttaatgtcttacatgacatggtacttttatcaaaactaaggttaacattgctacatcatataaattccagactttattcaggttttaccagtttttccgctaatgttctttttctgttttaggatccaatccaggatacccattgcatttagcctaatgtatattttacatatgatagttcaacttgcattttcctttttcagttcttgatgaagcagatagaatcttggatatgggctttgctgataccatgaatgctgttattgaaaatctccccaagaaacgtcagactttacttttctcagcaacacaaactaaatctgtaaaggaccttgcacgcttgagtttgaaaaaccctgagtatgtctgggttcatgaaaaagcaaaatataggtatgtactctttgagtcaatcaagataaatgttttttacttttttagtttagggatttggtattttaaatatctgttttctgggaattaagacattctatgagttattggttatgcaaagcatagtaaatataccagttaaaattacccaaattctgcatatatctttaaatgtcagggtacttgaatgtagcatttcccaaaatgtggtctgggaggggaacaaatgtttttccatagatgttaagaggtattttaccatttgccaacactacctcttaataaacgaagggagaagggatgaaatagcaaatggtgagtcaaagtgaaacagttttatttctatttctcacaacctttaatattttcagggacattgtgattgttgaaagcagtgggagggaggtggatgtagcttgctacatttaccaaattttttgggtacggaatcatcctttttagcaggattatgcagtactaatgtgttatggaacacattttatgaagtgcattaatatttagcaaaatacctttcagtctaaaattctagcaactattgttttgtcttggtctcattaaaaactagagcttaaagtatatgtgttacagtaaaagtatgtatgtttgtgatatgcaagtagttggggaaatttttatttatctctttttttcgagacagggtcttgctctgtcacccaggctggagtgcagttgtgtgaatatagctcactacagccttcaacttctgggctcaaacaatcctcctgcttcagcttcctgagtagctgggacaaccagggcataccaccatgcgtggctaattttaaaattttttgtagagttgaagacttactacattgcccaggctggtttcaaattcctgagatcaagcaatcctcccactttggcctcccaaagtgttgagattacactcaggcatgagccactgtgcccagctgggatatgttttaagttgtattttcatatgacaattagaagcatatatatttggtatgaatcactgcagacttccaggagaaatgttttccagtaaatataaagttggattttttgttgaagatagcaatgtaaattcaactcttctattatttatatcttaaaatttttatttcttcttgctctgaaatgttagcctaaaaagaaatagatttggaaaatgaattgtgttatctggaaattccttaaatagagaaaatatgagtattcaggcccatcttgaccttgtataatgtatgtctaggatttaaaaagcctgagacgaagaggccagattctttgcttctgggtgatcttggggaatctgagtactggtatctttgactttcaagaacttgggaatggaatagtaagatatgtgaggtatagtttttttcccttggcttactttcgagtggacattgatctcttaaagagttgagatagctrtgaaaatttttgtgacaattaacaattaacttgaaaatgtaaagactgcttgtctaggatttttyacttttctcttttttctgtttgcctccagcctatttttaatattcatcagacagatttttttaatcattagatgtctctaagacctttcataatttatgcaagttaatttgtacgtattatttcctatccccaatttctgtaggtaagagttggttattttctgtaaattacaaagttttagaaaaaaactacaaagactttgatattatttcacaaatgatttttgaaacccggtcccatcacttataaaagtgtggtggacaaaattttcagaaaaaaattttggaaggtagacatgtattgacataatttacaaaacctcaggttatatgataatggctgcagtattctaatattccaaatttataggaaacataaaaragcagatgctcttaggaatttcatctaatgtcaatgttagcttttccactttagtagcttatcaatgtggttcatacaccaggagagataataatcaagaatattttaaggtgttagagagtatctactctcaaattgtgaaggacacaacaactaaagaaaaattagatctttctgaagttgtaagtcagagcatacttagaaaaagtatactagtgttttcattatgtkgttatatatagacaactggtatttctaatgattttatttttgagagaatatgcctttgggccatagcaatttgctgtttttcagtgacaagttgaattctatggtggattatgaaaaatttcaaatttgagatatgtcatgagcttatgttattaggtatatacaaatttagaattgcattgtcaatttgaaacattaatcattatgaaatgcttcttttttgcatgtatgtgcttattttctgtggacagtctgtcttttttggtttggtttttttgcctttttcttattggctcggaggagccctttagataaattaattatttatttgtaatacgagtagcaaaacacttccctactcccggtgttttttcattttataaaatgtttcttttcatctttactaattcttttttgccttaaagtctagtgttttttgagatggagtcttgctctgtcgcccaggctggagtgcagtggcatgatctcgggtcactgcagcctctgcctcccgggttcaagcaattttactgcctcagcttcccgagcagctgggattacaggtgcccaccaccatgcccacctaatttttgtattttgagtaaagacggggtttcaccatgttggccaggctagtctcgaactcctaacctcaggtgatccacccgcctcggcctcccacagtgctgggattacaggcctgagccattgtgcctggccaactttaagtctagtttgatattagtctacctatagcaactttctttgagttagcatttgcatggtgaatcctttcccatccttgtactttctacattgtttacaccctatgtttttagatttgtctttgtgagtagcatatttttaatctggtatgataattgcttttgacagttaatttaattattatttgggtccctttacttcttcctacctttgtgtcttcattgttaagtattttaattccacgtgtatcttaagccccataagccactgttatcactgtttgcaacatcagtatttatttagacttacccagttcttcttcttgtattgtcacccttccacctgagaatttttcttttgctcagataatttcctttttagtgcagacttgttagtgaaacagcgttttgacctttctgaaaacctctttatttcatcttcatttttttttgaagcctatcttggcagtttttttttcctcttcaaagacatctttgttgtactctaagttccattatttctgtcaaagtcatctgacagttctcttgttcctttgaaggtaattttttctttatttctggccagcaaatgccttaaggtcaggtkgtcttgatctggtctagcckggcaattagactctggggttatcctatttctggttkgtcctgagactkggggtataatcttcacagatggggcatagcctttctcagggtctcaaccaaaagactgaggtatctaccagggcccctctgtcttggcaagttgtgaacctcgtagcattgtgaccctgccagaatctctgctcagttctgtagcttcccagttggttggtttttgcttgtttttcctcattttgacttatgtgtgctctgtttaggggttggcatgttcctcaagggtaaattgtatgaaaaattttagattcagttttccttctctctgggacttgcgactgatgtgtttaggcttaaggctgctaccttgtttctcccctgtcttgcaatcagcaaatgcttttggggagaaaagtgaggttgttaacagagggcttggctcagggcatttctgttttttcctttagcacctcaagtcctacctgccttggtagctctcagatgctgccagtctttttgttttgttttgtatttattcctgcttttgtagttgctattctaggccagagggttaatctgatacaagcagcttcttagccctgcaattttagcagctgatagaaattattgcctagctccattatttcatcagggtttgcaaaattgtgatattttaattctattatttcttcattagtttaaatactttcatatcaaagagctttcacatgaactatgtgattctgaggtacagttcttacaggaaagccagaatattagaatgtatgctgtaacaccaatgagttggttccctagtattttctgaaggttagcagtatttgtttttggtggggggtggaggttgtgtgtactaaaaatgaactcagatttaatgataattaatgatgaattaatgatacttaactcatagattaaacatctttttatgtccttgaatcaatagaaatttttatatttaatattcatcttgtgtcatcccaaacttcgctagtagatgcttcaagttattatcttgattcttcagatgcattttagtaatctttggactccttgctttctggtgttctaagtttatcttatctatttccagttctttttttttttttttttttaaggttatagattttcttttttttttttttwaatttttttttttattatactcttaagttttagggtacatgtgcacattgtgcaggttagttacatatgtatacatgtgccatgctggtgcgctgcacccactaacttgtcatcttgtcatctagcattaggtatatctcccaatgctatccctcccccctcccccgaccccaccacagtccccagagtatgatattccccttcctgtgtccatgtgatctcattgttcaattcccacctatgagtgagaatatgcagtgtttggttttttgttcttgcgatagtttactgagaatgatggtttccaatttcatccatgtccctacaaaggacatgaactcatcagtttttatggctgcatagtattccatggtgtatatgtgccacattttcttaatccagtctatcattgttggacatttgggttggttccaagtctttgctattgtgaataatgccgcaataaacatacgtgtgcatgtgtctttatagcagcatgatttatagtcctttgggtatatacccagtaatgggatggctgggtcaaatggtatttctagttctagatccccgaggaatcgccacactgacttccacaatggttgaactagtttacagtcccaccaacagtgtaaaagtgtccctatttctccacatcctctccagcacctgttgtttcctgactttttaatgattgccattctaactggtgtgagatgatatctcatagtggttttgatttgcatttctctgatggccagtgatgatgagcatttcttcatgtgttttttggctgcataaatgtcttcttttgagaagtgtctgttcatgtccttcgcccactttttgatggggttgtttgtttttttcttgtaaatttgtttgagttcattgtagattctggatattagccctttgtcagatgagtaggttgcgaaaattttctcccatgttgtaggttgcctgttcactctgatggtagcaatcagcgcgattccgtgggcgtaggaccctctgagccaggtgtgggatatagtctcgtggtgcgccgtttcttaagccggtctgaaaagcgcaatattcgggtgggagtgacccgattttccaggtgcgtccgtcacccctttctttgactcggaaagggaactccctgaccccttgcgcttcccaggtgaggcaatgcctcgccctgcttcggctcgcgcacggtgcgcacacacactggcctgcgcccactgtctggcactccctagtgagatgaacccggtacctcagatggaaatgcagaaatcacccgtcttctgcgttgctcacgctgggagctgtagaccggagctgttcctrttcggccatcttggctcctcccaaggttatctccagttcttataaaatccttctagcaggatctggtatataaagaccatagtctaagtgctaacaggcatggtcattgtgttaagctttacagtggacaggcctttttaaaagagttcatgctgataattacaaatggtatttagaattacaaggtttttattaagcctcatttaaaaaatatgtatctcttttctcttctgccaaacattcattcctaaagacttctgtttcatctgtcagtgtatctaaaatagtttcaggataataccaatattattactgataatatgattacttataaaagtttaagattcctttgcatttctctttttctccttagacatcccagtaaagatgtaggaatcaaattccttcaaaggcatttcctttgaaataattcctttgtcatttagtcatcaacttgatatatatttgggcttattgttttcattttgctcttttgtaaaacttcattctgtttcccataattccctatagatatggcctatttcttctttaaagactgtttttttagagcagttttaggttaatctcaaaattgaaaggaaggtacagagatttgccacatacctgctgtccccatgcagcctctgccattatcaacactcttgctagaatggtggtgcatttgctacaatggatggacctatgtttttgcatccttatcacccaaagtctgttactttagggttcactcttggtgtggtacagcccattgatttggacaaatttatgataacatatgtctactgttatagtatttcacagtatattcactgccctgaaagtcctctgtgctctgcctattcatttattcatctcccctggcagccgctgatctttttactgtctccatagtgtcatcttttcagaatgttgtatagttggaaccatacagtatggtagccttttcgtattggttgctttcacttaatattacgcatttaagattgctccatgtcttttcatggagtgatatgatagctcatttcattttagcactgaataatattccattgtctggatgtaccacagtttatttatccattcacttactgaaggacatcttgattgccttcaagttttggcaattatgaataaagctgcaataaacatccttttgcagatctttgtgtggacgtatgttttcaactctttttggtaaataccaaggaacgtgatagttgggtcaggtactaaaagtatgtttttttgagacagagtcttgctctgtcgcccaggctggagtgcagtggcataatctcccttcactgcaagctctgcccctcgggttcatgccattctcctgcctcagcctcccaagtagctgggactacaggtgcccgccaccacgcccggctactttttttgtacttttagtagagatggggtctcactgtgtttgccaggatggtctcgatctcctgacctcgtgatctgcctgcctcagcctcccaaagtgctgggattacaggcatgagtcactgcgcccggcctcaagtatgtttggttttaagagactgctatactgtcttccaaaatggcagtatcattttgcatttctgccagcagtgaaggatagttcctgtggctccacatccttgccagcgtttggtgtcgtcactgttctggattttggccatctaataagtgtgaagtgacatatcgttattttaattaacttttgcctgttgacatatgatatggatcatctttaaattgttttttatttttttgagacaaggtcttactctgtcacccaggctagagtgcagtgtagcatgatcatggctcactgcagcctcgaactccctagcctgaattgatgctcctgcttcagcctcccaggtagctgggactataggcacaygccaccatgcccagctaacttttgtatttttttgtagagatggggtttcaccatrttgcccaggctggtgtagcatcttttcatatggttattttttttatctacatatcctctttggagaggtgtctgttaagatttttggcctccttcccccttttaaaattgggtgtttctgttcttattgttgaattttaagagttgtttgtatattttggagaacagtcctttatcagatgttttttgcaaatatttttctccattccgtggcttatcttctaattcttttgatagtgtgtttcacagatcagaaacatttaattttaatgaagtccagcttatcaattcttccctttgtggatcataacttagtcatatctaaaaccagttgacttgtagtttttggtttgtctgtccctcctccttttttctttcactgtaaacacagacacacatgggtgggcatgtatatggatatataatgtatagccccctgataaatagtaccaaactatctgtactattctgccccttacctctttccttaacagtgtgtcctagacatcactcctcagcaatatatggatagaatcttcattccttttttacagttgcataataattaatgtatgtggctgtgtaattgttcatactgcaagtccctactgatggacatttgggttgattttcatcattttttgcttcataaataatgccatatatttgtgtgtgtgtatatgtgtgtgtttaaaaccagagtaatgttggaataaagtaggtttattaattcaaagagtaaatgcatgtatatttttctccaacattttataatgaaatttcaaacatatggtacattgaaagacttctaccataaataccttataccaaacacctagatactatctaatggtagcatccatttacttgctttcatccatcccttctatattaacccattttatttttgatggatttcagggtaaattgcagatatctgtattctctccaaatacttcagcacacgtattactgagagtttaatatttgaacagattttttttcttttggcataaaatttgtgtaccatgaaatatgaaaattgtaagtatacagttgaatttgatgaatgtgtatatctcagtaatctaaagccctaatgagatgtggaatactaatcagcccagcaagttctcttacacctcttcttagttaatccttgaccctgcatttttagaggtaatcactgttcttgtcatgctttgtttgacattgatttacaagggattttgaatgtgttttaaagtaatgtgttgaatttgtttcctaagggacaatagagaaaaattctttttttggtgtatgtgtgtaggraatttgcttgagagatgtgccactattaaaacttgtttccttttttggtctggatttcagttacttacatgacrtattctaatgtttttcttttccgtaattccacaagcacccctgccactttggaacagaactacatagtctgtgagctgcagcaaaaaataagtgtgctgtattcctttttgagaagccatctgaagaagaagagcattgtatttttttccagttgcaaagaggtattggctgtttattttgctttctgaacgtatgttgaatgtcccttttgaaatggcaaatcaattagacaaattattatattgtacgagaagtacagtgctaggtgtggtgagggatctttcgtgtccttgttgcaaaggaatccgtggctgagactttcaactccacaaggacagaaactgtgtcttttcttaggtattatgttaagtgctaacaatactggaaatgtagtcctcaataaatattagtagaatgaataattgttatccaagctaagcagaggtctttataatctgatacctcccttaccctccaagaatatgggaatgaatataccatttatttccatgccgtatatctttgtttatgctgatctgtctggaatgccctccctgcatctcttcatctaaatctggggaaatacttactttgaggctaagttcaaatgttatgcctgaaagtccctttctgacactccctttttaaagaatcagttgttccctcccctaaccttctgaagtgttttgtttatatcttagttaataaacacttcttgaacactagccctgtgctaggaataaagaataaggatttcagagatgtctaagagaactttgtctcctctcttaaggagaagggactacggtctttgtgcatgtgtgcgtgcgtgtgcctcttctcctgtactatatttcagattcccaatgacttaatagggaatgtagtagatcaattctagatttacagcttttgcaataactttccatgataaatatgtagatgggtttctctctagcttatgggaagttaagtggtgatctgatgctgttgtctactgaaccttattttaccatgtaaagaatgacttcagccttggtgcggtggctcacgcctgtaatcccagcactttaagaggctgaggtaggaggattgcttgagtctagaagttyaagaccagcttgggcaagatggcgacaccctgtctttaaaaaaaaaaaaaagacttcagtttttcaaggaccgattttagattttcaaagcttccagtctcctgggagcattcctcaaggcaacttggaagtgtatcctgagcagtagccaacaacaaaacaataaacttcacatctcctaaagaagagttagttggttttggcatctaggtgctaggaaatgattctgaaagttctatttaaagttctgtttaaagtttctactctttagagtaggagatggcatcaaaggtggccttggcatagttgcccagggtggcaatgcagcctcttggtcgaggtatagcaattgtcaatacccaccatcagcagcagcttcttgggcatggggctgagatgataccagtgcctcctgaggtggggataagtctcaccagcacagagagggtctgtcaccctgcaagggctggtgagcttgccgatcttgttccccaagtagcctcttggcacaaggacaatggagagcttggccaggataatggctcctcaaatggcagtggctacctccttggagcacctgatacccgtatcagtgtggccattgtagtccccartggcaacatgccttgaatccagtgcgttggccagtgtgggccacttttgcgccatgtaatctttgaaacctcattcttgagagatgcccccaggaaaatgtcaaggacctcagactccttgatgggcaggagaagagatagatctcctccagggacttggtcttcatgtccttcaccaagcagcacagctttgtgactggcatccaccccttggctttgcctcagtggccttggttgcaggtgctattgctgaagcctccatcgaagcctctgtggtttccaattccttgtcccgtggacccttccgctgcaccagcatcatctgccatttgatgttttcttggagaagctgtttttacatctttacgaaagaaaggcctaagtccagctatctctgatacttgcctgatatattgtcccagaatcagaacctccctggcagtagcaaattgcatttgagaaagtgaatggctagtgattgggtaacaagcaattcacttggtttcccattctttactgtcagcaaaattgaagagagactttaatggggtctttctctttaattgagcgactggatcaccaaaaattatttggaataatccattatgacttttggcctattttataggagctcagaattaaacttcctttgagtttgttttatttatgtgaacagattttaacccccatattagagaaaataaaataatgctgaactcttttcagtctagtaatccatagtatccatttatgggtacaaaaagagaaccagaacaattagctctatatagtcccacacattgagatatatttacaatgtttttatttatgtctaacagttttttaaatcaaatcccaacatatttcttggtttgatcagttctgtattactaattattttaataattgctgagtctgagaggaaagttcagtcagcctatggccacaggaaattaaaataagttttttcttttgtagaaaatgagttatgataacatcaataaaaggctttcaagcttcaaacttaagatgcaattctgtgacgttaggaaatagaaatgtgaattaaaggagggaaggaaattaaattgcttgtgattaaataagagtttctttactttttttacttggttggaattgggtatcacattgctctgctgttgagactctgtgggatacgttgatargagaaaagctttattgctgccatctgccataagcaaacttattcttctgttgatgccccaggtccagtatctgtaccgagtgttttgccggctacgtcctggtgtttctatccttgcactccatggtcgacagcagcaaatgagaagaatggaagtctataatgagtttgtccgtaagagagctgcagtactctttgctactgatattgcagccaggggtctgggtaagaaaacttcctatcatgaaatttctgtgattgtgtgaaatgtaatttgcttataaagtatattttgggaaatctgatagactcaaacacttgggtttcttttcttattttgtaagagaaaagtaagtagtaaattggtagcagttgactaacattaaggatgtatcagtgaaaatttccacagtatttgcatcttttttactatttcatgataatcacaccatagaatcctgaggaacctacaaaatcaaagggggttaaaagtttaaagatatgaaaacaattcccatttctttgaaaattggaaacttgtttatagatactgaactcatttaacaagaaaaatcagtgaagtccatgttttcatcattctaatttttatctgataaataactacatttagcgtagttaaatttattttcaaaasctgctttgttgattatacaactcctggctttgtgggaatgggayggggatggacgtaactagagaggaaaactagacttaggaacaaagggtgagaataaataggtgataatttgaatccttcagtcacttaattttattgtattgttaattacagcaaatttgaagcataaacaaaagctgaatatgtttaatctaccctcatatacccagctttaacaattatctttttcataatcctccccctgtccctcttggagtactctaaagcatatctcagatgccatatttattagtataggctggagtacagtagcatgatcatagctcactayagcctcgatctaccaggctcaagtgatactcccacctcagcttccccagcagctgggactacaggcatgcgccatgcctgactagtttttattttacttaattttttattatgctttaagttctggggtacatgtacagattgtgcaggtttgttacataggtatacatgtgccatggtggtttgctgcatccatcaacccgtcatctacattaggtatttctcctaatgctatccctcccctagtcccccacctccagacaggccccagtgtgtgatgttcctctccctgtgtccactcttcaactcccacttatgagtgagaacatgcagtgtttgggtttctgttcccgttggtttgctgagaatgatggtttccagctttgtccatgtccccattagaagtggtgctttcgggttattaaayattasggtatttcactgtttgtccgacacaaagcaatctgtctcttccgtgtcagatacgaagtaatcttcatattcaaacagtcattaattttagttcattttktcaagagaaatgtttactrtctcttggttcatgcaattaattttatttttaatagagttcatagatgatatccatcagtttgatgtgatgaaaagtcctggcaagcaatattttaagataaaaatagtgcagcagggcagatcttgcaaccagtttcttaacttcacatcccttctctgtagatttcccggccgtgaattgggttcttcagtttgattgtcctgaggatgccaacacatatattcacagagcaggtagaactgccaggtaggtgtactgactaatttcttttcttttgctactatctaaataacaaagcatgcttttccaactgcagataaacgaagaaaggaatcaggtaagtgagtgctggtttggcattttgtggtgtgagttgacagctactgtaaatcattatggctaagacttgattagtgctgcaaaaaatccataaaaatcttattttagtttgtttaaactttcttgtactttacttttcagcaaaactgctcattgaaagtcatctcattgaatcctaatgacctgtcagttaggtctaggactgcagtagtcctcacttatcctcaggggttatgttccaaggtcccagtggatgcctgaaatctcagtaccaaacccaatatatgctatgttttttcagtctagtaactgagacagctaagtaacaagtgggtggggtcttaagcgtgcatatgctggacaaagggatgattcacattgtgggcaggacacagtgggatggtgtgacattttatcaggctactcagaagggtgagcaatttaaaacttatgaattgtttatttctggaattttccatttaatatatttaatattttttgggccttggttgactgggggtaactgaaaccacagaaagcgaaaccacagatagaggggggactacttactgtattattaaatccctattttcaggtgaggaaactgaatctttgagcagttaaacaatttgttcaaagatccacagagccaggatttgaacccaggcagtctggcttatctagtctagatcttgtgctcttaccttctaaagtataggctaataagaggctaagtgatttggaatcatagatatctctttttcctttcttcctagttcaggaaacagagacattgctgaagaccactccctatctctccttcttcctatactccccacttcctcccaaaagtatcctatgtttgctcaagaggtatgaggaactgtctagaaaagaatgtagtaggctgggcatggtggctcatgcctgtaatcccagccctttgggaggccgaggtgggcggatcacgaggtcaggagttcaagaccagcctgagcaacatggtgaaaccctgtctctactacaaatacaaaaaaatcagccaggagtggtggtgtgcgcctgtagtctcagctccttgggaggctgaggcaggagaatcacgtgaacccgggaggcggaggttgcagtgasccgagatcgcaccactgcattccagcctgggcgacagagtgatgctctgtctcaaaaacaacaaaacaaaacaaataaaaaaaaaccatagtaaagtcagtcatttggaattaagtggcatagaaaggtatatgaatgaatcaaaaaggattacacaatctgtcattgctgttaagctgtagcagcaaagctgggaggtatacattcttggtggaattgtaaatggttaacatttttctggatagcatatggtaatacttattaacaaccttacagttcttgtttttgtcttagtaattccacatccagaaatggatcttaagaaaatagagagctgaataaagtttcaatgtacatttgtcttgctgatgtttgtagtgtttaagaattggaatttattatgatctttagattatgattatggttagccacagatggactatttattcagttttacatttttgctctgttttctttctcatcaaaactggatgattgggtatttatcatatggattccaggattggtctaactggaccaatggttgcttccaatttcatgccacaaactcttctcaaaactttcccagggatgtgaggatctttaggcccgagcacagactgtcctgtttggcaggcttgctttaccacctgccctgtgtccacttcagcaagtggccccaagtatgaaagtgtacgctatcccttgcttacctaggaagtccccttggcgtttagttcttttagatttctatacatttatattttttgggtagctttgaagaaaatttttttgtttttgtttttatgtggtcactttttgtttcagctgaagtgaaggtttttatgtctttttatagcctagcaagaaatagatcttcttaaaattctatttaattttcataagatgtttgaatgtatgagtgtttaagtgttttttttttttgttttttttgattgattcrtgtttatcctgtgggccatctttaaacgtggtttataataaaaatgcactcaaattaaatgtgcttcttttgaccagcatgaaagaagggagagaacagtataataatgaaagactatttaaaaataggatttatgaattagtgggttcaaaaataagtcttttaattgcaattaatgatgtagttttaaacaagcaatgcagttaggattaggttttgtatatgatactgtacatttagacaaacttgtttttagaactttctttcttcttggaactaactaaaatgggacatgggtagaatagttgcctgttctccatttttatgagggggtagatggtgcctcattggtctttaatgtattgagtacatggtttttgttttgttctgttttgttttttttgagacagagtgtcgctctgtcacccaggctggagtgcagtggcacaatctcagctcactgcaacctccgcctcccgggttcaagtgattctcctgcctcagcctcccaagtagctgggactataggcgcgtgccaccacacctgcctaatttttgtatttttagtagagatggcgtttcaccatgttggccaggttggttttgaactcctgacctcaagtgatccgcccgcctcagcctcccaaagtgttgggattacaggtgtgagccacagtgcccggcgagtacctgttttgattgtcattcatagtgagtattttggaaagtcatcagtggtggttggtggaatgaccttctccactgttattctcctcagtaaatgtgtagttgtgtaaatttttacatgtacctgtgcacatatctgcattctgtgctcctgtgggcctctggataggcagggttggatatggtatctcacaagtgcattgggccaggggtgtaggcgctttttatttttattttttcttttccttttcgatatctttaatatagtgtattctttaatgtgattattttcatatgtattacattctttttagatgtgccagtggtattgatggggacagggcagactgattcataaatagaatacatttagcagtaaaattctccctatatgaagattattggacatgtcaatataaatcaggaaaagattctagaggggggaatatttcaaggttcttggttcctagagaagttgttgaaaattttatgtagttgaacatgccgtggtgaacattaaattgggtcttaatgactgaggagatgaagaggagttagaacaacatcacattattgtgtctgaagagagagaatactaatctgaaaaaaatgttttaatgtaatttttagtatggtcgttaacttttaaagcacaagcctgtttgaccttttgtaaccaattaaaagtatttttacttgactattttagatgtatagtatgtggaaaggtttagcatatataatgctttttttttttttttttctggcagtttaaaacttgccaataatgggcttaaagataattagaaagttttgtgggccatgagactgaataattgaattgaataaaggctaaattaaaattagaatctaattaaaatcctgtgtatttggctgtaattaagaccaagttgccagatagtgtttgcttttggaattgaactataatatatcgatataggaaaacaaattcattagcaaaatagctaagatttggggaatctttttttctttccatattttagctaaaaaagtgatttgggtacttttgtcttgaagtacctaattctgtattaattaattttacctttctaaattccttttgatctatagcagttgagaaatttccctgtattttccttaaccagcacaccccttttaacaaaatgatctcctttagagataagtgaggccaggtatatgaatatagttttataatgctctatcctgtgatacattctgtcactttaaaaagcaattctctttagggcttatagttcttttggtacaaaaccaagctcttccagtttttataaaaatgtccagttgaaagtagaaaatatttgggaatggaaaatagacatcagatattctcaactttaaaaaatgtttttatttggggagggtaggggagggttgtgggtagaagatgggcatttatatataactatttttttcccccagaatagtagaagataaaataatttcagcaatattctaatttagccttatgtgcctggctacattttgtggcgctcagaaattctgtaacataaggagcagaatgtgattccactaggggacagcagaggccaaaccttagcattgcacactcactggcagcagcttagatcttagaaaagaggaagatggccactagttaaaatctgtaataacttctgaagagttcatggctggttgtgggagaatactggtactttatggaatagctaatgagaattttttaatagtgtctttaattggtttgtgaattgaaataataaaagtaaaaagacagttttcatgagcattaactttccaaggcttaccatgtgtaccttagatataagataggagcaatctttgttagtgaaaatgatttctttaattcctttagcttacatttgtgaaggtctgcagtctgctcctcgtrgatagtggctgatgcttctttacgtgacctgcttttgttggtatctatgatttaaaggttgcataaaaggtcacagcaaatttattttgcatcttgaagcaatgaggagctgggggagagtatagccagtatggctgtaggagtagataaggagggctgatatttcttaggagtctatttcccaggtacccttgggagtatttcttaggagtctgtttcccaggcaccccttaggaataggggtgcccccactttattctcctgtcyagtcaatacagcaggcacagtgttccttctaaaacataagtcggattatatcactcctctgatggcataccatttcactcagagtgaaagccaatgaccccctgggcctaaactattcatccgtttccccccagtttgctagtattctccccttgttctstatgctccgtactggtcttgctgtttcttttatgtgccaggcgtgcttttgcccgtagggcctttatactggtgctgtctcttttctgctggaatgcattttcctcaagtatccacatggctgtcttcctcaccctccccaaccactccttttaaccctgcttgacattcctttctccaaagtcctttatcaccttcaaatatactggagtatttacttagtatatttttacattgctttcaccttgattgtaagttccataaaggcagcaatgtttgtctagtatattgatgtaccctaagtgcttagaacaggacctgacatgtagtagactacatttgagatagtgattcagactcatgaatcagatcttacctaatatgttaattatttattgttgtataacaaattgacccatggcttggtggtttaaagcaataaccatttrttatcgcagcaaccatttatcttgtagcttctgtgggtcaggtacccagtgtggttcatctgggtcctctggctctcagtctatcacaaggctgtaatgaaggtgtcagatggtactttaaggttcagctagggttgcattcattctcagatttattcacatggttgtttccagattcatttcctcctctgctgttggtcagaggcatctctcagttccttttcatctggtcttcttcacaggatagccacaacatggtaactgacctcatcagagagggcaaatgacagctgagggagagaaagatgaagcagtaatgtctttcatgacctagacttggaagtcacagtccatctttcctgtaacatcctggggttgcatgtcagttctgttccttgtagggggactacacaagggtgtcaataccaggaggtgcagattattgggagttgttttataagctgcctaccacacccaacrtcaaattttacctctgatttcaaggataaaaacaatcctgaggtagaagtgaaacaagaagaggtgtgggatctccactatagctccctggttattttcttgccaaattagggcatgctctggcccaggttaacataggagactctaaatagtgtgtggcttagatggacacttgcatagatggactatttgtatactcggttacaaagcccaccagagaaacatactttcaaatccataaattgtgaacaaccatggtgcatcctattaaaagccyctcataggtgaggactctcacctagcaaataccatgtttgtttccctggagatctgtcattaatatgttttctaggagatttgaccatatcacttttattggggtggagggagcgcagggcatcctcttccctacctcccacccctgtaccacacaaagaacgaatggactgtggtttagccttttgcttcccaaactcaataaatatttgtatgaataaactcatttagcccatagaacaactcatgaaagaggttctcatattaggaaactctttctcagagactttgaggtagattatgtcgatgatttctcagtttagtaagtaccaggcctgggatttatgcttagatctttctgactctagaactcattcttgccagtgtgccctgatccagctgtttacatctaatggattacatctaatagcgcagacctgcagctcccatgcagggcttctagaatgcatgagagccagttactgggagaagaaaggtagatgtcttcaaatttgttgacatttgtggtcatgaagacgaactagtatatgcattttctttctttggactakgagagatagacatcctgtagttgttccatcactgcttttagaaagtcaggaatcttaggtttgaattkgactttgtcactaatgaccgtgtacccttggacaagtctttaacttctctaagcctcagtttcttctctggtaaaatggggttaattgtatctaactcttatttcctggaagtataattttaggtagcagtaccactttgatttgcggtttctttttattcttaatgtgttacaatttaccttttttttttttaattcttttcaggggacaaagttgatagaatttaatgatttctaccctttctctgtgaaccccataaatccttgttcttagtcagtgctagaagctttccatgcaatacgtattagccagctkggtttctctctaattacttacagtgaacttcatttgtcactgttgggcctgacatggtatacctgtttgttatttgagatcttaaggtgcagatgactttcttttccccagaatatttccaaacctgttcttttttccttttttaaatctagtatagaatcgtcagacattccataagtcagagataccctttttcttggaataagctctcctttgtaccatgttgtgcaggaggaacagaacagttggactcagatcccttatggctgtctttctgcacctgcataacagactgcactgttctcccccagtgacatgaaatcttggggatggttgtcataggtaaggctgaggtatagggagaatagaaggagatacagggcgggaaaaagagaggactgtgcgatagtagagcgtaaccaacaaatgtctccctttctccacttcttgattattgtattgtgagcagtgactagcatatcagtagtcagagttgtagagttttagatcctaaagggacataaatcagtcaattgtataatgtagaaataagaaaatgtagtaaatagtgatttattttatctaaagttatacagctaatagctaatagtacaacaggactagaacccagttcttttgactctaaatctggtgttttttctttcttcttcttctctttttttttttttttttttttttttgtgactgagtgtctgtgactctgtcgcccagagtggagtgcagtggcgcgatcttggctcactgcaacctctgcctccygggttcaagtgattctcttgtctcagcctcctgagtagttggaactacagggtgcgccaccatacctggctaatttttgtacttttagcagagacggggttttgccatgttggccagactggtctcaaactcctgacctcaggtgatccacccgcctggatcccaaagtgctggggttacaggcgtgaaccactgcgcctggccaagtttggagttttatctgctgaaacagcttctagtgttcactcaccaaatatttgttgtgcatgttttagggacacatgacacatgacacatgccctcaaatttaataagataaggacatatactgatattggtagtattaggatgtatgttaaataaggtaagagtgaaacaaaagatataggtcttaaaaacatagtttttttaaaaaacttatttttaataacttgtagtacaaaaataatgcttactaactgtacagattctagacaataatgacaaaacaattaaaatcacctaaaatccaccacttagaaatgtttttttcgtgtatgtctgcatatattttttctagttacaaaaatgggattgttctaaataaactttttgtaacctaacttgtaacatggagaaccaggctaagagaactgagggtggctaggcagttgtgaatagcgtatcacagaccatggtaggacaatagtgggaaggatgaatgagcaaagtttaagggacaattaaagacccaactagaatggagttgatgggttggagaatctgaatttgagtggtagaaggcaaattattgctagaatggcagggcttttttcctgcctctggctctagtttgtttgaaggttatttcagtggaagaattaactggtacacccaagccaatggactggattcctattttaactagaaatactagtgagctgcaggatgtggagataagctttctgatatcagctagacaatcatgaccaatctgttgagtattcttgtttctggagggaattctggtataactgaaaaagtggtggatttagaggtttaaagtctctgatattagtaaccagctgattttaggccaacctcttgggctctcagaaatactattttgtattgctacttcctactggttgcttgcttttaagatctgcaagtttatatattaatacaaaaaatgtttttcataaatttggaagagctgcataaattaaatatagtattgatattgatggcaaaaatgaaattttgtttcagatgcttgttatcgggcggctagactctgttaaaatagttcatcatggtgactagttaataatactgtattgtattcttgaaaaatgctgagagtggatgttaaatgttctcaccacaaaaatgataactctgtgaggtaatgcatattttaattagctagacttaactattccacaatgtgtgtatactaagacacaatgtgtatactctaagatatcatgttgtacatgataaatataatttatcgatttgaaataaatatgttttgaaaacaaatctgtctaaatatagaattttaaagtgtagatctttttttttgaggtggagtctcactctgtctccaggctggagtgcagtggcgcgatctctgctcactgcaacctctgcctcccaggtgcaaacaattctcctgccttggcctctcgagtagctgggactacagccgtgtgccaccactcccagctaagttttgtatttttagtagagacagggtttcaccatgttggccaggatggtctcgatctcttgacctcatgatccacctgcctcggcctcccaaagtgctgggattacaggcctgagccaccgcgcttggcctaaagtgtagatcttttgaagaacacttatttcttatatgtttagccttgggccttgaatattgcttttgaaatctaaaagcttgctcatgggtaaatagactttgttcttgcaagcattttttaaaaaagtgaaatgttcttatgccttcttttaaaaagtgcttttattctagaataaaagcttactggggaacttttggtattagcgtgtgggagataacttgtggtttatgttttagggaaaagatgtgtgtaatgtaaaataggtaaaatggccagtaatctttttaatgggtgcttgccttatggatttgactttgggcattttccattttccattgggagtctttttcttctaaaattccactgttactatttgtcttaaccttgtgtagccttctatatatattctgttagctgtggctttaaaaggtttgatcatgggccctttgtgactttagtcctgactcatcctcccaggtgctccctgggaatgagtagatgagatggacagaggtgtgactagccttattattcctttctaggagtcagttggaacatgagagaacattgagtgaatgcctttttggtctcctaggttctcttactctttgccaaagttcttgccctatgtagatttgtgggcctatttatttcatcttgccatctatgaacttgaatatagagtattaaaaggattgactgttgcctagccctcagctcactgttctctgtccttatggttccaaacagaataagcctttctacttctgaaggtaattcgcttaacctcaagagtctggctgcctcaagggcgttttggaagtgtactgcttaggagtcagcattaactgattcctgtcctctttggacctgcaatctttccttggtggagtgtgagagcttcagaagttacgacatctctccattatcttgtctgctcagtgtgtcacctcactgcttcatgtgctagtgaatgctgccttcatacatggtttggtcccatactgcttaggggtctgctttaaattcataattttgttagtgaacgaagatgaagatctttgagtcatattattttgtgttaaaatactatgaggaaggtatttggtattagtctttcagttctaaaacagataattggtgaaagtagtaaattgtatgttcagcctccctctgtcccctgtctgttgactagaaaaagcaagtaggtgtgaagaagatgaaagtatccactggactctcaaatggtgccttatcccatggaaaactcgactaccccatctatatcccttcccctaatgtcggacaaattcctaattattctttaggtcttagtttagatgttggtttctccaggcagtgccacctctcagtatgtcaaagccagtttttccttccagcatttgatgataaaattctacttacatattggtggtattcaatctctgtatgcagagacattctggggcctctaaaagcaggctctaatgtacctttctagcaatctttcctgctgtttgtgtacgctggcttcagtggaatttctctttttcttattcactctttaatacattttccttgtattttctggcttccactcccttgttcatgccattctcctcctttgtagtaccttattctcttcactactttagatgctaatgacttccggctgcatggatggtttagtccaatactgcctagggggacagctttaaacttgtatttcttttccatcttcaaggcccacctgaaatttcatttcatattctatgacatgtttttgtttttctctggctaaccctgagtggcctcttttcctttctgagttggtgtttattgcccatggttgtcctttagcacctacttatttactgttttgtgactgttctcttgactgttttacttgtgtgtttgttttttctagttaacaggaacattagatcactggagacagggattttcatcttctgtttctttatgttctttacagttcatgcccacccaccacaaagtttctcagtaaaaagtttatttgcttctcacattttatagtatgaatcctggtgagagtgctttgagattttttcttctttttatttaaaaaatttctccaagtatccgttgtgttctctgttttactgcttgtatgtaatggctgacattaaggtattgggaaaatctgtatgcaagtagcacaagaagcttagtaactacaggatgtcttgtggcccatgtcagtacaaatttctgaagatgcagcaggaaataagattttactaggtgagggaagagaagtaacatggattggaggcaagcattttacttgaacagttctatttctttcttttttttttgagacggaatcttgctctgttgcccaggctggagtgcagtggcatgatctcagctcactgcaacctccatctcctgggttgaagcaattctcctacctcagcctccctagtagctgagattacaggcacctgccaccatgcccagctaatttttgcatttttagtagagacagggtttcaccacgttggccacactgatctcaaactcctgacctcgggttatycacccgcctyggcctcccaaagtgctggaattacatgcatgagccaccgcacccggccgaacagatctatttcttataactaatgcttcagaacaattttacttccaaggtgtaaataaaatccccaggaagaggaattgatttttttttaaaaaaagtatatattgggtgctgtatttattcaaagattaactttattatgatcctctagtggcttgagtgagaaattgtctccttgttatatgggtagagagctatttaagaaaatctctttaattgatttctttcttagaatttagatcatcatctgtggaacagcctaaaagtcactgggaatgataactagtgatgaaaatgatatgaggtgttcagagccctagttttctgttatcagagattaaaagccagtctctgacatttatggttagacaaaaatggtttccatgtttacctatgcatcactctgttaaaatgtaaaatgcagattgcattgatgtgttaaagattttgtttctttttgtttaggtacaaagaggatggtgaagctttgctaattttgctaccctcagaaaaagctatggtgcagcagcttcttcagaagaaagtacctgtgaaggaaatcaagtaagagctacttgttgtctttatgtttttaggaaaatgagggcatgaaattgtttgcttaattatgtgcacctaatttgccccttcccctaatttattcaactgcctggtttgacttttataaaaaggctctttttagaacagttttaggttcacaggaaaattgagaggaagatagatttctcatataccccattccccaaacatgcacagcctctgccattatcaacgtcccccaccagaatacatctgctacaattgatgaacctatgttgatgttattcaccaaggtccatagtttacactagggttcattcttggtggtgtccattctgtgtgcttgcacaaatgtgtaatgatgcatacctacyattttaatatcatatggcagttttcactgctctaaaaatcctgtgctctgcctatttattcccctcccctccccctgaacctctgacaactactgatctttttactgtctctatagttttatttccagaatgtcatatattatagttggaattatacggtacctagccttttcatattggcttctttcasttagtagtatgcatttaagtttcctccatgtcttttcatggcttcatagtacatttccttttagtactgaataacatttcattgtckggacgcaacagtttttattcacctactgaaggagatttttttgttagttttgttttgaccttgtttatataaccagctatagcctggttataaaaaggacagatttgtattgattttatgcaaataaccacattgccataaaggctagtaagttgtctgaattctgaggggtcagggagaataaggtgctatataaagaatgtcatttataggttactaaatagagggttaaagatagatcaagaagagaaaagatcttttcattcccttaataaaaatatgttaaaccacatcagtaatattaaaaccaaaaagctacarttagattcttctcagcagttcccttaatcctacttaagtcttataactagtggatgttggattaacgttcagctttcaaaggtctgaaggacatcttaattgcttccaagctttggcagttattagtaaacctgctataaacatccaygtgaaggtttttgtgtagacctaagttttcaactcctttggataaatattaccaaggagcttgattgctgggtcagaaggtaagaatatgtttcattttgtaagaagctgccaaactgtcttccaaagtggctacaccattttgaattcctgccagcaattaatgagagttcctgttgctccacattcttgccagcatttgtagatattctttatcaaggtgaggaaattgtcctctattcctagtttactgagttaaaaaaaaaaaaaaaaaagatcatgagtggatattggattttgttaaaaaaaattttttttttaaaatctgatgagatcatgtgattttttttttttcttttttagcctggtgatgtgatggagtacattaaggtctttttttttttttttggaatgttaaaccagccttgcattcctgggataattctcacttggttatgatgtataatgatttttatatcttgttggattcaatgtgctaatattttgttagatttatacctaaatgtttcatttttgggagtgctaataatgtaaatggtattgtttttagtttcaaattccatttatttattgctggtaaattggtgttcatagtattttttttttttttgagacagagtcttgctctgtcgttcaggctagagtgcagtcttgcaatcttggctcactggaacctctacctcctgggttcaggcaattctcatgcctcagcctcccaagaagctagaattacaggcatgtgccaccatgcctggctaaattttgtatttttagtagagatggggtcttgccatgttggccaggctggtctcgaactcctggcctcaaacaatctgcctgccttggcctcccaaatttgttcatagtagtctttttatccttttgatgtctgtgggttttgtggtgatgttccctttttcatttgtgataaaaacaggaaagtgattagcttttgtatattaatcttcaatcttgtagtcttgctatgattgcttattagtctagaagtttctttgtccattcttttcgatttcctatatagatgatcatggatctgtgaacaaagccagttttatttctttcccaatcggtatgccttttatttccttttcttgtcttattgcattarttaggacttctagaatgatgttggacagcagtggtgagaggggacatcattgcttttttcctgatcttagcrggagagcttccagtttctcaccatgaagtatgatattagcagtmggttttttgtatttgttgaggacttgcatctatcattatgagtgatattggtctgtagttttttctcccctgtagtggcctcatagaatgagttaggaagtattccctctgactctgtcttctgaaagagattataggaaattggcatttctttcttaaatgtttggtagaatttatgggcgagcccatccgggcttggtgatttctgttttggaaggttatgaattattgattcaatttttttaatagatagtagcctattgagagtgtttatttcttgtaagagtttggcagattttgtcattcaaggaattggtccatttcatctaggttatcaaatatgtgggcatagaggtgttcataatctttttatcctttttatgtccatgggatttgtaatgatattccttctttcatttctaataataacttgtatccttttgttttcttagtatggttataggcttatgactttttttagttgtttatttttttcaaagaaccagctcttggtttaattttttcccccctattgatttcctgttttcaatttcagtcatttctactctagttcttatttattctgcttgcttttgatttaatttaccccttttctgtttcccaagttggaactgtagatgattgatttttaggtactttctttctaatacagtcatatgttgcttaatgatgggaataagtgtgagcaatggatcattaattttaggctatatggtatagcctattgcatttaggctgcaaacctttatagcatgaatactgtacatgctgtacactgaatactgtgggcaattgaacacaatggtaggtatttgtgtatctaagcatgtctaaacatagaaaaggcacagtaaaaatacagtataaaagataaaaagcatacctgcatagggcacttaccacagtgcttgcaggactggaagttgctctgggtgtcagtgagtggtgcatgaatgtgaagagttagcacattactgtatacaagtgtagacttggtaaacactgtacacgtaggctacactaaactttttttcttcagtaaccttagcttgctgtaactttttttgttttataaactttcagcttcttgattcttttgtaattacacttagcttaaaacccacattatacagctacacaaaaatattttctttatatctttactctacaagctttttttggttaaaaatatttgttttcccttaaaacttttttttttttaaatggagcctaggcctacacagggtcaggatcattaatatcactgtctttcattttcacatcgtcccactagaaggccttcaggggcagtaacatgcatggagctgtcatcatttatgataacaatgcctccttctttagtacttcctgagggacctgcctgagggtgtttttataagtagaaggaaaatactgtaaaataaaaagtatggtgaataaatcagtaatagttgtttatcattttcaagtattatgtaccatacctaactgtaagtgcctgtcagtgcagtgtgtttgcctacaccagcatcaccataaacacatgagtaatgtattgccctatagtgttatgatggctgcgacatcactaggtgatagaaatttttcagcttcactagcacactgcagcctcagtctcctaggcctaagtgatcctcccgagtagcctgcgccaccatgcctggttaatttgttttattgttagtagagacaaggtctcactatgttgctgaggcagatcttgaactcctgagctcaagcagtcctcctgccttggcctcccaaagtgctagaattacaggtgtgagccattgctcctggctgtcattacagtcttatgagaccactgttgtatatgcagtccatcactgactgacacatcattatgtggcccatgactgtatatgcattcagtgctataaatttccctctaagtactgcttttgttgcattccacaaagtttgctaagttattttcatttttatttaattcaagagaaattttaaagtattttgattttgttttgacttgtgttattyagaggtgtgtttaatctccatgtattttagaattttccagttacctttctgctatttctatgttatgttatgacagagttttgatctgtcgcccaggctggagtgcagtggcacgatctcggctcactacaacctccacctcctgggttcaagcrattctcctgcctcagcctcctgagtagctgggattacagacacgtgccgccatgcctggctaatttttgtatttttagtagacgtggggtttcgccatgttggccaggctggttttgaactcccgaccccaggtgatctgccctcctcggcctcccaaagtactgagattacaggtgtgagccatygtgcctggcctctgttatttctagtttaattccattgtggtctgaaagcagatattgtatgatttatattattttaattttgttaagatgtgttttatggcccagaatgtgttttattttggtgaatgttccatgtgagcttgagaagatgtgtattatgttgttggataaagtagtctctagatggctgttgtgtccagttgattgatggtattgttgagttcaactatgttcttactgactttctgcctgctggatttgtctattcctgatagtagggtgttgaagtctctaatkataacagtggattcatctttctggttgcarttctatcagtatttgcctcacatagtttgatgctgtattgttaggagcctatacgttaaggattgttgcctttttggagaattgacttctttatcattatgtcatgccatttatccctgataagtttattgcttggaagtctgctctgtctgacattagtatagctatttttgctttcttttgattagtgttagcatgatatattttttatcaaaccactttcattaatttatgtgtctttatattgaaagttggtttattgtagacaacatacagttgggtcttgttttttgatccactctgacaacatctcttttaattgatgcatttaggctattgatgttgaaagtgatttttgatatagttggatgaatatctaatgtattcgttactgttttttgttagttgcccctgttattcttacttttgtctcctctctttcagcctcttgtgattctgagcattttatgactgttttctctccttagcataccagttttttttttctttttcactttttttagtgattgctctaatgtttttgcaagtaatccaaagcccattttgaaataatgacataatgctacagcacttcacaggtagtgtgagtaccttataacgtaattctgatttctccctcgtgtcccttatatcattgatgtcattcatttcacttatgtaaagcatacataagcgtatatacataagatatatacataaacatacataattaaacacgctggggctattaatttgaaaaaacttagattaagaataagaaaaattttattttaccatcatttattcctttgatgtgctcttcctttgttatgaagatctgagtttctcacttacgtttttttttttctctctaaagaacttttaaacatattttgcaaggcaattctactggcaataagtttkgtcaattttkgtttgtctgaaaaagtgtttctctttcacttttgaaggataattttgtgggatacagagttccaggctggtggtttttctctctccacactttaaatatttcatttcactctctccttgcttgcatggtgtctgagraatcaggtgtaattcctgtctttgttcctctatagatgaggtgccccccgtccacttctttcaggattaaaaaaatatttaattttctgtagtttgacagtgatatgcctaggtatagtctcagtctgtctttttctgtctctccctctcgcttgggcatttgtcctgcttggagctttctgagctcttggatctgtggtttggtgtctgacatgagtttgggggaaattctgagtcattactgtttgaagcattgcttctgtttctgttctctttctgatattcagaaagaacatcatgtgtatgttcactttttgtagttgttccatagtccttgaagttctgttgtgttgttttcagtcaggtttggaagtttttatcaagttcagagattcttccctcagctgtgtccaatctagtaatgaacccatcaaaggtattagtaatatgtgttacagttctttttgttctctcgcatttcttttcggttctttcttaggatttccatcttattatgttgctcatctgtgcatgctgcctgttttatctattagaatccctagcatatgagtcactgttagtttaaattacatttctggcctaatgcttccaacatccctgccatgtctggttatgatgcttgctctgtctcttcaaattatgttttttgcttttagtatgtcttgtaatgtttttcatgatagatacgatgtaccaggtattataaaaagaattgctgtaaataggcctttagtgatgttagtgctgtggtggtaaggtgtgagagggtgggggctgtgaggaaagcattcttaagacctatagtaggtctcagtctttttgtgagcctatgcctccggactgtgaactttacaaattcttttcagtctctgccttcccatcaccccaacttaagtgggaaaggatggctagagttgggcatttccctcccctcaggtcagttaggctcagataaaaccctaagaggcttgactttcattaacaaggcccaccctcaggagaaactagttaagaacagagtgctcaggcatatttcaaaatggttcattttccccttgttttgctgaaagcatgagggaatttttctgatatttactgtgagaacttggttgagctcctggagtaaaactcatgagtgtggggctgccttatgaatgggtcctcctggagtttttatttctcagacttgtccacattgaggctccagcaggttttatcaattacagttgagggtctctcacccaggcactgcctyccccagttgtttctgctcatgactcagctcaagtaagctgtgatccctgtactcacctctctctttcctgtgttgggactgtggtttgtcctgtgtygtccatctttatcatggataaaagaagagttttaaatttttttttccaatctgttcagctttttacttattgttatgatggagtgatgacttacaagctccatccatagggaactggatatcagaagtctgactctttttttttttttttaaagtcttaaacggccttttctgaagactattagtggagaacatgagatggagaacttgttaacttcaggaagcactgatgattgaaagaatgaaatctcttggwtggaattacttttggggttgtctatccatttcagagagttgtgatctcctgtcactaaggatgtgtacattcagcatcagtgggatccatcagaatcttacttgtattggcgctgttgaaacaccctggcttgatttgcctaaaaataatttggagagtggttagatttggggaggagagttgaggatgtagaagagacmaaactggctgtgacttggtaattgttgaggctgagtgaaagtctctaacttttcttttgtatattttgaaattttttataataaaaataagtaaaaacaatctcacctaccaccacctatcaccattctggctttgcagaaacaacgtggttcagcctaaaatcagagaaacaatgaggtctcttttgtgaagcctagacctctttaaaattttttttttctttccctgtagcttatctgggcagagttagatatcatctctgttatagtatgcctaatttctaaataaggaaatcactacaatctttggctacttgtttattacttgaaattgattttatgatatttgactgaaacagaaacatttataaaaatgacattagggctaggcatggtggctcacacctgtaactcagcactttgggaatccaaggcagaaggattgcttgaggccaggagttccagaccagcctgggcaaaacagtgagaccatgtctctgcaaaagaaaaagcaaacaacagactagccgtgcatgttggtgcaagcctgtagtcctagctacttgagaagctgagatgggggagggtcacttgagtccaggggttcaaggttacagtgagctatgattgcaccactacactccagcctcactgagggagcggggtgagacctcttaaaaaaattagatttaatttattccatttcatatagaatggatctctcatgggagactactttctatctgttgagttaagtagccaatgctaactgtggtgttaatccaagtatttcactcagcatgggatgtttggagaaagtgtctgacatgtcatttctttctcctgtgttattcatagtaggtaagagtgtcaaacttatgtctagtttaatttccgtctaatctgattcatagatgagaaatagttatacatttaaaaatactgaggaaaataggaaaatgctgcttactatttttagtctccaaatttgagatatcttattttaacctttatctttttgttacaaagaatcaatccagaaaaacttatagatgtccagaaaaaattggaatctattttagctcaagatcaagatttaaaagaaagagctcaaagggtaagtcatttttcagttggatactttcattgactggaaaaacagtaaagtttatcattttctgctacttctaggttgcatgtttatgcttcagatattcaagcagtgtaatttgctgacagataagtctagcttatttttttttttgagatggagtctcactctgtagccctagctggagtgcagtggcatgatctcagctcactacaacctctgtctcccaggctcaagtgattcttgtgcctcagcctcccgggtagctgggactacaggtgtgcgccactaccacacctggctaatttttttgtattgtagtagagacagggttttctccatgttgcccagagtggtcttgaactcctgagctcaggtgaactgcctkggcctccaaaagttctgggattacaggcgtgagccactacgcctggccagtctagcttattctttaaaattttgaaaaatattttttatatatatggatkgggaaaaatcatcgtaagttttttcaaagacatatggaaaatcctctcaaatgtgattttttggatgcacagtggcctgatttctaatacttgataacattattaagtttttatttcttttgtaaaattgctataactcctgattgtactttcttgactgtgagattaatatcttcctacattagattaaatttctagaaagcatagaactgcagccaaattatctttaggaatgagattttaacttacgtttatgacttgttgttccccaattacttttctggacttaaagatcttgattagcaaatacataaagaagtcaatatttagttttatttttcttaattgataaattatatttctggtatgtaacatgttttgaaacaaatatacattgtgtaattgctaaatgaagctaactagcataggtattacctcacatacttgtggtgagaaatctattttagttaaacttttttttttttaaagtttttagaatattccacagtagattcttcggtaaaagatgtgaaattatttttcattatgctttccaatctttctaatctttgaattaacagatatttgagttcttatcattttcacctgtcctttattgcmatttattgcatttacaagatctttgcatctcccatagcatatcagcaatgagccagagagtagggattcagaggttggattctatttcagcagatagatgaggtgggaggaagaatataaagaagagttatagaaaggtcaccctaagtcgatagggtagcctgagcagaaaaacattcaatagttagggttttatgtaatggttttgaaactgttattcctggcaaagaagtaagtttttttgtttgtttgtttttgatacgcagtttcgcttttattatccaggctggagtgcaatggcgtgatcttggctcatcgcaacctccgcctcccgggttcaggtgattctcctgcttcagcctcccgagtagctgggattacaggcatgcgccaccacacccggccaattttttgtatttttagtagagwtagggtttcaccatgttggccaggctggtctcaaaactcctggcctcaagtgatccgcttgccttggcctcccaaagtgctggtattacaagcgtgaaccaccacgcccagccagaagtaagttttatataaagaagagatcttaaattttttgctaacttattttatattttagcaaattatcattggtgtgcttagaataacattaatgatgaggctaaaatttaagtgcttactgtgtgccaggtacttagttatgacaaaactgttttacatgcgttgttacctaatcttccagacaaccagtgaggtaggtggtattgatttgactgtacaaatgggtaaatgctagcttgaaaattaaaaaatgtcttggatggctggttggggtggctcatgcctataatcccagcactttgggaggctgaggtgggtggatcacttgaggctgggagtttgagaccaaccaggccaacagggtgaaaccctgtctctactaaaaacaatgacaaaaaaattagctgggtgtggtggtgcatgcctgtaatgccagctacttgggtggctgaggcatgagaattccttgaaccctggaagcagaggttrtagtgagccaagattgtgccattgcactgcagctggcctacagagcgaggctctgtctcaaaaaaaaaaaaaaatkgtctagagtaacatagttattaagtggaagacctgagactgaactccaggtctagctttcttgagatctactgtgttatatcaggagaaattaattccaaaatatgagagcatcaaatggtaagctataccaagttggacttctataagctcactttacctgagaaccttttcattaaaggatctttgaacaaatggttaatattcatttttcttaaaaatgaataggcatgcaaacatgtacattttttttctagcaaacatccttcaaacttgcagttgaaacctaggagctttggaagtagtacacacatttaaaaatattagattaattttggtatgtcatgacttactgmatgcctaagaggtcattcagttatctatcagaaaatatgaaacattggaaaratgttttttcactggtttgtgcatacaacggatgagccttccagaacactgattatagaaaagtgtgttgaaataaatgatgtgatttattggttgtcacgcatggtttagcagaatggcyaactgtgttgccagcagcagcaagctatctagtttcatagaagtgattttctaggttttgattataatctggatagaacaaaagtgataagcaactgaggtgattgcttgtggatgattgtaggggaaaaaattatttttaaactggtgccattcattgttttttatgcctatggagacagaaaatggtttggagattagttgggtagaaaggattagtgtaaagctagataaaacatgaagtttaggaagtatgcaaacaggaactaaatatactttacaaaagtcaacttaaaaaattacctagatgagttttgttatctgtgtatttgacaaactgataaaggatcaggaccctgtttatattctggtttgtgtaactctagtatgaagatagttttttttttttttttttttaacagaaacaaaatattccaagttaatgatgaattacttgaaatcataaaaaagaaaagctttagcaataaagtttttcctgaaatggttttattaaatctcaatatgtaaaattttatttaattgaaaaccttatcttttgatacaataatacaaaatattatcaataactagcatttgttgttactatattccagaaaatatgctaggtatctacatgcattcttctaattttattctcataacactctaagtagaaggtaatgtatcccttttttgatagatgaggatactgacatgtagagaaacaagaaatttgctcagtgagtaagagtttaagctttgaatagattccaaatctatattattccaaagcctatattttccccatggtgtaccttattgtaatggaattatactgacttttagagtagccttttggaaagaagatattctgggttaggttggcttgaaaccaaatgcaaagtttttttctaatattacagttctaaaaggtaggttttcatgtgtgcatggaatggagatatactgaactatttcgtggtttttcagtactattgaatttatcccattggctaattttcttatattttggtctaaactcatttttaatttctattatattgtacttttcaacctcttaatttacagtgtttcrtctcctatgtacgatctgtatatctgatgaaggataaagaagtatttgatgtgagcaagttacctatacctgaatatgccctgtaagtattcataatatagttgtaatagtgaatcctcaargttagagggaattaattaattaatttagagatggggtcttgctatgttgcccaggctgtctcaaacccctgtgctccagcagtccacccacctcaacttcctgaagtgttaggactacaggcgtaagccaccacacccggccagagagaatttgtttgaaacctggttctctgagattcttagtttaagccactctgccttacgttaaaagaatctgtttgttaaagattctcagtggaaaagatgaaattgacttggcagaaaattagttcagtgttcagttcttgttaatcagggagcagtttattatttgtaagtataaattccttaaagtgacattggccatttcctatagtttgatcttaaaggagacagagagcaaccaataagcattctttgaaatctttaagtgtctatagttttctcgttctctgaaacccttgcctggattaccatagacattttatgctttgaatgtgagcctctttgctgattcttcttatgttaggttgttttcttcaattgcttactgcctgaatattcctcctgtcttggtgtttcttacaggkactcatagttactatggcaagatgctcctttttagtaactgaggttactattgtatgaaacagaatggctggttttgttttggcttagtatttgagggattttttgcgggggaggagacagggtcttattctgtcacccaggccatagtgcagtggtgtgatcatggctcactgcatccttgacctcccaggcttaggtgatcctctcatctcagcctcctgagtagctgggactacaggtgcatgctaccatggctggctagtttttttgtaatttttgtagagatagggtttcgccatgttgcccaggctggtttcaaactcctgggctcaagtgatccccccrcctcagccttccaaagtgctggcattacaggtgtgagccactgtgcctggccgggttttttttttttttttaaaccttttgacctataaagaaggaatgtttattcttcagtgggctcttactgtgggagtggtaaaaacattggcacaatcttatagaagcacctttgagataatcatactttgaatatcagcatgaaatttcccagactatggtgaaatatgtgattacaaggcaaggtctgtatgtttggcttgctcttaggaatttgagtgcctttacctttaaactgagtctaactacaacatatatctaagtgagctgtcgttttctattctctgttagattgtatgtttaccataacaggtaatatgtcagttattacatttttgaaccttttaaattgctttatagcagtgtagggctgctgactttccatttaagtgayagatggaaagccacatgccatggataacatgttgttgtttgctcatatgtttaaataccagttcctagttttattatttctgaatatgatccatggcttaggttattagtggacttttggctccctgttaatttttatcatggttttctgatttgacctaccttgatattagcagataggaaaggcacaggtctttaacactgtaggccatatttaggggaccatttgttgcaatagattccagtaaattttatctattggtagttgatgacttttgctttttgtgatgcttagagaaggcagaaaattaacgttgagaacaaattttagtatagttgagtttggtattttaatttttttagatatttagctatgttgtttccttgaggtatgtaatttcctttagaagcctttgatacctaaagcagtgctgtgtatgtaagatatattaaaggttttaaaattttactaaagaaacatgttttgaataccyaatatgtgcaggtcattgtactagatgttaaattgtagatgtataagatgtactgctgccttcaataaactcagttttggtagctgagagagacataaaaatgtaagtgcaatacattgagtgaaattctctggatgagtttgtgatcctaaccctaacagtggtgatggtgatgacatcaagttctcattagttccctatatgccaggcactagttttaacagcattacatctgtcaactaatttattcttacaacaaccctgtgaggtaggtactcttagcatcccgttttgcaaatgggaaagctccggtatggaaagattaaatcatattcgtaagatctcacagctagtaagtggcagccagattttgaaccccagcagtcttatttctgaatccatgcttctcagcattacatctctcagtttctttgaaccatgtcagataggaaaagagcagtgggtccatgttatgatgttactgtttattcagagcaatccttgataaaatctaagattttatttcccttcgatcattgagaacttaatgaagctattagctttgatccaagctgggaaagacatgataataaattgaatattgatcattgatggagaaaacaatattttttaatttctttttttggtgtttggtttataaaatccatttttatagcaatgattgtgccatattctcttttaggaagggagatggggaccacattccagttctttctctgtagagaactgttttgtcctttcatggtcatgtcttctctggtttatttagtacttaacattttatgaggtactctcatgtagttagttaattggatccttacagcaactgtgagttaggcctggcaggtactgttatccccatgttataaggaagctgaagctgagagggttgaattggaaattggcaggtctagtacttgaactgttatcttgtttctggtccagtgctctttatcttattccatgttaccctcttaaagaaaaaatagtgtctaaaatgttttctgacaggtrttgagtgtattttgccttactttttggatcaactaacctgttagtattgagttgtatctcacaggaacattttctttaaaaaagctytaggaatctctgctcttgagaaactcttctatgacacctataaacatatcatcagtgttgagatgactgttttcacgtttttccatatttaaggtctcttggtcttgctgtggcaccacgcgtaagatttcttcagaaaatgcagaaacaacccaccaaagaattggtaaggagccaagccgataaagtaattgagccaagggctccctccctcaccaatgacgaagtggaagaatttagagcctacttcaatgagaaaatgtccatccttcaaaaaggtggaaaaagactygaagggacagagcacagacaggatratgatactggtaatgaagaacaggaagaagaagaagacgatgaagaagaaatggaagagaaactggcaaaagcaaaaggatctcaagccccatctcttcctaacaccagtgaggcacagaagatcaaggaagttcctacacagttcttggacagagatgaggaggaagaagatgctgatttcttgaaggtgaagcggcataatgtgtttggattggaccttaaagacgagaaaacattacaggtaagtttactcccagtggagggtcttctattacattgtcttactrtrtgcttattgttgccttttggggactgagagaaagtgaaaactaagaaacttagactgggtttctttgcaatgaactcttcctcctttcccccatacttaaacacagaataagtgccaatgaattttcatatttttcataactttgggagctctaagaggttaacaactttaatcttatttactggttttctgatgctgtgttttaaaagttgccaaagtcctgattaagtctcaaaggaaggcaatgaagttttttggtttatggcatgaggatccttcgttaaaattcttaagatactgctttctgattgattaaattataaggaacagttgtaattatttaaatataagttttactcttartgcgacatttgtttatgggaaccaagccagtgtcttaaatagaaattgaacagttcttttttaaaggctacttatgaatgtttatgaaaagttttcctgtaaatcctttgtttctccgtagccatcttctaggaggaacmaaagaaataatccatttagataaagcacttgttttctaggatgcttttgtaggtgcacagtaaatgtgtttccccttctcccttattccccttcctacttcatatgcctttattcttgatcatctttttaaaagggaattgaataaaaaatgaagcttgattcttactctttatacmatgttgaataaaatttcaagatkcacagtaggaaatacataatagattttgactgtgaaacttagaagagtgtttctttaagtaactaaaaattaaaaaaaaaacctagaaaatgtgcttattgaacacttaatatgtgttatgtgttagtcattttctgaacattatctcatttagtgcttgaaataaaggtcgttactactatctcattatacaggtgacggaaaaaaaataactgtggcacagaagcaatatagtactgtagtgaggcacacaggtagtaaatggcaaagctggaatttgaacataggtgttctgactttaatatttatgctcttgtccaataatcctgtactgtctcatcctgcttcaaattagatcattttaagtctgtagttaagactcattttatcagcaaagtaaatacaagaagttagattttcgttttaaataatttagccactgtattaactattatgtatatcactttctaagaatcatgaacataaccaaagcttcaaattaagatgagaaggaatgatatagttttataataccatgaattgttcacgtaagtaggacatgtgtctaagtactaatagctcatctggcatttgaaaaatgtatatagcaaaacaactttttaagcttttaaaaaagttttactctatgtcagttatctaaatcaatctaactctttaatatatacagtttgagttttggcaaatgtatggtgttgtgtaattaccacaattaagaatagaacagcgtcatcaccccaaaacatttcttattccctttgcaattgctttacccttcactcaacctctggcaaccactgatctgatttctacccctgtagtgttgcatttttcagaatgatatataaataggataatacagtatttagtcttttgtgtctagcttctttcatttagcttaaygttattgcatgcatcagtagtttgttccttttaattgctgagtaagtatttcattggatggatgtaggttttcttaagctttaaattggcattggttgtttccattttttggtgattatgacaaaagtcattataaacatatacatttttatgtagataattttctcatttyttggggaaacgagtggggttattttytaggaatagggttactgggaacatatgttaagggtatatttaactttgagaaactccccagttgttttccaaatcagctcttccaatttgtgttcttgccagcagtgtatagagttcragttgcatcccatcgtgtcagcacatggtattgtcagtcttttaattttagccattctagtaggcatgtagtgataccctactgcagttttaatttgcatttccctaatgactgaacatctctacatgtgcttatttgccattcatatatcttctttggtgaaatgtcttcaagtcttttgtctctcttttgaaattgtgttgccttagtaagttctamgagttctttgtatattctgaatacatatccttaatcagatatattttgctaatactttctcccaatctatggcttgtttttattttgagtgtctggcaaagagcaggtatcttaaattttgaagtctgatttcaatcacattttaggtaatttatatatgtgtcgtatctgataaatctgtgattgacccaaagtcacagattttctcctatgttctcgtccagaggttttatagttttagcacttacaatttgggctaggatcctcttcaccttaatttttgtatataatgctaagtaagggtcaaggtacacttttttttgcatatgggtatccagttgatccagtaccatttgtttggaaaaaactatgctttttccattgaattaccttgactctttgaaagtcagttgactttcaaagatacgtctgtcctttcaccaataacaccaatcttgattagtgtagctttatactaagtcttaaatcagatctttgagtctgtcaactgatatatattttcttaaaattgctttggttatttttggaccatggcattttcatgtaaggttttgaatcagctagttacttcgtataaaaagcttgccgatgacttcattgaggttgcattgaatctgtaaatctaactggagagaattgacatcataacaatacctttttatttaggccttctttagtgtctttttagcattgctttataactttaagcacatgtaatgtgcacatattttgttagagtcatctcttactatttgatattttttaatgctatcataaatggtatttttaaaatttcaatttccaattatttgttgccagtatatagaaatagtttgttttttgtagactgatcattctaaactgacctgttagttcttgtggctttttgggagtttcttgggattttcttttgtaactgattatgaggtttgtgaatgaggatggtttcatttcttcctttttcatctgtggaccatatatttcttttttctttctttttcttttgcttgattttaccgagtaggatctgtggaatagaagtggtgagagtagatattgctgtgttgttcctgatcttactgagggggaagcattcagtcttttaccattacatctgatgttagctgtaagttttttttgtaaatgcctatgagtttgagaagcttccatctattcctagctggcttagtgtttttatgataaaatgaattgtgacttgtgtcagatgctttttctgtaaacattaaggtgatgacgtggtggtttttagcctgttgattatggtgtattgatttccccctgctacatgttgaatcaaatttaaattcctttgaaaaactccatttaagcaagatttctttatatttatattataggattctatttgctaatattttcgttaaggatctttctgttgttgtgagggatattggtttgcagttttctttttttgcgatgacttgactgggaatatgacacattttgaaagctttttatatgttttgccagcatagaggtcatgttgatcgttgccctactagcgtctgtattgtttgaatctctttttgattccaatatgaatattaataatttatatcaatattaacagttatttagaaagttatgatttctttcttaatttgtgtatatattgcttacacatatttttccctgttatgatattagtctctttcctgttgattcgtaagatgtcctcaaacagtaaagttattgtctctggcttttaactttgctttgtgtcccttgtcacacacagttgttcatttccctgccttctctactttattccaaattccttgaaatgttgtcttttgtttactcaagtaaaaatactcagaattttattgccatatgaataaattcagaattgtattctcactttaaacagtagggttcttgattttattttctattttagaaatcaattaatagctaatttaaaaaaatccattacacccacaatcaaaacagtaaaaattcacattctgttttttttaaaatgttaactactaaggtacaatgtccttacctaacgtcagtgtctaagttttcttgtttggaccgttttatactttcaagtatagattcacattcacttaggaatgactaagtctttttagtcattcctagaaaggacacatagaaaatacatgtgaagagatcatcaactatttcatccttcaactttagcgttcctatttgaacaactacattttcattttatgctgtgacaagggcatggttaaagatgagtgaaaacatgatccttatgggtacattttagtaaatgcaaattttattaagttgggggaaaaaagtcctagaaaaatgaaaaaagaaaaaaaaaacccagaaagcacacacagtatacaagcccatttgaaaattatttttaaattcaacagacatgaaattactttggcaaattgctgtaaaaatttaaatgctcattctaagaaaacaacaacaacaagcccttttcctaacttaggttcctttcctctcagtcctgctcagacttagtgtttctcacatccagggcaccagagatgatgttcttccaaggttgagtgctctgttcttgaggggcagggcgggggactctgcaagagtggttttgagaaaaatttcctgtaaaatacccttttacccagattataaaatgcttatttttggtggaaaatctctagtaaaacacagaaaatcacaaataaaaataaaaataacctgtaatttcaccacctagagataacaactgtctttgtttttttaagtatacatacacatttgttctttttttttttttttttttttttttttagaaatagggtctcgctctgtcacacaggctagaaggcagtggcatgattgtggctcactgtacccccaaactcccaggcccaagcgattcttctgccctagcctcctgagtagctaggacttcaggtgtatgctaccatgcctgggtaatttttaaaaatttttttgtagaggtgggttctttctgtgttccccaggatggtctcaaactcttggcctcaagtgatcctctcaccttggcctaccaaagtgctgagctgacaggcagtaagccgctgtgccctgctcatatacccatttttaaataagtgagatgctcctaggtatatatatttccccatgtcattaaagtgtcttcgcaaatatttttatggttgcctaatatgccattaacctttatttaaccattctcctgctgttggatacttaggttaatatcctttttttgaatctccgtttaaagagttctactaattggcaggtttcttctctccttcactttcactactctcaccagcataacatggaactgattctacagttcraaaatgcaagataggaatcttctccttatctcatgtaaacacttactttatagtaattgtttcaaaaattttacccccaaatgattaccgagcttacacatattagggcataagatgacctaggtctctttgggttatcgacagggttctaagagggccccagtgacactacgtaatacctccttatgcygctcttattgaaggagggtcacaaattcctccagaccatattcagatctgctcatctccatccagagaggttttagcacatcacagcttgctcctggcctgataaactatcagtccctgaggagtgattgaataacccacatttcagtaactaccataaaatatgattctgcatccactcagtggcatcgtctcacaagtgcctttgatgcagggagcagcctctgcttgtgacagtgcagctcgactgagcaaatatccttttctcagagtgaaaaaaacaaaacaaggaagaacaaaagaaattgttgcaggcctttttttttttcctccattaaacatatgatgcctgactggattttctactttgtacttaataactcacttgttaatactatacatcaggccaggcatagtggcccacacctgtaatccctctgaggtgggaggaccacttgagcccagaagtccagggctacagcaagccacgacactccagcctgagcaacagagagagaccctgtctctaaaacaaacaacacaatgcacgtcgttaatgtacaccagagaggagatttggtctgcaaattctttaatgatatctcttgtgaccattagaataccttcccaactactagtaagctgatgaatcattttgaacatctggaaacattcttctaaagttkgtttttttcccttgtcaatcacagttttgtctgatcgtggattctggatccattagttctaatggatcaattcaagtgggcatgaagtyccactttggcaattcagagtaaaagcttaccttccatggctgatgctcttctgcctccattataattttaccaggaaaacaatagtccctctccactcttattcttggtatgaacaataggatgtatttcagtcagtaaattctgtggttctgaatttccttcagattgctttacttctaaacatttcgaaaagattagctgtatgtgtagctctgggttcagcttcacctcttagagatttctcaaccactaggacctagacaggttttcccttatgactgaaagtctcgtagaaaagtgacaactcgggctcccctaacacacatctcagtggtagggagctgtcttcctgggaaaacataatccagggctatcaaacaaaaggaaaatattgtcttactgatcagtgtgttttcagggcctggtacaatgactagtgcaaatttcacaaatattttgtgaatgagggagtgaattaactgaatttcttattccttcactttggttttgtttgctgtgagttatatagaactcataggtagggtttatttttggaaaacctgtattttgtgaagttcacctcatgacttacagtggttcaaaaggtattgttgaacttcctataaatgtgagcataaaaaacttacttgactctaaatgatatacttatgtaggccgagctttataatttaatttggatagtaagtggtagtatctaattatagtgttgtaaaattcggtttactaagactacatttgcattatactataagaagttctatctttaaagtacacaygtacctgcatgtttttttttttttactgtaataaatttaaagtattatgtcatgtctgttgaatatgaggaacatttkggggcagttgataggatttttgatgctaaacaaggaatgttttgctgtttcttcctgtacattccctagtactgtgcacaaacagtagagttgaawttcgtggttctccagttgaaatagaaaggctaattgccgtttcttttttttttttttgagacggagtctcgctgtgtcacccaggctggagtgcagtggccgatcttggctcactgaaacctctgcctcccaggctcaagtgattatcctgcctcagcctcccgagtagctgagattacaggcacgtgccaccacacccagctaatttttgtatttttagtagagacggggtttcaccatgttggccaggctggtctcaaactcctgacctcaggtcatccacctgcctcagcctctcaaagtgctaggattacaggtgtcagccaccatgcccagcccttttttgaactacctcacctagtcttaacttcacctgttacctactttcgaattttaaaaattaatacttattttcactcgtgttaatatcttttgattcttctccatgtttttaagcaattggttttgaatgtgaccctgcaaccgtgatctcaattgggtttcttttttttttttttgagacagagtctctctctgtcacccagattggagtgcaatggtgtcatcatggctcgctgcagcctcgaccttatgggctgaagtgatcttgaattgctggactcaaaccatcctcctgcctcagcctcccaaagttctgggattataggtataaatcactgcacccatcctggctttccattttatcctttacttttgcatttcatattttagtgttgtatgcatccatcagtcactggaggctgcttttttcctttattacctatttttaaggatagacgagatatagaaaaatcaaatcatacataaaatgggaataatactatcatttgcacatataaatgagtatattccctgtgggaagactaagcacttttccagacactgctgactttgttgaaatttttgttgctcatgttttagaattgtctttgtagacaccataccagacacagaagggaactggctttgttacttataacttatcctctttatcttgattatctttttttccctttcttgtctctctggaaaaagaagatttgtacaagaaccaaattgaaacttggagccagtaggaacccattggattgtagattttatggaatatgtctaataatcatatcattataattaagaccataattatttggcattttaccatatactgaacactttctgcataagttctcatttttccttatgacaagaaaggtagctattaaaatttcggaggaggaaaggaaggcttttaagtgacttgtccaaggtcacagtggtgaagttagcagttaaacctatttgtgatgctaagtcacattttctttctctgctgtcgtgcctaccattatttgtgtgtagtttgctttctgtaattgggtaatgtcagtgtaattgacagtattgtaaataattttgggctactcattgtgtgcgcacacttggagtataaaatgaatgtttgcctttagacttcggcgtaaatggagacgagaggtactgagtgccaggtgcaagcaaggccttctggaatgctgccttgtcacaatccttttctgtttgacgagatcgatgcagtgaaggacaacaagattttcttagcagtggagaagtgccacgagtgatgaagcaataagacatgtgcaggagagagcgcaggtgtagtgatcaggcacaaaggcagtaagagatggctggttgacctcccaccatagggaagaaccttgttttggctaattgtcttgttgggtgttcagaaagttgacctccagggagacagtgttagataagagcatgaacatacaattaaaatgattaaattaaaatttatttttggaacacttatttycttaaatgtgagaatgaaatctctaagcatatgctttcttttctttttcagtttaaacctttttagaaatgagactgggtagattccattttagctcaacaaatgtccttttaaagctttcttaaaagtaaacataggtcagttttaattaagatttgaatgatacccatagattattcattgtaccttagagttgattccagatcctgtttacattgatttagtcctacttttttttttttttttagtagctttttctttttttagtactgtaagaactcactgttggtgttaaaacacagattagctaactttgaagcttataagtatactcttataaaaagattccaagttccaaatcaagattctcctatgtgggagctaggatgtttctgcctcttgtctcttcactttttctctttctctctttttccctcctttcagcagcagttacctaacggatgccagggactgtgttaggtacttagtgacttttaggaacttggactaagtatttgtaaaataagtactggaaaatgattaacatctatcaatttttttataacttaccatgcactttgactatcatatctcacttatttaaattcttaccacagccttgtgtagtgttgttgtcatgttacaagttcagacacaggctttgacaggttcacttacttccttgcctaatgttgcatagttagtgaagcgctagcactggagtctgtacttaggcccctctgacttgcctcggtatgattgtgcttgctttgattcccgtcatttctacatttagtggtggcttttagtgttccattttcacttcccacttacactgccattctgcccccagattcttattacctcattcttggctcggggggataagcttcataattggttctcgttgttcttctgagtcatcttcctgtgaaccttggtcaaattagtattttttttcaagtggtttaccttccatgctacccttaagttcacccttgcagttgggttttgtaagctagcccctatcctattgtcctgcgagaccattcttcccagtttccacttaaacagtgaaggattccttcctggattattttcttcccactccagcatttcacatctttcaagatgcagtgcttatcttgtctcttctttgaagccatcccttacttcttcaacccactgacctctggattccaatggtctattttgctagtatttttttctttttcttgacatttcataatgtagccacatgtctcttaatttttatctcttccatacctggtgatttgtgttcaggggccttatgtaatgttcagttgacttaaacagaaggaagaactctaaagtcaagactactgtactccgaatttttgctaccatgaagtgaaacaatggtagcatgatctcagatgttgccagctgaaatagtttggtatatatgctcatttgtcttataggtgtcttttctgttttttggcatcctgtgcttaattctttttttgtaatctaagctttgttccaattcaaaaggagttgttattgtgtaacatgaagcttagatgcatatattgagttgctttatgtattttttttcctatttgagtttggtatgcagatgacttcctgaggatgtaaattttcagtggaaagcttaaagctggttttggcatgatgtttattctgtaacatgctgaatcattatatcaaatattgagtcgttttcctttatctccttcttttatacaatattcaatatttataacatctgctaactactgaatttttaaatctacttttgtggttgaagtttaaacagctacttttacaggccgtatttatctttattttaaggtagttacacaggtaatgaaagaaatgtgaaataggacaggctgttcttgaaggtcatgtgaattgccctttgaacttgttatatgattagaaataaggagttttcaaattcataaacaagtgcttgtttatatggctctaacaaatataattgtacaacactgctaatatggcagattagtttccagaaatgctgttcataagaccactttttaagtctctaagcagtgtgtgtatctgtacctgaacttgttaatgggaggactgtctttgtgatggcactggattcaactttcacatttcttttcaacacttttaaattgtccaagcaaatttttgttttgactttgttcttttcaatgcatattttgaaacacggtttcaagtccaaggcaacatctgaggctagtgccatctgttggtgacagttagaattaaatcacttttgctttgatgcgaagctttgttctttaccatgaaagtgtacattttaggtgaaatgccggcttattaagtgaagacttcatgaagtttttagaaaaatttattcagcaaatatttgaacacctgctgtgtgctaggcattgagagctgttagcaaaaccaacagtattccctgtgcattaatgggtgggatggacmaaaaatgaatatgtgtgctatggtaggggcaagatgaagcagtgtaagggggatatagaattcagggaaggtgggtggcatgctgcaatttcagatagaatgatcagaggtggtcaccatggagggtgtataaggcactcttctgttgttgctggatcatgaactttagaggttttaagcattgaaaatattattgttcctcctcccccataggtaatttgaaatgaaaacagtatgaaacttgaaaatagtaagaaagtcctgaagttattttctccatgatggctacttcactgcttttgttgaaataaattatttcaagaacattaaaaaaaaaaagtattccagctttactggttctctgagcatatgtgtaagctgccagttggtttattgaacactgagagctaggcactctagggggaatgtgaagataattcagaccttctttgaaccttgcactagcaggttgattggttagagcagtggcacttcagtaaattaagtgggaacagggatgtctgcatattaagaaatgcctattgtttagtgaaagtgaagtataagtataaacttacttataaaataagtgtaagattagcatacagatttcatgatgatttaaatcttaagtctttaggacagtgtttctcaagccgtctttgctgaagggttaatgttgtaattttgaagcaatcacaaaccaatgactttgtaaaatatattaaagttaaaatatgagaaaaatgaacccctctttgcttccctagttctttttttttttttttttaacctttttgcttcttcctttgtctccctctaggttggattattttatcttttaataataaaacctcattctgtattcttctgtttgtttcttctgtttatatggccataaaattatacagtgttgtggtgtgtttttgcatgtgtgagtgtgtgtattcgtaacatagtgaatgtttaatggaaatacactgtttgtcactgaatacgttttgcagtttatcaccctttctatgcctcttgggttatcatggatgggcgggatttggccttataagtgataccaccgaagttgaaatgtgagggttccttgattctttttggtattgggctctgttatggtttgaatgcatctcctccaaaatttgaatgttgtcagtggaatagtattaagaggttggggccttaagaggtgattaggtcatgagggcaccttcctccttaatgggatcaagacccttataaaaagscttcttgtagtgttcttccagcttgctcttctgccatgtgaggacacagtttttccttcttgccctctgccttctgccatgtgaggatgcagcaagaaggctcataccagatgtcaaatgctggtgccctggtcttggacttcccagcctccagaactttgaaaaatttctcttctttataaattacactgttccaggtattttgttatagcagcacaaagcagactaagacaagttctctagttgaattgtccaccctatacccctaaagggaaggaagattaagaagaagaattaatatataggcttctgtaggcacattgtctatataatgaagtgtgtagtaagatgaatgtctttgaatcaggtagcacttcttgcttttttttcagcattctctgcagcatctttcacatgttaggcacttaatgcttgtttgtagcatggagtccatttcttcaaatgagcctcttccaaggcattcattgacaacactttcatccctagtatcaaaataataaaatgtagttcttcctcaacacattatgatcagaaacatctatgatttttgttttaataaaccaaatttttaaaacttatttttcaagccaggagtgttttgccataggacaaaaaagtttatctctattaagcaggtagcagatcatcaatctctggaaattttttcccctccagaaggctgttgctgttttttatttcttttattcttttagcttgcctgctggctgttagaatagaggtgacagacggtcttgatatactgttgggcagagaatctgctggtttttatttggcataacaaatgattgaaaacagtgatgttttgttacagttctaataaggccgacrtggtagtgattcttagggtgcataaattctaggctctagaaaaaagtgccttagtaaactgggcactgtaaatgtccctggactatataagaagaaatttcttggcattaatgtgcatgagatagatatcacttattgcagcttttggaaaagtgcataaaggatgaagctaatattttcagcgatgatctgtcttggagccgttttccttcctgttggtctattctctctccacctctttcattgctagactcagtgaatcaatttctcagtgacaaccatgataaggcatgcctacacctaataattctcacccaagtttgtttttaaaattaaaatggcctatttcctattatatctttgggtgataacgattagaataattcttccacctgcgtgcattttcatatgcactgatttttgtcatgggaagaaacaaagcagaggaatgttttcttccttgctgtgatacctaattttggaaggtacactawtttcaaaatgtttgatatgggaaatggttgcatattccaaaaacacttagcacgaccttgctaaataatgctctctcctgtggtttggatcagcattgttttgttttctttgcatcttttgatctatctgaactgtcttctgcttgcagatatattcataaaataggattttgcaaattgaagagtaggtaaattactattaaagcgctgtatttgtactccctactcaaatcttctgagactgaactttttttttttttaaaggaatctatgaaaatctggctttcagcgagtcttattttctttttactgtttcctcttaagrgttttttaagttggctgaatttactctacttactcatatgtgttttagtagctattgagccattttatttaatagcttgaataaactattggttattgaatctttttagaaatacttatttctaatcccctctctttcctaaaaaggagggaagaagagatattttattatccaagaatatgctatcaatatcctggagcccacctatctagtttccagtgtgtcaactagcaccagcttagctaaccagacttamagtgagtttgtaattacatgattaggtatggcatacccagttactccttcttttctctgcctaccccaagccccattagctctsttttatgacagaaatttcagatttctttggcttttctgattcatttactgacgaaagagactttttctaggtttcaagaattatgaagagtctgagattctaccctacttgsaggttaacgtattagcctgccatactttcttatgttgctggacaactcatggcacagcaggcagtatgagcttgaagtttgcattgactcccctgcccctcaagtcccacaggggccacatggagacaggcctgggttggtgctgtccacagagtgggtttgtgtcctaggtgtaaaagctcaagcttaggagacccctattgttattaagactgctagcaaacctggacaactttcgcccctgagggagaagttatctttattctggtcaggaaacaactctgcccccccagggagacactttctgtctctcctaaggctgtatgctatccagacatccataaaatcgtgtggacaagttgctgacacaagatgtacagaaacatgagatgtccatggatgatggcttcccaaagttaggtagtagcaaaaagtagaactctgaatttttctgtttttgtcggcttctcccaaacgagaaaagttactttaaatgatgaacatgaattccagagagacacagattcctccatgtgaaagccattgcttttgttttgtttgataagaccctaaattagtgggcagttagcttttctggggctaagtattccaaagtgtgctttctgagcaatctgtgcttactgctgttagagcactcagcatactgctgtcatacctgtttttcccactatactgtatacttttatgaaggtaaggaatatatattattcatttttgggttacctctcaggtttgcctgtcattataatacattcttaatagctggctgttgagtgtaatgagtgaataaatcattagaagcttttccattcaaatctggttgttcttttatctttgcttattcagattctttaccccaatttgagagtgtaccrtctggtagaaaaagtatcaggaatataaaggattagtaaataktagttttctgaatgggttgatcttagatagaatcctgtgttagttttgaaaagctgggtcagatgccgagtgagtatcttgtgtgaaatcattcctaaacctaaattaatccacccgtcatccctttcttatcagattgctttgatctctaggaccagttttctttgtatggtcctctcatattatcttaaattttagattttagggttttgttgttgttgttgtttgttttcrtgagaagttttggctacccaccttttttttttttttttgaaaaaatttgggtttagtggtatatgtgcagatttgttatataggtaaattgcatgtcatgggggtttggtgtacagattatttcatcaccaggtgataagcatagtacctgataggtagttttttgaccctcactcaccttcctgtctctaccctcaagtaggcccctgtgtctcttgttgccttcagatccatatgwactcaatgtttaacttgcacttataagtgagaacatgtggtatttggttttctgttcctttgttagtttgcttaggataatggcctttagctccatccatgttgctacaaaggacatgatttcactattattttttatggctgcatagtattccgwtgtgtgtacataccacattttctttatccagtctgccattgatgagcatttaggttgattccatgtctttgctattgtgaatagtgccacagtgaacatacgtatacatgtgtctttaggctagaatatttatattcctttgggtatatacccaataatgggattgctgggttgaatggtaattctgatttgagttctttgagaaatcaccaaactgctttccacagtggctgaactaatttacattcccaccagcagtatataagtgctcccttttcaccacaactttgccagtgtctgttatttttttttacattttaatctccattttgactgtgtgagatgctatcttattgtggttttgatttgcatttctctaatgattagggatgttgagcattttttcatatgctttttggctatgtatgtctttttgaaaagtgtctggtcatgtcctttgcccactttgtaacggagttgatttttgcttgtcgatttaagttccttataaattctgaatattagacatttgttggatgcatggcttgttaatattttggttatctgccagggtttttatagtttcaggttttacatttaagtcattaatctatcttgagttgatttctctttatggtgtgagaaagggggtccagttcaatcttttgcatatggctagccagttatctcagtaccatttattgaatagagaatccttcccccattggttgtttttgttgactttatcgaagatcagatggttgtaggtgtgtggccttatttttgggctctctattctgttccatgagcctatgcatctgttttggtactagtaccatgctgttttggttactgtagccttgtagtatagtttgatgttgggtgatgtgatgcctcctacttcattctttttgcttaggattgccttgtctatttgggctatttttttggttccatatgaattttaaagtcattttttttctaattctgttaagaatattattggttgttagataggaatagcattgaatctgtaaattgttttgggcagtatggccattttaatgttgattgttcctatctgtggggatagaatgtttttccatttgtttgtgtcctctctgatctctttggccagtgttctgtatttctctttggggagatcttccaccttcctggttagctgtattcctaggtattttatttttgtggttgttttggacgggattgcattcttgatttgatcctcagcttggatattgctggtgtataggaatgctgctagtttttatagattgatttttgtatcctgaaactttgttgaagtwtatcagatcaaggagcttttggacagagactatgggatttcctaggtgtagaatcatgtcatctgcaaacagggatagtttgacttcctgtcttcctatttgggtgccttttattctttctcttgactgattgctttggccaggacttcaaagagctagaaagatctcaaattaataacctagtcatcacaactagaaaaacaaaaccaagagcaaaccaaccccaaagctagaagaagaagacaaaaagtaaaattagagcagaactgaaggacattgagacacacaaaaaaacatgcaggctggttgcagtgtctcctgcctgtaatctcagcactttgggaggccaaggtgggtggatcgcctgagatcrggagttcaaaactaggctggccaaaagtggtgaaaccctgtttctactaaaaatacaaaaattagctgggtgtggtggtgtgtgcctataatctcagctactcgggagactgaggcaggagaattgcttgaatctgggaggtggaggttgcagtgagcagagatggcgccactgtaccccagcctgggcaacaaagtgagactctgtctcaaaaacaaaacaaaacaaaaaaaaaaccstgggcatggtggctcatgcctgtaatcccagcactttgggaggccaaggcaggcagatcatgaggtgaggagttcgagaccagcctgaccaacatggtgaaaccctgtctctactaaaaataaaaaatcagctgggtgtggtgacgtgcacctgtcatctcagctactcaggaggctgaggcaggagaatcgcttgaacctgggaggtggaggttgcagtgagctaagatcgcgccattgcatgccagcctgggcaacagagtgagactccatttcaaaaagaacaacaacaacaacaagaaacaaaagatcaataaatccaggggttgctttttttgaaagaactagattgatagactgctagctagactaataaaaaggagagaagatacaaataaacacaatcagaaatgacagaacattaccactgaccctacagagatacaaaaaacccttagactgttatgtacacctctatgcgcacaaactggaaaacctagaagaaatggataaattcctggaaacatacaacctcctgggattgaaccaggaagaaactgaatccctgaagagaccaataatgagttctgaaactgaatcagtaataaaaagtctaccaaccagaaaaagcccagtaccagacgaattcacagccaaattctagtagatgaagaaaagttgttaccattcttactgaaactattccaaaaaattgaggagaagggacctcctcctgaattcatgaggccagtatcatcctgataccaaaagctggttgagacacaacaaaaagaaaacttcaggtcaatatccttgatgaacatagatgcaaaaatcctcaacaatatactagcaaactgaayccagtggcacatccaaaagcagatctgccacaatcaagtaggctttatccctgggatacaaggttggttcaacatatgcaaatcaataaatgttatccatcgtataatcagaactaaaagcaaaaaccacatgattatcccaatatattcagaaaaggctttcagtaaaatttaacatctcttcatgttaaaaaccctctaactaggcattgaagkaataaacgtcaaaataataagagcaagctatgaaaaacccactactgacatcatactgaatggacaaaagctggacacattccccttaaactggaataagacaaggatgccctctctcaccacttgtattcagcatactagtggaagttccaccttcttttaaatatggttggaaaaattaacttattgtattgaactattagtaattttattttagagtgagttcaccatagagatcagtaagatctcagtgctgtcccagtgctgttccgcacttaagttttggacctaagtgtttatatggttttgagtagggtaagataaagggtgtgcgtgctaattaccattgccagaagactttgcaagacctttttctatggctgtgtacttcttcagcttgaaaataaccttggtagagggagtggcaaatggaagcaggtgtcccattttcagtgccagcgcaagtgctcctaaacacacacatgctgcttgaaccctttgtccccataattgagaatcttggagaagcaatataaaaactgccaggtaatacttrtgttccttttgagacatttaaataaatttagtaatcaaaattatatagttatttttaaccagaaatgaaagtaggctttttggcaggcctatgtgttcacatctgtgctgggtttatatgttcttgccaacagtgtacttagtggtataacagagaaaaatgattcataagctttttcaaattcagacctacgactcatttatacttatattcccattaatatcgttagtatgaatggctttatatagttttctaggactccctcattgtaagttgagagagagggtagtctcgtcataggaagcatttctttgatggtatccatatattgagttgcatacattgtatgaaatgtaaagccttagcagatgcctaaaaatggttatttaatgaggccatttatgtccctcgtttctcaggttggaagattctgctggactacttagaaccccaactttattcatagtctgttgagatctctgttaaaaaacaaaaaacaacaatccacagccacttcagggactcatttattcttccagtgaaaagtccatagtgtacagaccccaaagtctactgatgaaataattaaaaatactattgagcctttatgcagagtgggttagcctgagtatttgggagtgttagttgmccttaaataccctctgccatgtcccctcttaaccctcaatagttaaccaagtattcttttactcacttattatggatatattactgtcccaaatatgaaaaagttagacttgtcagccttcaataaacttacatagtgacacaggmcatttatgtggaaatgttaagtgaaatgatacaagatagcagtgtaagaaagacaatgtaaactatttacctgcagtaataaaatatttttaatttggcctagaactttgaactttggggctagaatcttggaagatctttctggagtagtggagatttggtaagtgtctaaggctgtgttagatgtgataggtgaagaaagagggaaagaggatataagagcacagagtgtgttgtggccaatcaattttggaagggtagaagagctctataggaaatagcaagggctaatgaaacaagtgaaggaaaattactttttccttcccccttcccccttcccccttcccccttcccccttcccttcctttccttcttcctcccctccccctccccttccccttcctcttccccttctcccttctccttccactcactcccctttcttcccttcctccctcccctcccctccccttccttccctttcgtttccttccttcctttcctttccttccctttcyctttcccttccttctttaccttcctttccttcctttccttccgtcttactctgtcacccaggctggagtgcagtggcgagatcatggctcactgcagccttgacctcctcagtctcaggtgatcctcccaagtagctgggactataggtgcttgccaccatggtcagctaatttttgtattttttggcagagatggggtttcaccatgttgcccaggctggtctcaaactcctaggcagaagcaattcgccttggccttccaaagtgttaagattacaggcatgagccaccacatctggctggaaaatttctattttacgttttaatgttatccagtgttactactgtgaccacttacttagtgccatttaaatataaatctgatgatgaccttaagtaaatgaaagttaatacagatccatcttaaagcatgacttctaaaagtgagtcttcctttctataattctctgaagtcttaaatataaacattttaactagctttaatagtttgaatttttattggcaagatgaaagtagattattcagatattgaagtcttctagaccttgaggacctgatatgacatagggttagatatgttgaaaattagtgcatcatgttattccattgtttttcttttagtgtgtcttgttccttttgataatagcttttttgagatgtaatttctatcatacaatttagtcatttaaagtatgtaatttaatagtttgtagtatgttcacaaacttgttcagccattaccatgatcagtattagaatgttttttatcacttccaaaaagaactctacaccctttaagctattacctcataatcctctattcctttcagacataaataaccactaatctattttctgtctgtataatttacttattctagacgtaagtaaataatgagggctaatgaaacaagtgaaggaaattcacttgttttcttccatttccttcagacataagtaagcactggtctattttctctatatatagatttacttattctggacatttcctaaggaatgacttcaaatggaatcacagtaagtgtcttttgtaactggattctttcacttagtatgtttttttttttaagtgtcatgttgttgcatatatcagtattgcatttctttttagggctaaataatattccattgtatggatatatcacttttgtttatccattcatcagttaatggacatttggattgtttccatctttttggcaattgtgaataatgctgctacaaacattgatgtacaaattcctcagtggacataattattcatttcttttgggtatatacacctagaagtgcagttgctgggtcaaatggtaaaacttgaactgtatgcctatattttagaagaactatcagactgttttccaaggtggcagcaccattttacatttcccaccagcagtgtatgagtgttccaattcttccacatcctcactgtcactcattatctgtctctttgattacagccatctcactagataggaaatagtatctttatggttctgatttgcctttccctgatgatcaataagggccttattctcatgttgtttgtgggttgttgggtatagaaagcatcagccttaaagataacaatacctsttagcttggtttgctatagaaatgttttgggggaaggtaacgcaaggggctatgaggataagacttgaatcttgaagaaaagaacttagccaagaattgtagttataagggctttttagcaaggggatagtgtaaacaaagaaaggcttgcagatagaaatgtgtatgtcacattgtaagaagtgactgggtagaattgaacatgtrtgtaaaggggtctgaacatatatatataagagaatagctgaatttgaatgtgcattgtgctagattaagaggcccagtatatgaatttgagcttgacagtaaaaacagggatcacttaaaaaattattttttgtttagtgtggttatatatacaataatttaaggtagactagtttggtcaatatgtaaattaaggatagcagataggtgtcctacaacatgcttaactgatcagttggtagtgataccctggagcttctatattaaaaagaatgagacattcagtttggctcagttggccagagtgcagtgattgattaatgaggtccacttttagcatgggatggaagagttttgacatgatcattgcttattttccatttctgtagggtaggctgaggtgatagcagtgaatgtaagaaacatggagagaagagttaatgccttagtattttcagactactgattgtgggagcaaaatatggcttctcccttgacagtccctttaatttctgtggaacttgtttacttacctgtatactgctgatttctctggcctaatccccattgttttatgcctcctattacttcctagtctatcctttggattgttaaattagtgccctatctgatcttctttctcamatccatcctccaacatagttactggaatagtcttatttaaataaacatttaaccactactattaatgaccttcctcttgctggaaacattatgaccctaaagttaccgattcatgaagttgttcttgttagtaccatgtttatcaaactttttatagatccttgtcttcctaggtacagtatgtcagatagagacagacacatacatatacagtaggagtgaaaaaaaaattgtctgtgtaggggcttttgatatggtaaaataagctaatagactgatgtgcgtgcaaaaaataattataaactttggacacagtataaaatctaagtactctagagtgtgagcaaaactaagcagattttagaagggacttgaaacttacaagaaaaaactggcacagggtggattttctgttttagcagcctgtcctaaggatgggccacagccacagggtggaaggctcctacagaaagtatgcagtctttctggtctggggaacacagagatacgaagctagggcaatcatgtctgtcagagaatgagcggagacttctgaacgagagagagcgccagaggaggctagctccaaattattacaggggactttaactctcctttgtcagcaaatgatagaacaattagataagaaatcaatagacattgagacattgaagatctggacaacactgtcaaccatcctggccaaaatgttattgtagagcaccatatccaacaattgcagaatattcattcgttagttcacgtggtatattcataatgcaccatatactgggtcatgaaataagggttgaagacagaatgtactgattacaaccgaattaaaatagaaatcagtaagacatctagggagaccccaaatattgggaaattaaggtctgaagatagtgttcttgctaattacctgtttttgatcagctcttgtactcatttatttaattttttttttaagaagtggagtcttgtgctgtcacttgggctagagtacagtggcatgatcatagctcactgcagccatgaactcctgagctcaagtgatcctcctgcctcaacctcccaggcagctgggactataggtacacactatcatgcctgcctaatgtttttaaatgttttaatttactatttttaaattttaaaacttttcttttttttaatcctcctgccttggcctccaaagtgccaagattacaggcatgagccaccacgcctggcctaaactcatttttaaatactggggcagtagaatacagagtgggttggatatgaattactgacaaccataaatatctagacaaccatgtctctctctctctctctctttctctctctctctctctmtatatatattatatatagtttcttgatgatctcaatctcctgacctcctgatctgcccgcctcggcctcccaagctgctgggattacaggcgtgaatcatcgtgcctggccgtatgtctagatttttgaaggcatctctatttttgaaggctagagtggtgatagaaataaaaattcatcattacgctccatgtgtgaaacagggatttggttcarggtactataattctcccaaatagatgtttatactgttattgatggaaatgtttttcaaggagtagggtagtactaacatttatttcactattcaaggttattagcttactgacaagatggtatgttttatcargtctaaatttaaagttcttttgatacttaaaggtcaaggagctgatcgttttttgttacacttaaagaaatcatataactttcctattaaacacttcccttaattgcttggctttctctactgacgcttcttagaggtgtcattgctgtgagtttttctgtaaatgtcaataaatatagcatctgtaagacagaagttggatgaatcacatttaatgtgtaaaatttgtcaatgaagttgagtaatttgtcgtgaaagaagtcatatcaaaattaagtatttaatgatcatttaaagcgtgcagaattttaactagctgtttattttgatttaagtagaattatttgcaaacattattaaaatggccatttatcgtcttgttgcaaagcttttaagaaacttaggtaaaacaagtgtttatagctgtattttactgaaattttacatgtaattttttggcacttctagtatgatgagcaatactataagtactctgtaaaaatgatttttgtcttgggcttgtaatttccttttctaaggaagaaaatgattagaatcaagtatgatcaaagctaaaattaaattgcaaaatctgtataaagtacagctgttgctttgaatgttgtggttgtcctttgagctggtgctgcaaggaaaaaaatgaatgttacagttaatggaaatgagaagccattttaagattctgttataaaagatttcatttgagaaactggttgttggagagtgtcattgttttcttctttgggaaacaatcaggaaagctaacctcaaaggttttttattttagtatgtttagcagttagtgatgctatagtacccactaccagcttatttagtactaaataggcaggtgtgatttaaactgaaagacagttatatagttgacttaaactgaagattcacttgccaaatgtcataataggaagataatgggaaatatgaatcttaagttatcttctaactagttattaggttattgaactactcacacaattatgctgtaaatcaatttcccttttgtacagaagttcccccaactctctttcactctcaccctcttcctcttgtcacagacccccttcagcagtctgataatgtctatggggcccttcttagagtaatgtttctaatgtgtaatatatacattggattagttggtaccacatttatagacttctcccacctgactttaatatattaactgcagattaagaggttttgttatggtacgaattgaattagatagacttttcttatatatatgaatttcatatatattttatatctatattgtatatttaacttttttctttttttttgagacagggtctcactgttacctaggctagagtacagtggcacagttatagctcactgaagcctcaaactcctgggctcaagtggtccttccacttcagcctcctgagtagctagaactaaatacatgtgcatcaccacacctggttactttttttttttttttttttttttttttttttttttttagagatgggctttcactatgttgcccatgctagtctccaactgctggcttcaagcgaccctcctgccttggcctcccaaaatgctgggattagagcataagcctcaactcctggcccctaattatgttttaaatttccataaaatagagtactttttattttgttgctttttattcctagtatctctagcattgtattttgatcagatagatgctcagaagagtttaacatattcactgtctggtataaatgtctcaaaatttataagtaaatatgtaagtaaacctatcacaggccatgtactttaacataaaaaattcagggtttggggatagtgtaggtataggtatctaaagaatcacaataagttataaagcaaataatttttactttatttacaagattttgttataatcaaatgaaactttccatgagtttggaatcaaagactaattagaagagtccatctaattcagttccttccataacaaaagctcttaatctgcagttaatatattatgaaagtcaagtgggaggggtccataaatgtgataccatctaatccaatgtataatccaatgtatattttatgcatttacaacattactctgagaagaggcctgtagacattatcagactgccgaagggggcctatgacaagaggaagaggctgagagtgaaagagagtgagttaggggaaacrtgtgtacaaaagggaagttgatttacagyataattgtgtgagtagttcgataacctaataactagttagtagaaaacttaagattcayatctcccattatctttctgttattacatttggcaagtcaatcttcagtttaagtcgactgtataactgtctttcagtctaaatcacacctgcttatttagtactaagtaagctggtagtgggtgttactggggccactggaaggctttaaagaggttaagaaaccagtgaaaatacagttttgagccgagatgggaattagcaatattttactccaaagctagagttctctccaccatatcagccaggtcttagtatatggttaagtttccaataagtgttattcatttttggttctagagctctctctccatggggtaggtggagaaggaagacatctcagaattatatgggttgtgaagaatggggcatgtggtaagaacaaggtactgacgtcgtgaagttacgtcttgaggatggtcatggtagtttgaacacagatactggcttttctgtggaagtgttagagcatttgtgaggggtcctccaagtttaatctgaggttaaacctaccgggttcctcttgcttctgatgcttaacacaagttagagaaaacaaatggtgtcctagtgcatctgtcagtgtatgcagtgttttgggttgctactttcattttttggtgttcttttcactttctttcctgtgggatgaattgggtggaggtggctcactgagtaattcaagtagagccttgattaaattcacaactgtcacctgatagcaagaacatgcaatagtattttatctgataacaagtgatgcatgctttgcatcactattatggatccatctttgtgtacttatggatgtctgttctgagtaggtagctgatgaatgtcatgaatcagttggaacaattttgttgttctggtctaacagccagattgccacatgccatgtggtagtaatttattgtggaataatcacagtggtatttatttgaggtggtttgtatttgtcatattcatattacatatactttgaaagttggatttttccaataccaaaccataaacgtagcctaatatttttgccattgtgaacaccttagattttaacaccttaggagataaaggaatataaagtgatttgattttatattcctcggagattaaattcctaggagatttgatgctagatttcgagccactgctakacagtgaatgtcatttgagcttcatttttctcctttggagcctgacatgtaatatgtgctaaataaatatttgctgaattgaattctgctagccaagctataatgttggaaaatgtaccactctttgtcataaattggaaatgtgctttgtatatatgaccagtgactattaggagtctttatttcagaagggagaactctataatgcataaaatttctgcaaaccaaatgtgtgtttaattgttttctacagatgaactaacagcaagactgagtgctcattaaaaatttatgtcttaatcctaaggcacaaaccttacataattacttgaatgcttatccttggttggataaaaactacttaaaaataaccactgttttgtgatttcacatttgcttagttttagattaaaataaataacagtccttttaaaataaagattgtttataaacatacagacaaatctacagaatgcagtcatccattccaatgtagataaatgtttaccaaaggaagcaacagcatggtacatattatgtacgtatgttgcttacaaggattaatgaaacaaaaaattttgataagcattaaagatactctcaaatggccgttctccctctgtccatcgtgttttcatgggttacacattttatatatcatgaatggaaaagattctctgttcacgaattcctggttcagaacaaaataggaaactaaagtaagcatttacgacatacagttcttgtggtgtatttttgtttgataattgaaaagcatcacgaaaaattgcaagtattggacacaatggcaaataagcaaaagtattctgaaatgaatctagaaatttttttagtgaagttttatattacatgagtgagtttcatttttaatttggtgttactctgagccacgtggtacttgctttagtagtatttataggcttaatcaatttaaaatttcttaggcttttcttgagatgccttaggaatgtgaagtgctgaatacagggtcgggtgtgtatatataaagtaacatatattacatttattattggctgtcttttccctttaaaaaagtgaatccaagatattaatttcctgatttatcttttgcatttagtgttgacatcacctcattcattaaagaatttgtttctaacagttttgatgctgatttatgttgcaacaaagtaataggctttctataatggcctgttttctgttcagatttgattctgctgtgttgtcggaagtgaatcgtttagctgaatgattcatttaacagaatcatttactgtttctagtatacagtatagattccaaaggcctagcctttaatatgagcttcgcttgccctccrtctgagttgtctaagtagcatgaattatttccccatcagtgtcctcatagtatttattcattaatatgtttgagggcagtgcttaatttttaaggtttatgttgatagtgtcaagtttagaatctactgccataatcgagttttcaggtggaatgaggttaatccattggggtttaggaagaaaatattagaacttgtttttatttaatccttcatatttttctgtgtatacttgattttatgtatactcacattcatttattataaataaagtatacattgggtgcatatttaaaatgttcctatgaaaagatgtaagtgattaaaagcacttggaaatgaaatagatgagtaagggtcaaaaytagagtatagccttaggtatatgagaggaagaatggtaattcaagacacactgtacatctagaatctatgggtgatagaaggaacaaaaaagattctgttttcttgttcataactttagttagcctgggaaatctatgagaacggagagcaaaccttattcactattctatcccttgtgcttaactggatgggcaaccaggagcataacagttaaaaaccagaaagtcagaacatcagaaaaggttggattttcagactgatacatttacatctgtttaatttgaatatgctagctcaagtgagctctcttatatttcctgccttcactatttgaggaaatctgattttgttggctgaatgtcatgacccctgaccctgacacaacagatgctgtcgatggggartaaatgtgggacaggaatgattgtaggctgtgtagtaattatggtacaaactgctgtggttttgtaagacctgttcttggcaggagatgttgctttccttggggacttagaaaaacctagaggtgtccatgagagccacaaagagagaacgtgctcttaatcaacactaaagcaatgcattctgataacacaagcaagaacacaaatccttcctgctaataaaagcatttgccctggagaaaatccttgaagttactttttatagctgcatgattttttctctaacttatgagagtcatgaattttattgtgtactcaaacttttaaaatatctttttggttatgatttggcaaagtaggcccctgagacaaatctggcctattgcctgtgttgtaaataaagttttattggaacacagacatactcatttgtttagggttgctttcaggctacaaccacaggattgagtagttgtgatagaccatgtgggccataaagcctaaaatattgaactgtctagccctttatagaagaaaaattgtgtacctctgaggcttttgagcttgcagatattttatggatggttctttctcttttcccagttagatgattttcagatgattacatggagaagcttacttttatgagacaatatagtgaaatggttcacaacgttggctctggagtaaaacttagasttcaaaccttgcctcagccatttgtaaactgtgtaacttgggaaatattacttcttactttagttttcctcttctggaaaataagactaataatagtactagctcaaaaagttgttctgagagttaaagtgaagtgtttaatgcataacagatgctcaacaattaaatattaggtgttataacttgagcctttttctttctctctctctctctttcttcctcccccttccctctttccctctttccctctttccctctttttctctttttgtaaaggaaaaggtaaaaggaaatattccaaagtcatgtgtcatgtcagcagctgaatctttccttatgcttagcttctggctatactgattgtgttagtgctgctacagttgtctttttaaaagatgtttgttgaaaccataggaatgttagtttgcagtaaactttatctaatgtgatttgtgttggtaaatttgtatttatttttcatacgttgatttagtgaaattcaacttgaggttgtcattagattgcttatggtgtcctgtatgattcttatatggaaaagaatttactagtgctgtgagaccacatacatttggatgtcaagctcacggagatcaaatggcattcttgggtttaatcagattgcaaacacaatggagtttatagttgcctagagaataaggccactgaatagatcagagctaaatttaaattgaccctctattttcactcaagttaatttactccacttagctatttatttagcttttaggttgctccatgcatttggatttgtctgttgatttaagatattgtggactttacctgatctttggtttatatactactaacctagtaactttgtttctgtaatgtctttgtgggtcagctgttaaagctgaaagtgtgctagagctgtgtataattttccgcagattttaggttggcttctttcagaagtccccttcattgcagcctcactaaagcaaataaggtagtgttctcatgtttcagaatatctgtctgtgttccttgatggttcatgatgcccattaggcttttggctagtcctatggtgaataaaatacagttcttacgttttagtaaattacagtcaacatcgagtcatgtcttgttatcacatacttttggtcttaattgaaggctaatacattatgaagttatttgggtagaattatctcttttataattcctcagacatcctgacacacaatctttcctgacctgggaaagatctgaaaaacaaatgcagtaaacccagaacagatgattgtagtctgagtctgtgttaaacttttcactttaataggttctccctgtggagaggacaggggaaggcgctgctgaggaaggcgctgtaaagtctcccttctctccccacaaataattcctcaaaccaaatcatcaacctgtctgcagtctccttcacctctgtcttcttccttatttcctctctctctgcaagaaatgtttgttctcttttccaagattcacgttgcatttcaaagtttccgacttacaaaaactgttaccaacttttgtgtatctgtctgtgtaacataagctacacctgttaattataattttatgtaattatccagctaaaaatatttactgttaaccatatttttctagttttggagactatttatgggatttggaaacagttgtgtgcacatgtcacacttctatttattatgataatttccatacttatcaaggttcctaggttgcaatagctagaagcactgtggccaggagtgctcccaagggatttcctgtaaaagcacagttaacttccttggtgtcaaccttaaaaattaagccaccttaataatcaagcttttttccatagtcttgtgattacgcttagatgtgactagacccttcgactacatttttccagaaccacttgttggttgtcctcttgaaaacttttttccctctgaccctaatttcttaaccttctgacccttataatctgtttttctcccagtacttgttttctggcttttccctgacctttggttcattttcttacygtctgtcaatctcagctagttactgcttgctgtttttactatcgactctgtgatcgatctcttaaccttttccttttttgttttggttttatcagtacctttaatgtaattgcattcctttctttccacttcattgacctggcaaactttaaaccagaattaatttgactgtcagacttccctgtgcttatgcttgggctgcctactgctacagcaacctcagttgggcgcttcttcttttacgccatagtggcagcattgtcttcatggttctttaccctcctaactagtcatccccctgctcaactgtttcaaatgtcctccaagagatgtacaatgtggcagagacttaggttcatggtgataagtgaggggtgaagctataggttatactttttgtattctcatcacctactacaggttcatgctcagtgggttttcagggtgtttgacaaatgcttatattatttatttttagaatctataccatctcagtctataagagatctgaagtagctcacaggaaatacataccaaatagtgaaataaacttagcagtaaaacttctggctttggtaaaacattaggacaggaggatctgtatcatggagaaaatggaataatacagggattgtattagttttctgtgtttgctgtaatacattgctatacacttagtggcttaaagcaacacaaagttatcttagagttctgtaggttagtagtcttaaatgaatctcactggagtaaaagcaacgggtcaataatgctgtttccctttctgggaggctctagaggtgttaccctttccttgtctttttccagaaaccacccacattggcctctttctgtatcttcaaagccaacaacagtgggtcaagtgccaaattcttgcatcacatcactctgatctccccttctgcctcctgtttccacttttaaggatccttttgacttttgattacattggactcatctggatgatccaggacagtctccttactttaaagttagctgattaactgccttaattcgtttttgccatgtaactatattcacaggatgccrggattagcatgtggacattttttggggtcgtttttctggctaccacagtaactgatgataaagctccattcagttgctctagttaagtcataattgtgcctctaagctgcctttatggtggccgaaaggaaaatgggaagtagtccttgttagcttttgtatctatgctaatgaaaataccacctatagtagtgctattatagtacaatccatatgatcacttcaattgttctgggttctgcactagtagaggttggcactagtatggctaataaaataaattggaaatggataatttaataattaacccatttatctcagatgctatttaaattatttttaattatttgattataacaacataaaactttgcttaagtttcttttacttatagctgtcatatacctatatgaccaaaacaaaataacaaagctaaacaccaataaacttcaaataaatagcatttgtttatgggatggatgatagtttttttagttggccatgtgggtactccactggtttgtgtgacgattcagtgttcctactctatttgaacttacgctaaccatcgctcatacagctccaggggtgttgtttggtattagtgtagttttcaatactccactgaactcagatggtagatatggttgtaaggtagtcatctatttgatctagaatgtgcatttagattttaagattgtcattgaaatgcaaaattaaaaagtttttatagccaacaactcttgagacttcttgacactacatctgttctagggcttttaaagactctgaacttgacaaatgctaaaatggcagaatttgattgtgtgtctcatagccccgcatcacttttttttccatggataatatctcacgactagattttctatgcattactttaatccaataactcagagtaggatgtggcagtaagatttttgttttaagatgctgcctccccaggtatattttatcaggaatatttagtattattataaaattaccaggtaaagagggaattttatggccacatgtttttgtgtggaatgtgttttcttacctacttcattgtgttgaatttgtgaaagaaacggttttgatatgtcttcagaaattgcctgcattgatccatgttwaaaaaaaaaaaagaatctcacactataagagttagacataaattgtgtttgttagtgaagggtactcctatcaattcctttgtttctcattttctttgaatttggaacattcacttacatcttttcctttttgtgttttctgtatggtgtacgtgggttgattccccccccacccttagcattcaatatgcttaagtgttattttatatattggattgaatttttatggatgttatttgtcttaacaaaatatgtatctctacagaacattggcatagcttcctagattccttggtgggttagtgtgtatatgaggtagcatggttatgggtggccacctgaggactaaggagaaggcagggaaggacatggaaatgctaaattcttttccactttctgtatttttaagaatgactactacatctaatatgtttacaaaacccaaacctgttcaaactcatgcatgttttcatattagtttatatgggaacattctcaacattgatccttcagaattatgtatggtcattttatttgggcaacttagggctgcctcatttggtgaataatttcctttaaatgtatatgtaaatgaaatatgtttttatttggaaaaatataagatcatactgggatttaatgtgtttttattcatgtacaacataacactgtttttttttttttttttaaattggacttcagggcctgtataggaaagacagttactttatcctgtttttgtatctcaataacttagagatgagtgacctgttgaagtaaaagcctagagtttagaaatgggaaaattgtttatgctgttctcaaaaaggagttctaagtttgttgttagtcattgccacatattccttttctgattggcagggctgttcacttaaatcttcactgaagtgatgtgaaaaattttcaaaggtggaagagtgaataagtatagtaattcagtcactaagcacgcctattggaattctaacagtgtaacaaaatttaatctaatatataatactttaaccatagyctgcattttaaaaataatacaaatataaggtataaaatgaaaataattttcgagttctcatcacttctgcttttattatggagtgtgttataatctccaaggacctggttagttttctgccttttcttttcctaatggcaacagtacaagcatccatcaaaaatgagaaccagggcatgagcggatctttttcaactcagttgattactcaaagcagggaagttgtaaaggaagcctgcctctgttttaaatgttagaaaaatgttaatattacttgtgtttttccttttggagaacagtagtagtctagaggcagcgcctctaaattttttttgtgtggcctatgagttcgttttgtgtggcagtaactatttgtggtcctctttgattcaggactctctaaatggcttttaaagactttaaacttcaaatcttttctattacaacattcccttggtttcgtatgcagttacttctggcttggtgagacagttttcctatcattgtgttgtcctcagtgattattgattagaactcctttgttagctgggcagctcagaaaaacatgtggggatcactgtattacagagacaaggattrtagaaaaagggtcaattataaatttgaatttgttttccttgtaagacatttagtatccctaatgatggtgtttctactccaacttacatatcttttggcctctgccatttgggtcaccagagaaagtatcttgtaagaagtaaaactaactggtagcatggagagctgtactgtatactcaatttcctgtagtgtacattatgtggaagaccatacgttactgccatgggagatgtattaagaatggaaaataaggtgtagttgtaataaatcattaagtaaatttatataatattttctacactaatataaatatgaaaaatcaaagtttgagttactgccctcattaaaaatgagtacagttgacatttattgtttagacyttgatcaaattgctatttaagcttctaaacttttaatttctattgtgatctaatagctgacaggaggaggttgaactagatctcttaactcccttccttgctctaaaattctgatgccttggggtatttttattctttatggtttgatatgattcccttgttattgaatgcagtgctcaaatacagcattgacaaaacaggcatctactagtgaggcagaaatagataagcggcccctatgtaggtaacatatttgaggaaattggcagttattcctcttggagttactttcccacttaggaccagtgtactgtcaggtaaatggtgtggctcatttatgtttggcttatgaaaacaaagcacacaccagggactacaggataataaataaatccttttccattgttgatatcactgaaatgatggtaattgggcattatcagtacagatcagcaacccaggtttaaaaactaggcaatagagaccaaaaaacctaagaaggagttcctgaaagcagaacataagttactagtcaactagaaattatcttctagatgaagggggaacttgatattgaaggtcctatgagacagaggttctccaaacatcttaattgtgtaggcaaggtggatcacattggggctaagtaaatgatcctgattaaagttaggggaatgcaaaagttaagtctagatcatggtctcaaagttttttcatttatgtaaaaattatatacatttttaccctcacatttataatatttttcttccacatccccatggagagtgcttgtctgtttggctgacagtgaatactcctttccttctttcctttctcggacaataatattgttttaagcatttcttaaaatgttgcccataggctgtgctggctttccttcgctgtatgtagaactctttgattccctttagtcagagtgtctttgaatttccctattatgcctcaaagaaattgcagccacaaagtgatggtagaacatatagatcctcttctcttgtaacttgttgctactccctgttctcattgatccttgagcaggcttcactacagtgcatacctccccacagaggggargctgggtgtccttggcagaacaggtgctcacttaatagaggcagagaagggtctggtgcattttcttcctctggttgcaattccttggtggccagatcacactgtgcgctgtagcagtaatattgagaagttgattgctcctctaatggagcaggatgccattgctgtcttaatttcataggccttcctgaaggtcatcctcacttgggcttatttttactgtctctctcttcttggtttaataagaatccatagtaacataaacattaaaaaaacctatccaaaaggtattctattactagaaacaatatgccagtaacaaataagtctaaataatccaattaccaggtaggagatctgtggccagagatgtggggggatacttaacatttcagaatgcatactaagtatttaccgtatcagttagcaccatgctttttccagtattgaatttactgggcttccttttaaaatgggctaaaaagctttttattttaggagtgttttatagtcatactgtgatacaactaaactcatttgatgaaagaaaagtggactttcttaattgaatctttcaattgaattgtgactcattggatagtagatgctattttaattggggattaagttggagagaatttgattctgttcaaaatttgtgtgtaataaaaagcaaagagtttttattactaataaacattctgtatctagtaataatgcattaaatagttcaagcttaacatttttgtgtaaggatagctgatattcaaagggaatatgctgtgttctaacaggtttcaaattacttacagaaaatacagattgacaaaggttaacaattccaaatatagagctttcattattttattggccaagtgaataaaataatgagaattgtagaaataggccatttgttttttgagggcaaaacaactaaaacctttggtggattcctgaatggaaaatctttagaacttccttttacaggcagtatatattgtgttagatagcagcaaaatgaagtttgcctccttcaattttattttatttttttaaaagcttgcttgcatgtaatcgttaaaacatttcataaaaggaatgtaacatcttccagtgaattttgggtttagccacatacmgcacatgatgaagagtgaaagaaatggtgacaggtggtgttagttaattttgatgttggggggaatagcatcttgaggttattttttataaaattctctccaaggcacaacacttctactgtttgcaaatgggccaggtgcggtggctctagcctgtaatcccagcactttgggaggccaaggcaggtggatcacctgaggtcaggagtttgagaccagcctggccaacatggtgaaaccccgtctctactaaaaatacaaaaaattagttgagtatggtggcggatgcctgtgatcccagctattagggaggttgaggcaggagaattgcttgaacccaggaggcagaggctacagtgagctgagatcgcgccactgcactccagcctggacgagagcgaaactccatctcaaggaaaaacaaaacaaaaatgaacagaatagctaccctgatactgtgaatataagcaatcactataatttgagatggaatgaggtttagcatggaatgtatttctcagcattactttctttgatttttgtctcttaaaaacctgtaaagatttgagaactgatcataaaataactaattgaataaaacgacttgaattgtcatctgtagtgattctagtgtaaattatggcataaaattaaaacttcggaatgaaaaaacytgttcttcaaaagtatgttgtcttatttaatgacaacatgcaaatgaaaacaaatttacatttattgcaatttaaaatttatttctttgttttaactaagatattaacttttatgcaaggtttcaatagacctttctattaaataatatactgaagaagccaaatttctttatagacctgaaagagaggcagagtaatctacagtaacattattttgccaattccctaaagcgggtttgtaccctgactctgagggaacaaatataacagtctattatttgcttaaaattgatggaggtgtcacagcagtggtagtggggctgaatttacaaaatggactccttcagtttattctaaatccccattctgtccctcccttggattctttaacctatataaaattaatcatagtatttgaatagggataagaaaaagcattaaacttaaagtttcacatactgtagtagttttagaagattacttacagctctttcagaaacattacttaagactagatgacaagagactattagttttaaggtaaattaggtkctctgtctttaagtttggcccagaaaaatatttgtagccctagtttcacttcagctgccaaaatgcaataaaatatttcgactgcagtttgagaaatttgacaacctcatattaaattcaagagttagcctgtatttaatatgtgtcagtttrcttctgcattgcaaaatacatggctaaccatggtgtttgacacttgctcatgcactttttatcacaggagcatcacaaaatgattttttatctgcattgaaataaatgagattttctgttaaaccagtgcagcaattcaacaatcatttagttcctcactgtgtgttttgcacattacttggtgaagtgagaaggtattaaatggactagaagattaggttaggtgttactgtaaagaaccttaaattgttgttgaatttggacacattttaaggaaatttaagtagcttctcattcatttgaagtattgaatcataggtgcctacaaaattgaatgaccaaggttctccacagttgcattcctaattgctgcaaagccttacgtaaatgttactgatagtgttttacttttaaaaatgattttgatttgggtagatttcccatattatccacaggcctctacatttatagttctgattatattttcctttgtttttgtttttgtattctttctcctccactgtgataacctaatgaaagcataatttttttgtttgcttttatatccctcacagaatccagcagttttccttaggaagaagtaaattaacatgtggttatacaattcattttgtatcgtatcygctgttacgtattcccagttcttcctttgtaatgtcttacctgtaactttgtttctgtcttaattgtcatcatgagaataaggtagcgyaggatttttaaaattctttacttcactcaagtacatacctatgtatttaaactctttgccctggtgtctttggagactcttgcttgaaaaccattgtaaatgctgtattctttagatctcatattatcataatgactattaaacatatatagaacacacactatgtgacgtgtttgttttctcattgttactatttagatttggagtaaacttgtattgtaataacttgggagtgagttttatttgtggttcataaaatttttaacaaaacgatatggaggaaattgtagtttaatgaatgttgtggtttttgagattaaattttaataagccggggaagtgctatgtcatattaggaagggtcatctatttcatcacagtatttcctgcaccagtgcctggtacatagttaacacgccttgagtatttgaaggactgactgagtgaatgagtaactgagtaccattacacatcgttggtagagtaattaactggctagactggtgtgcagccatcaggactttaggtgscttgttggttaaaagctttcaggttggctttaaaagtatggaaaacttaattattttgagaacccttttattacgtaatagatgctaattgatgtcttttaagtggttgttggggcaagggactcttccacttttggggtaccagctgtttcagctcttatattkgagagtcaaaagaaaaagcagtagtrggcactaagtgatgtggacctcatcatacatatcgccaattgtctttrgcatcttcatatgatttcagctgccagtaaacaattcatctctggacttatcttactgattattggaagtcagcattgggattacttgttttatactgagatgcttttggagaaaaggcagtataaaagtgcatctgtgctaaggaaattcattttctccaatgaagtagaagtcagatttcatgttcctctgggaccaaacaataaaaccctgtctcctttccaattccaataaaggtattcaggcatcgtagacttgataacatgtggtgagtataagacgttgattactatgaagagaggaaggtggaaaagattagactgccttcactgagatctactggcagcattagcacctacagtggggataaaggctgtctcctcttagttttcagtagtcaatcccagagagatgtgctttatgccctagcagttcacaactgcaaatttcaaactttttagttttcctacttagattctgctattttatcccttgtcctttacttatgctgttatgaataccctttacttagctttttccttgctgaattaactcatgatttagtacattaagagttgttttatgtgtggaactgcctatataatcctggacatatacagttgactcttgaataacataggtttgaactgtgagagtccacttaaatgtggattttgtttttcaataaaagtaaccccaagtgtgcctgcctctcctgcctccctttgcacctcctccacttcttctgcctctgctaccctgagacagtaagacctgcccttcttcttccttctgttcagcctactcagtgtgaagacaaccaggatgaagacctttataatgatccacttccacttgatgaatagtaagtatattttctcttccatatgactttcttaataacattttcttttctctagcttactttattgtaagactgtgatatataatacatgtaacaaaatatgtgttaatcaacagtttatgttattgataagacttccagtcaacagtaggctattagtggttaagtttttggagagtcaaaagttacatgtggatttttgactgcctgcctggggtggtgggaagtgaggggagagtcagcgcccctaattcctgtgttgttcaagggtcagctgtgtatctgtggtttccaaagtgaggagcaggatgttcctttgggatgaaagaatgaattagatttttctatctatacatttatcttgagaggagaaaaggttttctcttgtttattagttgagttaacactggcactgttgtgtcatgtcaagtggacgtttgttattatatacaatatgagaagtgtcctgaggaagagtgggagttggtgaaacagaagagtttgtatcagtatcctgacttatttattgggtttctgcatattgcagcatattttaatttgtcttgcggcctggttatcttaagcatccaaattttgtggttatctttgatgtcataagagcatacttgaggtaactaagtctaagattaagcaatatttctacctcatgtacaatttaagacccttggaacactattcacttttccaatttaaatgttactacattccgtattttggttttattttttaaagtacttccaacattagttgttatcctcttcctcggatatcctatttcctcgtctttttttttgccccgttttaaaaatggcattttgatttttaatatggtatttaaaaataccatattttagtagttatttcagtgagagtatgttttgtttttgttttgtctgtctgaaaatgtttttgttttgtctgtctgaaaatgtttttgttttgctctgaaatgttgattgggtatgacagttatctttgttaatctgaaggtattatcccattgtcttctggcatgtgctatagcttggactagtctaattgtcattctcctgaagtaatttgaatttctgattgcatttaaaattttgtatacatagtcactgattgggattcatatttcctgtgtctgaggattcatctctttcatcagcactggaaaattatcaagttttttttttttcccttcacgacttcaacttgatatgtttcctttgattttgttgatgttgtataatctctttttcatatttttattcctttatctgtgctttcttctgtttaattgctcagattcatcttctagttcatctctgatgtctttttctgtatctgatttatggttttaacccaagcattggtgtttaaatttcactgcccatttttcattgcaataagttatatttggttctttttctaatctgctcttaaaaaaaagtagtatctcatttttgtgatgttgatttattctcttatatctttagtaaatgttaaacttagttattttgtagtatccgtcacataattctattatctaaatgtcttggaaatataaactcttgtgttttgtgtgtgttgattttcacaatgataggttgtttccatttttttgtataattttgtattatgaactcatccttaggytgcttcccaccgtgggaattttgtgtggtctagtttgaaaacatgtccctccaggtcctattttatatttgcttactctttttagtctcaataaccctgtaaactctcaaattattgaggggctccaaagagcttttgtttctgtgggttatacctattgatatttactgtatcagacattaacactgagatatttattcaatacttgttaatttaaaataataaactcataacatgctaacataaaatagttaatgaaaaataactgtctcaaaataaaaaaaatttagtgagaaagtgacagcattagttttgcaaatctctttaacatctggctgaagagttgaatacagcaggattctaataaaagcttcagagttcaatctgttgcaacatgtttctttgaaaggtgttaagaaaatctggcctcacacagattggtagtgggaaaaggaggagtgtttttatttatttattcattcattcattttaatttttgtgggtacgtaggtgcatatatttgtggggtacatgagatgttttgatacaggcatgtaatgtgaatttaacacattatggagaatgggctatctagcccctgaagcatttatttatcctttgagttacagacaatttgattatgttctttaagttatctaaaaataaacaattactattcactatagtcaccctattatgctatcaaatagtaggtcttattcattctttctaaccactttttttttgtactattatgctatcaaatagtaggtcttattcattctttctaaccactttttttttgtactcattaaccatccttctactctctctgtccatgagttcaattgttttgatttttagatcctactaataagtgagaatatgaaatgtttgtctttctgtgcctggcttatttcacttaacataatgttcttccagttccatccatgttgtggcaaatgactggatctcattcttttttatggttcactagtactccattgtgcatatgtacctcatttttttttttaatccattcatctgttgatggacacttaggttgcttccagtgttgcaacaaacattgggagtgcagatgtctctgatatatttcctttccttggggtatatacccaacagtgggattgctggatcatatggtagctctgtttttagtttttttttgtggagtttccaaagtgttgtccagagtggttgtgctaatttacattcccaccaacagtgtatgagggttcccttttctccacgtcctcaccagcatttgttattgcctgttgtttggataaaagccattttaactggggtgagatgataacctcattgtagttttgatttgtatttctctgatgattagtgatgttgagcaccttttcatatgcctgtttgccatttgaatgtcttcttttgagaaatatctattcaactcttttgctcatattttgatcagattattagatttttttcctatagagttctttcagctccgtctatattctggttattaatcctttgtcagatgggtagtttgccaatattttctctcattctgtgggggtgtctctttactttattgattgtttcctttgctgtgcagaagttttttcttttttttctttttttcttttttttgagatggagtctcactctgtcacccaggctggagtgcagtggcatgatctcgactcatggaaagccacgccattctcctgcgtcagcctcccaagtagctgggactacaggcgcctgccaccacgtccagctaatttttttgtatctttaatagagacagggtttcactgtgttagccaggatggtctcgatctcctgacctcgtgatccgtccgcctcagtctcactgtgcagaagctttttaacttgatggagggttatgagaaggagacttggttctggattagatgttgtggggtcagtgggatggtctcttattgtttatctaaatgagtgttgtatttcaggagaaaggaataaatggaggctatagctttaattggtaaagaagttgtagtcgttcttgttagcaaggaaaggtagatatttggttatttttgttttttggacaatgttgatatgtttgcttgtttttgtcttgatccatcatggtcagtagtcttgtctgatgttgatgttcttctaacaggaggacatcaagtctttgctgtgagggtcaggtcttagcaacatcagggctctgctaacggtactggttttgtagcttttaggctgtttttagcttgtagtttgtccattgttcttgcatgtaaagatggtgcccatgcaaaaaggttgtagttgatcttgtgactcaacctcacaagtgtttttcctcaaggtaactattaaacttcactatgcagcagaagtgctttatgcgtagttgtcacgtggtcacacaaaatattaaaaagactagtcgtgagatgaataatgtctcctgcaagagatacacccatgacctaattatcacaacctacgaatattaccttaattggaaaaagggtcattgcagatataattaaaaatcttgagataaggagataattttggattagattaggcaggctctaaacctaatgacaagtgtcatgatgggagagagacacacagggaagacagagacagaaggggagaagacgcagaagaagaggaggaggcagtgtgatcatggtggcagagattgaagtgatgtggctacaaaccaaggaatgtctggagccaccaaaagctgaaagagggaaagaattggttctcccctagtagccattggcaaggactgtggctttgttagcaacacttggattttgggcttctggcttctagaacttaaaataaatgccgtcgaaaggccatgaagtttgtgggaatttgcagcctaccggtctgtggcctgttaggaaccaggccacacagcagaaggtgagcggccaggcgggtgagcgggcattaccgcctgagctccgtctcttgtcatatcagcagcggcattagattctcataggcgctcgatccctattgtgaactgcacatgtgagggatctaggttgcacatccttatgagaatctgaccatcccctgtcagtggaaaaattgtcttccacaagaatagtccctcgtgccaaaaaggttgggcattgttggtaaggtaccagtagtttaacccacgattgcttttgtatcataactgaaaatgtcagtatggtaaaatttcggtattatwgtgaacatagttttgaccatgcagacttctggaaagggtatttgaagaacctgaatagaaagtgaagaactttcttctttgagactctggagtacaggatatagtaactactttctcactgccaactcagatataaaatgtarcagagttccttttattaatacatatgatatttgttgaattagagcttgttacttattgttatgaacttaygatactggcataagtgaggagtaagaatggtttctctcatcattygagtgaaatctacatgtaagagtaaatcttttaagtgacagaaagcaaactcaaccctaactttgttttctgcttacttagacaattggctattgattttagagatttacctgtcaaggtagctgcacttactgttgatgtcttgtcttttggtgaagtctccctatctacctgtgttctttaactgccatggttctctcttggaaataataaatttttttatttattgttctattcttctaccaaatgatgtctaggagatccatgagccttttctctcccttttctgcttccaactgtgtgtacagatgtgtgcacatgcacacatactcaaatgcataaatgcacttttcacttagttatctagttgtcagctcttcctggaatctgattctatcattgcacaactgtattgataaatattgatttccacagatacttaagggttggcattagtctatttacagccaaattgaggacaaaatatagtaagggcatttaatttgcatcttagagttccctataaaaaggaacataaaacttactaatgttttaaaaaaactcatttaattgctttggagtgtaccatagtgctgagaagggagacccagcccttgaactgctagtaggagggtgaatatcgggcccagagaagcataaaagaagatgtcttgcttgtattagatgagataggaagtactggttcccagagacacaaagaatggtgagctagagagtgtgtcatagcttcaaggctgcatacatgaaatcacttggtgactagagcaaagtgctcttatgacaaacttcaacaaaaaaagcaaattattcctaagctagtactgtgtaagcagtggacaaccagaaagagaaatcaggcttgttgtcttacttgttaccagtaggaaatgtggaataactgaattgttgctgtattctgtatataataaggaaatacgttttgccttggtttattgtaccttgggaagtgagaatcatttgttcattggccgtgtgactaggctggcatcttgtgggcattgccctttgcaggcacttaggttgcaattttctttacactgctgagttgtttaccattgttcgtccttttaacacagtataccattttgttaacatctgtttgctgttatctttttgtccttggaggcttatgcttaaattatttcttgcatgttttaaaatttatcgcttgctggaggaagcagagttgggtatactcaatayattatttttagctggaaatatctgccttgatttagcccttggttttgaaacatacctgaggtattgtttttttttccttgcaattcctggaatctgtacttgattacgttagagaacattgtttggcatttcttttatcccctccaaactatagggttaaaagggataaaaaccttttaaccctatagtctttcttatgctgtattctgtgttttctccagccaagaagacttttcagctgtattttttatagtttgtatgatggagaaatataggctgttaaatatgctgtttcataccrttctccggtatgctttgaggatggatttgggcacacatgcagcctctctcctctccagtgaaaatcacatactgctcattgttaagagattcctgtctctgcccttaytgagcttctaacttgctggaacaagaagacatatcaatttatatgactgggtggccggcagcatattgacctttggtaatttgtaacaacttttcttaccagtctgtgcacttgttgaaaggaaacactaccaactaggtctatgagtgacagagaccacggtgaaacgttttcaaaacctattcagaattatacatttgcytatttaaatggttggtattgccaaatgcatcctattctgaaagaagtgaaataaatgtgaaagctgtctttagctcattagtgaaatgaaggaaacattgtgaatatcaggatgacttgtcatgggaaattaaattgaattgaaaaaatgttaatctcaaatagattttgctctgcatactgactttttaaatgtgtcaggtttacattgacagaaagatctatgaagactttgaccttcacaaggaaacacacagttatttgacaattgagtgaatgtattaaaaaaaaatgagtgatatacccgtctgttcaatttgggagttggtgatgagctaactgaaaagagtggaaaggaagaatttatgctaagccttggtatctgagtcaagttatggagacctatgtgtctgtttgattaattgcatcatctcaaagcaatgcctaactatgctggttagctcaggtagcatgtgagaacagggaatgcattgactttctcactttgcttcctaaatactatttaaaatttagatatagctatgatattaaaaaatgtgacttcagatacttattctctatttttgtttttgttactttctcaatataaatctgcatatttttagttttagtacaataagttaaatttttcttttttacattttgaggcatactttacatgcaatatagccacatattttaagcaagaccctgtgccctttccagccccatgtccttctacgtgactattatttcatttaccatggcttagctttgcctgtttaataacttcgtataatcgtacagcatgtattatttttatgtgtggtttttttagttcaacacagtgtttaaaaaattcattatgttggacgtatcagtaggtacttcatttttgatgctgtgttgtatcttgttgtttgaatatacagcaatatgtttagctgttcacttgtatatggacatttgggttatttccatatctgttgtggtttcacccttagttttgagaaacactcttcagtcctggaacctttctgggatttcagtggaaaatccaaagtgccatcaaagctcttctaatttggtggaactcagactccaaactttgtcttcctttcagcgagggtcagctaaaatctcttttctgttctttcttcgaactgttatttctatctgagctccttggagttttgccacttgcacgtgcatttcagctgtcagccaagaatttgtggaggattatacagatatctgaggtaccctttctgtggctcactytgttttgggattcttaatttctagattttctgggcctgtggtgcatgttctgactccttagactaatagatagtggctttctgtttcagtgctagcagtccaagccaagtagaatggcagtgacctcagggaaaaagtgggtacagtacatagaattccaagaacggcccctcgagattccatatcctaatctttggcaccaataaatataatattattcccatgagtatgttaaattattagttgacattaagatgggggattattttggtgggcccaatactcacgtgagatcctttaaaaactccgagggttttctgtggctggtggcagaagaggagctcaaatttgaggcataaggaagatttggcatgttgttgctgggttatagatggagactttgtgagaaggtggtctaaagaaactgagagaagtccctggctgacagccagcaagaaaatggggacttcagtcctacaaccggaaaggaagtaaattttgccaacaacctgaatgagcttggaagtcargttttctccagagcttccaggtggggacttggcccagctgacattttgatttcagacttgtgataaccctgagcacagaacttggccatgctgtgccagctttctgacttatggaattgtgagtgaataagtggatattaagtggccaggtttgtggtaatttgttatgcagcaacagaaaactaacacaacagggatttcctgcagcatgatttccttctttcctaaggctgtccttcagtttctgcctgattttgcttattctgtagtccttcaaatagtagatttatatattctttgttggatttgtaattgttgctatgagaatgtttgatataaattatcctgccattactggagctagaactcagtctccacgtaatttgagggttcttttttctttttcttttctctttctttctttctttttcttttcttttgagatagagtcttgctctgtcactcaggctggagtgcagtggcaccatctcagctcactgcaacctctgcctcctggattcaagcgaatcccagcttcccgagtagctgggattacaggcgcgtgccactgcatctggataagttttgtgtttttagtagagaaggggtttcaccatgttggccaggctggtctcgaactcctgacttcaggtgatccacccacttcagcctccygaagtgctgggattacaggtgtgagccaccatgtctggccaagggttcctttttcactttaaaattatttacaccactcctattcaacatagtgttggaagttctggccagggcaatcaggcaagagaaagaaataaagggtattcagttaggaaaggaggaagtcaaattgtccctgtttgcggatgacatgattgtatgtttagaaaacctcatcgtctcagcccaaaatctccttaagctgataagcaacttcaggaaagtgtcaggatacaaaatcagtgtgcaaaaatcacaagcattcctatacaccaataacagacaaacagagagccaaatcatgagtgaactcccattcataattgcttcaaagagaataaaatacctaggaatccaacttacaagggatgcgaaggacctcttcaaggagaactacaaaccactgctcagcaaaataaaagaggacacaaacacatggaagaacattgcatgctcatggataggaagagtcaatattgtgaagatggccatactgcccaaggtaatttatagattcagtgccatccccatcaagctccaatgactttcttcacagaattggaaaaaactactttaaagttcatatggaaccaaaaaagagcctgcattgccaagacaatcctaagccaaaagaacaaagctggaggcatcacgctacctgacttcaaactatactacaaggctacagtaaccaaaacagcatggtactggtaccaaaacagagatatagaccaatggaacagaacagagcccttggaaataataccacacrtctacaaccatctgatctttgacaaacctgacaaaaacaagcaatggggaaaggattctctatttaataaatggtgctgggaaaactggctagccatatgtagaaagctgaaactggatcccttccttacaccttatacaaaaattaattcaagatggattaaagacttaaatattagacctaaaaccataaaaaccctagaagaaaacctaggcaatactgttcaggccataggcatgggcaaggacttcatgactaaaacaccaaaagcaatggcaacaaatgccaaaattgacaaatgggatctaattaaactaaagagcttctgcatagcaaaataaactaccatcagagtgaacaggcaacctacagaatgggagaaagtttttacaatctacccatctgacaaagggctaatatccagaatctacaaagaactcaaatttacaagaaaaagtcaaccccatcaaaaaatgggcaaaggatatgaacagacacttctcaaaagaagacatttatgcagccaacagacacatgaaaaaatgctcatcatcactggccatcagagaaatgcaaatcaaaaccacaatgggataccatctcacaccagttagaatggcaatcattaaaaagtcaggaaacaacaggtgctggagagaatgtggagaaataggaacccttttacactgttggtgggactgtaaactagttcaaccattgtggaagacagtgtggtgattcctcagggatctagaactagaaataccatttgacccagccatcccactactgggcatatacccaaaggattataaatcatgctgctataaagacacatgcacacgtatgtttattgcagcactattcacaatagcaaagacttggacccaacccaaatgtctatcaatgataaactggattaagaaaatgtggcacatataccctatggaatactatgcagccataaaaaaggatgagttcatgtcctttgcagggacatggatgaagccggaaaccataattctgagcagatatcacgaggacagaaaaccaaacaccacatgttctcactcataggtgggaattgaacaatgagaacacatggacacagggtggggaacatcacacactggggcctgcygggggtggtgggagggggaaggatagcattaggagatatacctaatgtaaatgcagcacaccaacgtggcacatgtatacatatgtaacaaacctgcacgttgtgcacatgtaccctagaacttaaartaaaataaaaaaataaaaaataataaaaataaataaaattatttacatgggcttcatgttagttgcataacatttcattgttttggagtaccattttcctaatcttagctgttgggttgtttctgaatttcgctgcaaaaaagttgcagagagatccttgagagtctgttttttggctctgttgttttatttacttggaggtaaactggagcaaaattcctgggttaaagggattagaggaaataacaaaacctttggagtgagatgagttagtattttaccttccgttatgctacttaactgtccgtgagactgtggcaagttaacctattttagcctcattttctccttatgggaaaggataagaaaatctatccttaatggttgatcaaggattaaactataaagtttttagaaagcattggcaaagagatggacatttaatggtagatgaggagatgaagataaggaccatagctatcgatgtgttttgccaccttgctttccaaaaataaaatgccaatttatggttgggttgctttctttraatagatcttctgaataactaatgaaacagagatgagtatgaatagagcacaggacagggtggctgaagttaaagaggaaggaacagagtttaatatttacatatcagttgttgagtcagagctccaaaagatatataattattcttttctcttgagtttgcacatctaaaggaaatccttttgagatgactttaagaggggtggtttttggactttttttcttctctgtgcttccctataggtctagtctgtctgtttaggccagaaaacatctttgcttggtttgtttccagtttagctgtcatttgaataatccagagttctaagaattttatactggagatccttatccagtgctaattggattgtgattttcctagtgtaccacatcctctataaatatacttgtctttgtgtcccaaaggatgctattttataacaacacattgaaataatactttctcagtattctactcaagcactttattaatgtagatgcttaggttatattgttggaaaatgtttctgttattgacaacttgctctttttatttggatgggatagtaaataaaggtacttaatttacataagcctattaaatgaaattctcaagaggaatgaattttaaatgcagcttacaatgtggtgacagctgattcacttataaacaagctcgtttagtggaattggactaaatgaaaaaactttatgcagtagtttttctttttttaatttcagcttttattttagatacaggggatacatgtatatgattgctacatggatgtattggacyttgtagtgagcatagtacccaagaggtggtttttcaatccacacccttttcactccttcccctttctagtagtctgcagtgtctcttattcccatttatgtccatgtgtgctcagtgtttagctcccacttataagtgagaacatgtggcatttggttttctgttcctgtgttaattcatttaggcttatggccaccagctccacccatgttgctgtaaaggacatgatttcactcttttttatggttgtattgtatttcatggtgtatatgtgccatattttctttatccagtacaccattgatggggacctaggttgatttcatgtctttgctttcatgaatagcatggcattgaacatgtgagtgcatgtgtctttttggtataatgatctattttcctctgggtatgaacccagtaatgggattgctgggttgaatggtagctcttatacagtwgtttcataacataattgtttgtggtatatgccaaatagtattcataatactgaactatatggagggattatctccattcctatcaaccccttcctttctctcttcttaccacagaaggtaaaaagaaagagattttgttttgtttttcaaaatcgttctaccaattaatagttgaaatgcctttttaaaagagaaactaaaaggctgagctttggttatcagaggttctaaaaagtgtagttaaaactgtaaaccaaagaatcgccctctcacccccattgtttgtttcctttcttggatgaacaatttgcagtcttggttttgttttttttttctggtagaaataaaattagcgagataatgaataggacaactgaatkgctctatttttaatttctctttaaaggtgttaaaaatgcttcttctgtaatattatcagtaaggactttgtttcctttggccatkgggagttaagagcacagccgtcagaagagattcttctgggatactcccctctgacctccacagaagtaaattttctccttgaggaggctacttgcaaattcagctaatgcagaacatggtgttcatttgtttaaaggcttgcagccctagggcacagatgtaacgtatctgttcttccaattaatttctgacaagctcaggtgatgactttgatatgtcagactgtatatggtataggccttggttaccttagaaaccatctcttttcttaggtttctgcttaggaattgtagttcccacaggcagttctgcagaatattttcagaactgaatttggaaatggaggaccctgtattcttcagagaaaacacagcctcaatttcttctatcaattcatttagctatcatccttgaatatctctgggtatggttagaatccctatgataggttttcctcagctgcagttaaattctagactatttcttcatcactttagagtctgcgttctcatttctccgagatccctttctgcatgcttctgttcagtacattttattaatctgttggaatgcaccttagacaatactcatctaccatatccttatagctgctgttttttaatgttaatttgtgtaatacttagcaattagcttggcatatcctgtggagagaagtaaatattttttttttactcacaggtactatcatattcattccacaaatgaatatgttcctttttatcttccctttatagtgaccctgtttgcagtgtctaccaaatgactaaccagtagtaagcttcaatcaaatcaagagtatttagagtgtgaggaggattgggagcaagactcttgggagtatacatagaatccaataagaaagaagggtaggaggaaagtcagagagaccaaatcacgaaagagtagtcagtggtatcaagttaggcttgacaggttaacttctctgcaatccttccactcccctcagtgctcactgacatggtctgagtttaggtcatttctctattcttcacccacatatgctttgtctggaatatcttttctttctttgcttacaatgttatgccttcctgttaaacctgtaaaactcagattattcatcgcctctttgaatccgtttcctagtgcccactcactatgatttctctttgtcatgtataggtgtctattactgaacttaccaaaatattagaattgtttctgtgactatttcttctattagactgtgagctttttaaagatatgagactgtttcagtcatctttatacatcaagtgcctaatgtagaatttagctttaatggaagcttaaaagtaatcaagaaagaaatatgaagacttaaaatgggccattagttttagcaatgagggaataattggtaatctttaccagaaggttttattcaagtggtagaggtggagagctatattgaagagcgttgataaaggaatagaggagaggatgagtgggccacagttcaagaaggctggctgtaaaaggcaggaaggtggatagtggaggcttgtagctggcaggacaggaatatgtatatggtgcagtcttttggatgtacaaactgggagatatgaacatgttttatagcctaagtgaagaagcccttgaagagagtagggttcaggaggatgtgggaggggttaaatccagagtatgggagaaagatgagctttttaatagcaatcttaaccatgcttatttttattttttatactttcaacttttattatagattaaagggtacatgtgcaggtttgttacatggctgtattgcatgtctgaggcttggggtacaaatgatcctgtcagatagtgagcatagtacccaataagtgcacgccccttttcctctctcccgcatttagtagtccccagtgtctattgttctcatcgttatgtctgtgtgtattcaacgtttccattcccatttagaagtaagaatatgccacattttgttttctgttcttgcataaattcgcttaggataacggcctccagctctatccatgttgcagcaaaggacagcctaaggctgcgtagtattctgtagtgtatatgttccacattttatttatccagttcatcattgaagggcacctaggttgactccatatttttactattgtgaataacacaacattgaatatacaagtacatatatgtttttgatactgtaaattattttcctttggttatatacccaatagtgggattgctgggctgaatggtagttctgttttaagttctttgagatatctccaaactgctttccaaagtggctaaactagtttgccttcctacaaacagcattcccttttcttggaagactctgtaacatcttttatttttttgacttttttagtaacctccattgtgattggtgtgagatggtatctctttgtggttttgatttacattttctttgccctcctgaacacccgcttgtttttgagacaaggtcttgctttgttgcccagtgtgatctcagctcactgcagccttgatgtcctgggcttaagtgatcctcctgccttagcctccagagtagctctttgcccatttttaaattatattgtttgttttttgcttgtcgttttaagttccttgcagattctggatattagacttttgtcaaatgtcaaaataattgcaaatattttttctccgattctgtaggctgtttactctgttgggaatttcttttggtgtgcagaagctctttcgtttaattaggtcccgtttatcaatttttgtttttgttacaattgcttatggggacttagccacaaattatttgccaaagccagtgtcaagcagggtattttctaggttatcttctaggatttttatagtttgaggtcttacatttaaatcagtaatccatcttgagttaatttttgtatacaatgagaggaagggtccagtttcattcttctgcatatggctagccagttactctggtatcatttattgaataaggagccctttccccattgtttattcttgtcaattttgttgaaaatctgatggttgtaggtgtgtgggtttatttctgggttctctgttctgttccattggtctatatgtctcttttgtaccagtaccatgctgttttgatcactgtagccttacagtattgtttgaagttgggtaatgtcatcacaaatggatgttggattttatcaaaaggtaaattttctgcctctattgaaatgatcatatgatttttgcttttgattctgtttacatggcgaatcacatttattgatttgtgtatgttcaaccaaccttacatcccaggaataaagcctgttttattgtggtgagtgaactttttgatgtgctgttagatttggtttgctggtatttcgttgaggatttttgcttctatgttcatgagaaatattggcccgaagcttttttgttgttgttgttattgttgttgttgttgtatgtctgctagattttggtatcaagatgatgctgggttcatagaatgagttaaggagaagcccttcctccttgattttcttggaatagattcagtagtactgatatcacttcctttttgtacatctgatagaattcgggtgtgaatccctctcgtctggagctcttttggtttggtggatttttaatcagtgattcaatttctgaacttgaaagttgtactttcttcctggttcaatcttgaggttttgtgtttccaggaacttatccatttcctctagattttctaatttgtgtatgtaaaggtgttcataatcgtctccaatcttttatatttctgtgggataggttgtaatatctttgtcacttccgattgtgcttatttggatcttctgttttttgttgttgttaattgtgtctcaattttattcaattcttatttgattttaattatttcttctaccagctttagagttgaatttttgttttgttttgttttttagttcctctaggtgtgatgttagattcttgagatctttccgacctcttgatgaaggcatttagtgctataaactttcctcttaacatcactttagctgcctcccaaagatttttataagttgtgtctctgcttttgttaattgcaaagaatttttatttctgtcctgatttcattgttcatataatgaacaatggttcattcagaagcaggttgtttaatttctatgtttttgtgttatttttgagaratcttctttatcratttctgtttttattgcaccgtggtctgagagtgtgtttggaattatttcaattttttttttgaatttactgaaacttgctttaagactcagcatgtggttgatctttgaatatgttacatgtgcacctgagaacaatgtatattctatggttgttaggtggagtattctgtagatgtttattaggttcagttgttcaagtatcgagtttaagtccagaatttgttagttctctgcttcagtgatctgtctaatgctgtcagtgtggtgttgaactctcccactactattgtgtaataatggcggtgtaagtgttttcgtaggtcaggaagaacttgttttatggatctgggtgctccagtgttgggtgtgtatatgtttaggatagttaagtcttcttgttgaatagaacactttatcattatgtaatgcccttcttcgttctccctgattgttattggtttaaagtctgttttatctgatacaggactagctactcctgctctttattttccatttgcatgataggtctttatttttactttcagcctgtttgtgtcattacatgtgagatccatctattgaaggcaccagacagttgggtcttgcctttttatccatcttgccattctatgccttttaartggggagatttagaacatttacattcaggattagtacgatatatgagattttgatcctgtctttatgttgttggctgtttgctttgtagagttggttgtgcaattgctttatattgtctgtgagctattgtgcttgagtgtgttttagtggtagcaggttttaaacttttatttcaatgtttagcactccctttaggacctcttgtaaggctggtgtggtaatgaattccctcactgcttacctgtctgagaagcattttattttgccttcacttacaaagcttagattggtgggatatgaggttcttggctgtaatttattttctttaagaatgctgaaaatagacctccaatctcttctggcttgtaaggtttcttctaagaggtctgctgctaaactgatggcgttccctctgcaggtgacctgacctttctctctagctgcctttcaggtttttttcttttgcattgaccgtggagaatctgatgactatgtgccttggaatggtcatgttgtatagtatctcgcgtgggttctctgttttttctgaatttatatgtcttcctctagcaggattcgggagattttcgtagagtatattctcaaatacattttccaagttgcttacactctctccttctctctcaagaatgccaatgagctgtaaacatggtctcttcacataatcccatattactcagtggtgttttttttwatttttaattcttttttatttttgtctgggttgatttgagaaattggtcctcaagctctgagattctttcctcagcatgctctattctgctgttaatacttttgattgtaaggggctgggtgcgatggctcacacctgtaatcccagcactttgggaggctgaggtgggcggatcacctggaggtcaggagttcaagactagcttcaccatggagaaaccccgtctctactaaaaatacaaagttagctgggcgtggtggtgcatgcctgtaatctcagctacttgggaggctgaggcaggagaattgcttgaacctgggaggtggaggctgcggtgagcggagatcgtgccattgcactccagcctgggcaacaagagcaaaactccatctcaaaaaaaaatacttttgattgtattatgaaattcttgaagtaaatttttcccttccagaagctcagtttggttcttaaaatggctattttgtctttcaagcttctggattgttttactgtattccttggattrggtttcaactttctcctgcatcttgatgcgcttccttgccatccagattctgaattctttgtctgtcatttcatacatctaaatctggttaagaaccatttctgggtttatttggagataagggaacacactggctttttgagttgccagagttcttgtgctgattctttcttgtgtgtgagggctagtggctagtgttcctttaaatgtgatgtaagttgggtatagttagttggctttgtttctgggtgtttacagaggatcatgactctatacagaatctttatttgtagctagatttttttttttcttttttgagctggagttttgctcttgctccctaggctggagtgcaatgatgtgatctcggctcattgcaagctccatctcccagattcaagcatttctcctgcctcagccccctgagaagctgggattacaggtatgcgccaccacgcctggctaatttttgtatttttagtagagatggggtttctccatgttggtcaggctggtctcgaactcccgacctcaggtgatccccccaccttggtctcccaaactgctgggatgacaggcgtaagccatggagcccagccctgtagctagatttttaaaagttttcactggtgttgtatactggcaaaatgttttggtggtgtattttgggctgcaatccagtaggtggtgcttcagaatgttggtcagcagataggctcttacttagccacacaactcttttgtactttggttcttttgtattttggttctgttggtagttagtgtctgtgttggtgggagagagagatgaccccttcacctggtccactcctaggccatgaaggagccctgtccagtcactggctccatgcccacatttcctttgttagatgttctggtccccggggctctctcaggcaggggcagataggccgtaccctctctgggctggccctgttgagtgagacacaccccactcccctgctggtctgtgagcccaggcatcagaggttagattttgatgtgacaagctgtcctcattcctttgagaccaaaggaagttytaaataattgacttagaattgaatctgggtgcagaatcccttaaatcaggtacttcctgttcttgtcacaccttcaatcagagccagagatgaatagtttgccctagcagcagaggattggtggcagtggcttttactatgtttaagtatagaattgatgagcgggacaagtaggagatgtcgtcacctatttgtttcattttggtttttggaaatgtccttatttatttcagactaatctatctaggaaacagatctttaaaaactcgtgaaagatgtgtgcataagattattgtatatactctgcatcattcagtttcaaagaaaagtctgcagctatcttgagaggcaattgagtaggtacctgatacctgcctatctgtccatattcaaaattagacatattttataagttgtggaaaattatttgcatatgcagtaaagtgacatcattcttgtctggctcatgtaaaattggcttgtcctttgtcagcagaatgactgaagttctacttcttgtttataaagccaaacttgtatctcaaaaattgtattgccagggataacatgtaggatgcttttcactgcaggtaacagaaaacacgaccataggtggcttaaagaaccaggaaaactttgttacttacatgatgagaaacctggatgaaaggaaattctagggccgattaactcaataacattgtcaagatcaaggttttatccatctttctgctctgacaatcttagttcctcattgatttggcttttgtcctcagacttgtcccctcttgattaaaagaccctgtaactccgaaccaattaaatcagaatagctggggagggggaccaggcattagtcttttaaaagcttccaggtggttttattgtgcaagtagctaggattgggaacactgagttacatcaattaagagccactcaggggtttataaatctaacccccctaaagcacatggtcatttggtaaccaaataaatcagttcttttagcaagtaataagggtgagaaattcaaccatagatgtccgccctactccagatgatgtaaggtttttaaaaatttcgcttattctttgacttcatgtatgttcactatcattacttaaaaaagaactatgtaagtggtttctaccccctcactttagaggcaaatctctggataggcagttttattaacccaatgaactacaaagagaatattttgggcaagaaggaagcagaggtattaaagcatacttttcagtcattttatgtgcagataaataacaatatttaaggtaaatataatctatattgccttttctcaggtggattgtagccaactctttatcaaaattgattcccttcttcacaaattgtatcaaatatgctctctgttgtggctttctcctctcgttttctgttttcaaatgcattctcccttmactaacatgtgccaaaaagaatataatgtccctcttgaactttgtctcatttaatggcatcaccttgttccagaggatgtaggtgtactcagatgcatgcatttgtggccaagacatttctgtcatacttagagtctctggctgtttttcacttcagtgcacagaatttgtgccacttcatggtctctctttttgtttttttttttgactcttaaaatttaccttaaggtacctcccacccacamacactttcagtctcttttttagtttatccccaacagtgcttctggagttatccaaaaatatagatgagatcctgtkgtcttcacattgccctaatggttcccatttatctacagaataaaaatccaatgtggttggttgtctttactaagatagcgagaaaaatatttcccatctcacacattctactttataatgtggttttgatattcttcccacaacgaggtggagtctrtgtccctctactagaatatggacaggcttgtgataatggtggaagagatactagtgtgacttcctagactgagtcataaaaagtgtcttggcttctgcctgtacatcttggcatgctcatttcggggccacagctaccatgctgtgggaaaaagcccaccaataccttagcctgtagcctttgctaagcttctagctgacagccagcatcmgtgtacctgccaaatgggtgatctgagaagtggatccttcagtttccctgccctcgcagctgatgctgtgtggattatggagatgagccatccctgtcaagtcctgcctacattagaaagtcatggggggaaaagtgatcatttgtattcaaagtgattatttgtattcagagcatcttttttctttttaaaatcagttttagtgagctataaggtatgtataatacattcactaattttaagtatacaattcattgagttttaacaaatgtttgtggtgttttttcatactgccacatttaaattttgttgattttcatcatttcatagagttctcttgtataccttccaatttagttctgtcaccatcctcagcccctggcaactgacagaaagctaatgtgctttctgtcccaatagttttgccttttccagaatggaaaccttgtttctctactagttttgggctagtgtaaataaacttgctatgaagattcatgtatatgtcttgtggatgtaggttttcatttcttttgagtaaatgctataggagtgggatttagttatatgatagttagtgtttaaatttttaagaaactaccaaactgtttttcaaagtggctgtgactgcgtatttgactttgccagcagtgtatgatagttctagttgttcttcatcattgcaagctcttggtattgtcatttaaaaaaatatagttattcgagtggctacaaaggcttatctcattggtgttttaatttgcatatttctgtgactaatggtgttgacatccttcatgcgtttaccttttatatatcatttttgaagtttctattcaaatcttccatttaaaaatgggttgtttatctttctaatacttagttttaagattcttgactatatttgggtataaattctgtatcatatagattgtaaagttcttggattctgtgggttgtctttttacttgcctgatggtgtcctttgaagcacaaagtttttaattttgatggaaatccagtttatcaagttttcttttacagtttatatgcattatgttcttttaaaaactttaccttaacaaggtcacaaaggtttttgtcctttgttctgcgcgctttctaatttttagctcttggatttaggcatatgatccattttgattttaagtttgtatatggcatgagtgaagtttcaaagttcatttgtttgtaaaatagatatcagattgttttagcaacatttattgaaaagactgtcttttcctcattcaattatcttggtacctttagaaataagtttatcatattcatatgaatacatttctctttctggagtgtatatcctattcctttgattatctgtccttatgccaatattctcttgattactgtagctttataatcagtcttgaaatcaatggatgccctttaacttttggtctttttttcaaagtttttctggctattctaggttcttttcacgtccgtatatattttgtaataagcctttaattactatgaaaagattgctagaattcttggggaattactaatattgatcaatttgttggcatcttgagaatattgttttctgatcctatatttccattcatttgggtggttttaaaagtttttcaaagcagtgcttattagttgttttcattgtatgtgtcttgtacagagtttgttaaatttatgtggtagccagtaggattcaattattaaagaaaactcaaaagatccaaaatgacaatgtctagaaatcsatgacctgatgtaggaaaaggatgcaatacagcaacaggattagagcattaaagatatgcgtcgtaggcaaaggcttcctaatagcaaggggtctagagggactgagcatgacctctaattactctctctgttggccatgaggcaccctttttctctcaggtgacactccactgatatgtgcacagaacctgggagtgcaaaatggaatcaaagctgggactcattatatcctgttgaccaaataggcttattctttcacataatgagtcccagtggtacagccctctggtagatttcaatgagaccagatgcaaatcagcaaatctcactgttatcagtaaacattaccgacaagctggtacaaactgccctaaaacttgccttggatgtattagtacaaagcaacactattaaggagtatatttcatgacttgacccaggggtctagtgccaagtaggtacacctttacctcaacaaaaacatttcaggtaaatttcaggcgtgctggaattaactcatatttttcatcctattataaatggtgttttaaaaaacatatatttccaactgtgaattgcttttatatggaaataaaaacatgatttgtgtgtactgaccttgtatcttgtgacctattttgaaatatacaatacattcttgttaattatagtaaccctactctgctatcaaacattagaacttacttcttctaactgtatgtttgagttattccttctatctaaccgtatgtttgtacccattaaccaacctctctttatctccctctctcctcacagacacccttcccagctgtctctggtacctatcattctattttttacctccatgagataaatgttttttttttttactcccatgtgagtgagaacatgggatatttgtctttctgtgcctagtttatgccacttaacataatgacctccagttccatccacgtttctgcaaatgacatgatttcatttttttaatgactgaatagtactaataattccattgtgtatagcacatattcttcatccattcatcccttgatggatacttagattgattccatatctctgctattgtgaatagtgcttgctgcaataaacactggagtgcacacttccctttgataaactaattgctttttctttggatgaatacctactagtgggattgctggatcatatggcagttctatttttagttttttttttkgagagatctccatactagttttagtagcttttttgtaggtttttaaagaattttcacattgacagttatgtaatctttgaataaggatacttttttgtcatccttaccaatctctatgccttttgtttctttttcttgccctattgcactaaaacctctaatacaatgttgactagaaatagcaacagcctttttttctcatcttagagataaagtattgagtatctcagtgttasataggatgttacctctagagttttggaggtgtcctttatcaagttgaataagttccatttccttctgttcagttttttttttaatcacaaatgggtcttgaattttgtcaaatgccttttttacattattaagacaatcctttatttttggtggggagtttgttaacgtggttaatggtgtttatkggtttttgaatgttaaaccaacttttctttcctggcatgtacccctcttgaccatgagtctttttatatgtagcttggttcactttgcagatattttaaggacttctacacctatgtttgcgaaacctgttcccctatagttttttctctctctctctcttttttttttttgagacaggagctcactctgttgcccaggctggagtgcagtggcaccatttcggctcactgtaacctccgcctcccgggttcaagtgattctcctgccttagcctccccaatagctgggattacaggcatgtgccactgtgcctggctaatttttgtatttttagtagaggtggggtttcaccatgttggtcaggctggtcttgaactcctggcctcatgtgatccgcacaccttggcctgccaaagtgctaggatttacaggtgtgagccaccacacctggcctagttttctctttttttataatgtctttttctggttttgttcttggtaatgtttgactcagaatgatttgggaggtatttctgcttctgtgttttacaaaagttagtgtagcagcatttttttttctccaaattgtctgggcctggaaatttttttttttttttttatgggagggtttttatttttattttattatactttaagttctagggtacatgtgcacaacatgcacatatgtatacatgtgccatattgtgtgtacatatgtatatgtacatatgtatgcatgtgccatgttggtgtgctgcaccctttaactcatcatttacattaggtatatttcctaatgctatctctcccccctccccccaccccacaacaggccccagggtgtgatgttgcccaccctgtgtccaagtgttctcattgttcagttcccacctatgagtgagaacatgaagtgtttggttttctgtctttgcaatagtttgctcagaatgatggcttccagcttcatccatgtccctacaaaggacatgaactcatccttttttatggctgcatagtattccatggtgtatatgtgccacattttcttaatccagtctctcattgatggacatttgggttggttccaagtctttgctattgtgaatagtgcctcaataaacacgtgtggtgcatgtgtctttatagtagcatgatttataatcctttgggtatatacccagtaatgggatggctgggtcaaatggtaattctagttctagatccttgaggaatckccacactgtcttccacaatggtcgaactagtttacacttgtgggagggtttttaaataacaaattgatttttttttctaataagtatagaagtgttcagtttctttttaaacaacattcagcagtttatacctttcaataaatttgttcattccatctaaatcaccaaatttgttgataggaagctgttaatagtatttctttaatgttcctttaatgcctgtatgatccgttgtgattctctctctctctttctctctctctcacacttgtgatattgctaattgtctttgttgtctttcttcctgattcaggagaaaagacatcagttttactgacgtttcatagagccaattgtgggttcattggttttctgtgttacatttttgttccgtgatgacaaaactcttgtgttctagttgattgtatacttctgttttatcctttcatcttccagcaaacatatgcttttggggacagatttattatttttcttccactgagtcttgaattaaattgtactcagtaatggtggatgaaggtcttggaaactgccataagttgatttattcttatgtctatcacaaatagaattcgatagctaaaatgacatagaaagatttttattatctgggatgacagacttgcctttttaatctaaaaactgtctttataatgttgtataaatatttgaactttattcacattcttaatatacttgaaattaattctggtctcatttcctttggtatgtaaagagagaatagcctttttaatgcatgctattgtttgaatgtgtcctccaaagttattgtgttggaaacttgatccctgatgtggagggaggggttggaggtgggacctttaagaggtgtttcagcgatgggggcactgccgtcatgaatggattaatgctactgttgtgtgagtgggtttcctaaaaaaggacaagtttggcctcttcttgctctctgtttcgtatgtgtgatgcctttcacggtgttataatgcagcaagaaggccctcatcagatgttggcaccttgatcttgtacttcccagtctctggaagtgtgaggaaataaacttctgttgttgttgttgttcttattcttctccctcttcyaattttttttttttttagacaagatcttgctctgtcgccaggctggagtgcagtggcacgatcttggctcactgcagcctctgcctcctgggttgaagcaattctcctgcctcagcctcctgagtagctgagactacaggtgcatgccagcatgcccagctaatttttgtatttttagtagagacgaggtttcaccatgttggccaggatggtcttcatctcttgacctcatgatccgtctgcctcggcctcccaaagtgttgggattacaggcgtgagccaccgcgcccagcctaaacttttgttctttatacattagtctgtggtattcaattacggcagcgcaaaatggagtaaaacaatatttgcatctgatttagggcattcttttaaccttactgcaactcttcctcccaagctgcagtagagatgaatgcaaaggaatccacactaagatataacaaaatagataaatgatttatattacaaaaagaccgactccaggagatagagctctatttagtaaagagggcttacctagtacattcagcatatgaccagagttataatttcatttacaaatctttcagaattgcatctatcatataatttgtaaggagagccatgtctttatcacagcagctaaatttccagggagtgtaaatacttctattgtgcttggccaacagcaagtaacacaacagtggttatttgctgaccttttcaaatgtttcccagatgaggaaaggtataaataaataaaacaattctttgatttctgacgaatggcctggggactgaagagcagtaagctgggcctcattctgcaccttgtacagtttgttgcccctttatttgcttgttcagccattcctcagtaatgatcccaagggagcagagtgcaggctgcatccttcctcttacccatggtagaaaccgcagtctcctcttcgaactcaaacttttaattctcttgtttctttccatttttctaaaactgtcacttgactccctattttctgctctcacttccatttattttcatatattgcgtacacagtaatcttccttaatcagcattttgattgtatcattttgcccctaaacgttcaatacttacagaagaaaggactctaaatgcctagtcttcaataaacattcttttggttttatcttcttggggcatgtgctcatcctcagttattcaccatttcggtctcaatgaatttttctgatcttttctgttaagttttgtaaaacacatgtaatataaaatttaccttcttaaccatctttaagtgtatgattctataggtaaatatattcatattgttgtacaaccaatctccagaaatttttcgtcttgcaaaactgcaactctataccttttaaacagtaactctgtaattcctggttttctcctcccatcagtccttggcagccaccattctgctttctgtttctatgaatttggctactctagataccacatataaaatggaatggtacagtatttgtctttttgtgactggcttgtttcacttagcatcgtgttctccctcttgtagcatgtatcagaatttcttccctttttaaggttgaatatcaaatcttgtacgagcggttttgtttgtttttattttttgtttttaagggaagagggttgaggatgttagtgtrtttggtgtctgagaaggattactacaggttgcagggtggggtaggggagaaaagattttggggcttcttaagttttaactttgcatagtgattcagtaacttatttttggaatcttttttttttcctttacagtctttgtggtatctatcttttcattgaaagcctgtggaaactgtaatgtaaatattgtttgaaatcctgataacccagacaatatgaaaaatgtatctttttggagttctgttaattattgatagaaatgtgaatgacaaagtttactttgattatttaatgaaacttttttaatgtaataaagttcaggctctaatttggatagaatatttatttttctatttactgagtggtagatatgatagtctgctgaaagggttaggtcttggcttttgtgatctcaaccatccaaagaagttctttaggagaactctgatcacttcacatctacaaagtgttctcctttttcctaaatgtgaattccgaagtccttagcatgctttatgatctgattcaaaactaaatttcttattctccctttcaccagattctggttcactcgtcactcactttcacccctccctgcatccccatcaaatgactgagaattttccagatgtggcatttatattttggccttgtcctaacataayaaacaatctctcttcctgtgataccatattcttgtttctttgtatcgagtggaatttcactagttgattgcagcctttgtctgccagggttcttcatctgaacctcactcagacaatgattatttgagtgactgttttcttagttttcccaaggttggtacatgaatgttaacattctagatgtggaagaagttaattcatgaccttcaatggttgctttagggcattaagtgttcattttcttgcagacttcccattgagaaaggtctagtctgagtttgtttccttcttttgaccttgcgcagatttcatcctcctctggaatgtttgttttattgttattacttgtttgtattatcagcttttccaccagactgggcatctggagaactttgtcttatttattcttacatcccaggattcagcaccatgcctgaaacagagttgatgttcagtaaatcttagtggaatagattatgttgacttcctaaaactagttcagcatgacatagttctagttgttcatttscctttttttgttgttgttaagagatggagtctgtctctctctgttacccaggctgaagcgcagtggcaccatcatagctcactgcagcctccaaagctcactatagcctccaattcctgggcttaagtgattctcccacttcagcctcccgagcagctgggattacaggcatgcgcgccactgctcccagcttcaattcctttccttacttatttttacatttatgttcttccttaaaatgaacatcttgaccgagcgcggtggctcactcttgtaatcccagcactttgggaggccgagrcaggcggatcacgaggtcaggagattgagmccatggtgaaaccctgtctttactaaaaatmcaaaaaaaaaaaaaaaaaaaattagccaggcatggtggcgggtgcctgtagtcccagctacttgggaggctgagtcaggagaatggcatcaacccgggaggcagagcttgcagtgagccgagatcgcgccactgctctccagcctgggcgacagagcgagactctttcaaaaaaaaaaaaaaaaaaaaaaagaacatcttaacatatactgccttgttctccatttggctatgaatctatcacactccagcacttgtttcttgttacctgtgtgggtgctttacctgcctagaatagagttaaagctcctaatgacaacctattggtatgaacttttggaacctccagtgccacatttataagaaatcaaaatcttgttgatcaattgacaatcaatatgggaaactattgtttcccatcaatatgtgagattatgcttttgcttaattttattgggcacaaatattgttgaacaatttatttgaatagtatgttgttgcctttatagatatccatttccactttcttagttgatgatttttcactctacattatgattttcacttatcctttgagtgtttgakctacaaatgattgcttgcccaggtgatgaagaattttcttgtattcctatctttccagtatgtagagatggaaatgcatattggttgttgtttattatctgccattttgtcaagtattaatatatgcttaaattcacaaagaggtaactctttgagttggcagaaccagactactcagatacaattgcctcattctcagactcgggaagacgaggatagtgcatcttgtcctcatagaagaggccctgtagttagaatgtgtgctttggagtgtkagaatgggtattctgaatgcaagaatatgaytgtttcagttttgtcaagaaaatgcttaactggactgtgtattctaacaatattagaatataacaaaaaaatctatcattatatgtccttacctgcctaacctgtgacgagaaatgacaggtttgatattttgtaaactgccatagaatcagctagtagttttctattctgttggcttgtctttctcccctccttaatgcttgagataagtgtactttttgagtatgttttggaaacgtgttttcaaagttctcaacttatgaaatgttaaactattccaaggttgtaagtagcttgtcatgtgtaaagaaaagtctgcaagatgagaggtcagaagacctgtgaatcctgacactacactatgtgctatatcctgatcataagcaaatttcctaacctcttacagcccccaattccttcctactttcttttcaccactttataatgcatctatccccagaaagcaatgaccccttcccctgttcttcataaagaatttgaggatggttttatgtgctagacactgtgctaaataaaaactagtaaatagtaaagttagaattcaaatccaggtttgttttttttttaaacaccgaaatctatgctcttaaccaatgtatatactatcagctactaactgtctttcaccacaattaatrgtagaatgattatcttgagtatcttctttagggataactattaattcaaaggaagctcctttttaaaatacaacattggaaaaagaaaaatatagaaattctcaacatagcactgttctagtaagcctatttgtaattttttttaaaaaagtggggggagggagaaggaaggggagagaaagtgagtggggtgtgtgtgtgtgtgtgtgtgtgtgtttgtgtgtatgtcttgtggctgatcaggtggaacccatcactactttgtccagaaaactcaggagtatgtgtgggtaggtctggaacaggatgtacaggttgactaaacgttatccaatatgcatgggaccagaagtgctttgggttttggatttttttttattttggaatatttgcattatatttaccagttcagcatccaaaatccaaaaatctgaaatctgaaatgcatcagtgagcatttccttcaagtatcatgcagattttggagacttttggatttgggatttgggatgcttaaccttcaatagtgagtttatgtaacttaaaatgtactaaatccaacaaaaactgactgaaaatatgtcaggtggttggaatttttctttgaagcaatcatttatgtttttattagtcttttgtttatgcataagaaaggtgaggygtctaatgtctttgacaaaatttatggttgcaatagagcagcctattattttccctcagatacgtgccatttctctcttctggttctatyatgtttacaataagttgctgttcttttgtaattttctgaaacttttttctctgagactgtgttatctaaaacaaaccctaccaaaacaaaaaagtttcccagagtgagttgtttccattgcatggaaaaagacaggtgtgtactcttatttttttctgtgtgctttgtgaaaatcccccctccctcctattaacatagtgaatttttgaatgagaatgtcctaatgcatgatatctgtttcatgaatttatctttgtagatttgaccaaaaccaattttatatgtggaaagtaaatttaattataccaatcccctagacttgggtgtagatacaactcttaagaactatcagtccaagcaatctataaaactaaatgtttgcagccaccattttctaaatccaatgtaggaaaaaggaaaaagcatagtttccagagaaggcaattggaattgaatgtatcctgcagaccttatactctacgattacacatacatgctgtctccagcagcttttgttttgcttttggctgcttatttcacagtttctttttttcttacttttcaaattaatgattctttgccagcagcattcttgcaatatatcagacttgattcaatattgcaagctctctgctacctttcttactcggtcatttccacccaggtgaataatattacctagtagcaatttttttttttttttaaagaaccttggaacctttaagaatctttgtttttcaggccagccacggcggctcacgcctgtaatccaagcactttgggaggccgaggtgggcggatcacctgcggtcgtgagtttgagaccagcctgaccaacacggagaaaccccatctctactaaaaataaaaaaattagccgagcgtgatggcacatgcctgtaatcccagctactccggaggctcaggcaggagaattgcttgaacccaggaggcagaggttgcggtgagctgagatcacaccattgccctctagcctgggcaacaagagcgaaaaaaaaaaaaaaaaaaaagaaaaaaatctttgtttttcctgatctttgctgtttttcttcattatatctctgagacatacatatgtaaatctaattaatctattgaattcatgtgaaatatacttaaagtgtaattttatgtcctttttttagataagtaaatttcagatactacttttagcagaacacattttttaatgtgttggttataaagtgatctgtaggtaaaggaatctgaaaaagcaaatgctcatgtgttagaaatgagtacctttagttgcctctggactgttttctttttgctatcctatgagggttacatgaaacaatcccattcctttgacatttcctcacttttgggttctctcatcccttttagagtaaggcactgctgattaggcctgtttccagggcaatttcttgctgctctcttatttttagttttgcttgttttgttatcataggtttgaaatgtaagtaagcggctcagaatgacctggttcttgtagctaattcagtaagcatttattgagggcattgtacatcagtccaacaaagaaagaacacatcaaactagagagcagttccaagtcaacttactggtaacctgttgtataaaaagttactacaaggccaggcatgttggctggtgcctgtaatactagcactttgagaggccgaggagggaggattgcttgagcgtaggggcttgcagtcagcctggtcaacatattgaaaccccatctgtacaaaacaataaaaaaaatttgccaggtatgatggtgtgtgtgtgtggtcccacttagtttgggaggctgaggtgagatgatctcttgagcttgggaggttgaggctgcattgagccgattgcacaactgcattccagcctgggtgacagagtgagaccctgtctcaaaaaaaaaaaaaaaaaaaaaccctccaaaagaagttgccacaaaattttcaactgaaaacacgtgtttattatctcttgttttctttggatcagaagtctgggcacagcttagctgggatctctgctcagggtctcataaggctgcaattaagtgttggccagtttgctttcccatctaggagcttgactggagcagaatccactttcaagctcattcatattattggcagaatgcatttcttttgacagctgtatgaccgaagccwtcactttttgctggctgttggctggaggccacctcctatggactaaatggcccctgcaccaattcttatgttgaagccctaatcttcaatatgatggaatgtggaagaggggcctttaggaggtattatatattaatcagctttccatataatgttgcttaatcatgggagtgacatctagtcatcatgaccatattctgtttattagaaaatagttataagtgctgcccacactgaggctgaggggattacacaagggcattagcacaaggaggcaggatcctgggggctgggcatcacctcagggtcattctcccacaggcaagatggaaataaatggatggtaaataaacctcaagtgattacaaatggtatattttattgcttatatattgtgttcatgccaggactagattaaacagtatgttgcagcatgactgctatttcgactggactgtgtacatgccaagaatgaggtctatctcatgagactaagcagtttcggtgccctgccactctgtgaggcagaaccacatatgtttgagcctccacactggaagccagaactttcttcaccactattcattaagattttcataaaattattcatatagttgcttttgtttaaagtagcaagtggtacaaagataaatttctggttagaataaaagtctcaataaaagaataagcatatacagaagataattattttttcagatttgtatgttattagcaacatcttatattttcagatttctcaataagtttaacttcaatttgttaagactgttagcttatttccattgaacattttcattttttatttttcctcctgcttttaatactaggccttgtgttacattgctgagttgatatcacaaatttaatgacctagaggagtgatctttttggatcactttttggatataggttaaaatcagagataacaaatttcttggggtcttgcttctacatccttcatttgttgatgtcagtatgaacaacaattgatagatgctttaattttaaagatttctgggttaaatttacttatattcttgaaataaatgtacttatttaataatgaaagaagaaaaactttgatactcagatattttttgaatgttaagtttttataataaactataatctttctaaaaattgtttacacattttaaactttttttaaaatttattttattttattttttttgagatggagtttcgctcttgttgcctaggctagagtgcaatggcatgatctcggctcactgcaacctacgcctcctgggttcaagcatttctcctgcctcagcctcctgagtagctggaattacaggcgtccaccaccacgcccggctagttttttttatttttagtagagacggggtctctccatgttggctaggctggtctcgaactcctggcctcaggtgatccctccgccttggcctcccagagtgctgggattataggcgtgagccaccgtgcctggcctaaacttttctattaagagcaataaaaacaacaaaaagtgggatggaaggggctttaacagatacgtcttttcccttagaagtatgtttgatactgtgatagagacatgagagtgtggtgtgtatggcgaactttatgatactctgtttggtatgtaggatatccatacaatcgttcaggtagtgaacgacattgagcttttattatgtgccagaccctctgctatagagccagagaatgacagtaatccatacagtagtcatcaaggccatgttagctgcagagccacaaatagtaaacaagtaagtaaattaggtaaatcacagtacagtgagcactgtgaaggaaataagcagtgtgctgtaactaagaaaaccgtggtggggaggatcctttaaatgtggtggccagcaagggcctctctcagagggcgcgttggatctgaggcctgaagactgggaaggaaccagctgaagactagggaggagctagccatctaagaggtggggaagaattctaaatagaggggggactgtgtgaaggccttacagtgggagagaaattggtatgatctagcaatagaaggccgatatgaagagattagagacagtgatgagtggtacaagatgaggttggagaggtaagcagtggtcaggctatgtgcctatgataaggaatttgtgttttattctaatttgggaagccattgaaggattctgaacaggttaaagatgtgatcttggtctgtttaccctggctgctgttggggataagagaagcagatgtcctaggttaggcaagcaatagcttggactggggtgctggatattgtggatgtaacagaaatatatttctgagatagaattgataggatttcctaatgaattagagatagatgatgagggaaagagaggaatccagtatgcctcctaagttttgtacctgagcctgggaattaaagatttgtagagtttagtggaagtcattgaagtggaaaaggttggctgggggcaaacctcatgaagagtttgggttttattgcttagtgacaggcaaacataagaaaggatgttatgggttcaaatttatattttaaactgtgactggtagcaatgtcaagccaggtgagagagactcgaggaagagaaaccagtttagacagtactgcagtactctttttgtattggttaagaaggattgatttgagactgatgctgggggtgggttgtgaggggaagttttgagagataagaaaatgaattgactagatgtggtgacaatgcctcacgtgtgatagatgtctaataaatatgtgaatgaaagtagcagactgtggtgaacagaaaaatcatatcaggatatttgtggagaagatagtgtgttccattttttggtaaggttgacatgccttctaggcctctaggtgaaaatgcttggtaggcacctggacttttctgggtctggaacactagagagtgtttgggatttgagagtcatctgtgtaggtaataggtgaggtcatataaaaatatcttctactaaagtagaatgtaggacgagaaggctggaaatagtaccttctgaaatacaaaatacagggttttcagtaggaatagtatgaaggaaaagagatggatccatagttactggcaaggtggaaggtaaattagaaaagtgtcacgttctgaaaaccccatggatgaagcattgaggcacagtgcgaagctgtagatacgtcaggtaacacagtttcactcacaaatagccttatgatgtatccgcatgtgtgtgagtatggtgaaaggctaatttcatagagtcatgagaagaaattttaatcagtttgagtgagtgaggggagaaaactatttttacaaaacgcttagttaaaatgggaaggagaaagcatagcaagagaaatgtttcaatgatgggaatttgcggagttttttttacaaattttttttccagtaactattgttgaaaaccatgtgttgggggatactttgagaatgtaatatgtagactacctgtataatttgacctctaagtcaaaaaatgctgagcagtttaggattgattttttttgggggtggggggaaatattggatgatagtagcttttatacatttatttatggatttgtttatgttagaataatacctacttttaggatgattagacatagtttgggctaccagatcagagcaattttaagtaccataaagatgttggcctttgagatcctttagccacattgtagaaataggggtgaaatttcctgtcgtgggagtatgtaaatccagttttgcaaaccagaaaataagtgatcagtagtccttaaggttgtttccatctttgtttgatatcccagtgataatgtactatttggcaaagcaacaggctacattttgaaaaagatttactcatctacccagccagccatcctgtcagccatgctcatgtctctcagcagcaaaggatttgaggtggcccacctttaaaaaaaaaagtaacaaaatggcaaaaatgtgaaaagtgaaaatctggtatagggaaaatatattttattgaatgtgaaggcaagggaaagcatgtatgcacacacaaagaacgtccatgtgcttgcaattagggcatgtacgtagtttttataattgaacatagtatttagaagtttgtctgtagtattgatgtctatattgaaaaggaatgcaaaggttttgacttcattctaactgtaatagtggaaaataactttttttttttcaggaaatgctagtttttactagcactgatcttaaaataattatttggggcaactttgagtgatatattggttgatctattaaaacaatggagaatacaaactcttatataaccattaacacccgcttcaattgtccaagcattcactcaaacatttagtaggccactgtactgactcagtagagtagtggggatcagaaaccgtatcgcagtggattgagaggtgaataagatgttaaaatgcgagacattttgggtagactttcagaggtagtttggcttggatgataaggtaataaagggaatgtggtgttagggactccgcccccttcctccatgtgtgttggttgactttttgagcatacgtatccttacagtgaaaacaggaaacagagaacaagctgctctgtaaagcgtttctgcaagtgtgaaacactcccaatttcagtggcatcatctttgggtaagaaagagaagggaaggaacaaaattaaaggataggagtgaataccaataaaggtgaaggtaagaatggaagagtggagtctgggggagctatctctcaatttgcttgattcattcagaaaatatcgagctacctgctcataccaggccgtatgtaagggctggagacacagacgtgatgaagtctgccttcatggaactcacattctaatgcatgtatcctccacagtattatgagccactggrtagcagttcttatgtagcagtgtctggtatggtgcttggcatacatagtagtcatccaaaaaatgaattaacaaatctcttttgcatctgtgtgttctacccttttggcttagtctcatctttggtatagcaggcatgtcaaaaattgatagagttttatacaccaataatgaactttgaagaagcggtaataaacatgtttaaaaaagctaccatcaacattatcctgcaacccttcttttatatgtggttactgttagaggtttttgcagctcagaatatattgtttcttaggtcattcataaatgtttgagtgttcttcatgtggaaagtacttgtctgggagcgtgagttaagtaaggccgagttccatctgaatagatggacaatttcactacaagtataatataataagtgttcaaaattgtatgggcatggagaaggagatagttaggactggttatttgttttccttcctaatcgataaacatctgttgtatttgtaatgcagtggaacttgcaaattgtgttagcctgaactctgggccccaggggaggggcgggtaaagatgattagtttttacagtattcctttcraacctattgggttttttttaattaggtgttatttgatcttattatgtttcatgagagcagtgatgacaatctgtgtggagaagaataggagatgctgcacccaattgtatttatagattataaatttggtttggaggactagggtgtgtgtgtgtgagagagagaaagatgcggggaagaggttgacaagtagtgacagtgttgagagtggtgcgaaatttatttacaacctactgattgggttcacatttctaaaatgaggttgctggattaaatcgacaagcttcatccaaagtataaatgtttatgtttcaacggaacctgtggtttgcttcggattagtcccccaagtcagtgataagtgcatgtgtgcrcacacaaacacacacacaactagaaatcctgggaattttaactatctttttctccaaaaaaacccagaaaactcgttgaacataatgttataaccttagagagagttgtttaaaagtgagcacccagcatgttgcctttttggtgagtaggaaagaatcttccaaactcaccaccaacccgtttcgcacctcccctagatacacaccacacaatcaccattcttctttgctatatactttttctcatagtacttaaacattcttatcatttttccttgtctatctccagtggaatataaactctccaagggagatgtttgttttgtttaccttccttagtgatccctgtaggagatcactagattctgttgaatcaatcatagctggccacttgatacactgtgtgagtatatattgactatcattttttactcagcagtgtacccagtacagtgtgtgtgtatactggggatgactttattggctttggctgtatatacattcaatcatcaccttatggagataaatggtatgtataaaaattaggaaatgtgacaagacctgtaaagttaagggctaaattatatggtaggaattggtccaaggtcagcatattggaatgggcaaaaaatggcttcatgaaataggtgaaacttgaactagacttctaaaaggatcatggggcacaggtaaggaaggatactccaggaaaacagccttcatgatacctcctctctgaactttctgtcatcttaattccatctctcaggatttatttttgaaaaggaaacaaattaaaaagttattcaccatcctctgccatgatctggcatatagcacataattaaatattattttttaatgtaactatttgtataatatctttttttcaaaaaaaatcagaaaacttgttgaacataatgttataaccttagacagatttgtttaaaagtggtcatccaacatgcttgccttttcacggagtaggaaagaatcttccaaactctgactgtggctctatgtccagttatattttgtcattaactgcctaccagtttcccattgcttaatactctagaaatgacaagtgattctattgaattttggttagttgggtcaaatagatcaaaggacaattataaaagggaaacacaggaaaggggaattaattataaatatgggggggggaagagagctgaataattaggcatgataggcattaattattgttagacatttgttatatgtattgcagttatacttatgtggaagatcttgatctttttttgttaatgttcacttgaattttttttatcctggtacagttagatataagcaagttactgtgttcctgattttcttctaggaaaagtattgataactttgcttttgatagcctgcaaccagtctgctcattaatttccatatagctgttgttagagactttgcccagcaaactaaatgctatttgtggaatagacaacaaaatcaataactaagacatttttggaaaatctagttaacttcttggatttgttaaacaaatcctgaatacactgaatactatgcctttgaaataagcttaatttttgccacacagcaccagtgaatcttgctacaattgatatatgtagtaagttaattaactgcctttgttttcagttgacttttttcgttctgaattttttttaatggtattatatctctcaaaaacgtacaattgaaggagagtattagtatttcatagatttctgatcaaacaattagatatgtcacctctctgcctgcactaatttataaatatatttaagctataatagtaaacactgaattgcaattttgtacttcttagatattattactctttatcaacttatgcatgttcttctgtaactgttgacttgattgattatagcatgtgctaaaagatgtaaaatggagatttctgaaattgtaataataaaaaagccataaaaaaatgccatcagctggctgcggtggctcatgcctgtaatcccagctctttgggaggctgaggtgggtggatcacgtgaagtccagagtttgagaccagcctggccaacatggtgaaaccccgtttttactgaaactacaagaattagccgggcatggtggcacatgtctgtaatcccagctactcaggaggctgaggcaggagagtctcttgaacccagtaggtggaggttgcagtgagcagagatggtgccactgcactccagcctggatgacagagtgactccwtcttaaaaaaaaaaaaaagaacaaacatttacttttatgaacagatttgtaccaagttgttcctaaattggtacagaattcatgatgcatgtttttgaaaacagaaacaaatactatttgtactttctttctgatgttgaaaaaatttaagagcacatatttctttaagaaaaatacctatagaataaattcctagaagtgaaataactaagtcaaagggtacgtaaattttgaatttcagtagatattgtaaattgcactaattcacatttctactcataatatctgatgccactttttctgcaaacacagcatcttttcaaatactttatctttgctggttaggaaggaattcgtatcttagtgaagtttacctttacatgtcttattttatgagtgagctatttatattggctcttctgggaactgtccaattgggctgatgatcttaattttcttactctttttattcactctctctattgggaaaatttatcttttgcttccaacctgatgacatgcaaataacttgattttgttttgtttgtcttttgtttttcagattgtcatttgttttgggtcatatttttaaaccttttatattggtgaatttgccagttttgtcttttatgggttctaaatttcatgttaaagttgaacagggccttcactactctaatgttataaaagaataaaccctgggagaattctagtacttttatggtttaatattttgcgtctaagcttttgattcatttggaattctgttgcaagatgtgaagtgtggatccagctttattttgttctatataactacccaattattccaatattgctcattagtcaatcttttctactgatttaacctgtcacctttatctgaaaaccttatgtattttgggtctgtttttggtctttctgtttcattgatctgtatatgtttgtttataatgtttaaatatattagagtgttacttattatttcttgtcagagttttctgaaattctgaacttaaactgtttttatgtttatttcttgacttggagatatctggtggtgtcaatttgggcaatccactgtaagggtttattttattctggaatttttttgtctccttctccctatcctttaccttccacccaaagctttattaggaagtatagggtaatatgtattccagaaaggttacatttctctagttactcagatggcatagacataggctaagagatggtaggtctttgtattgtaaatgaaacatggccttgtctagttttaattttttagataaagattatttgcagtctaaagggtgaatttttcttcccctttctcagtctctatttgtaaccatgccatttttttcatttttaattaacataatttgtgaaatgttgatttttgctttaggtcctaaatcaaatgtgattattagtttatagctttacaacgtaataagccccaggtgtagggaattcactctcagctctgatctccagcagttttggatgacaagccatcacaccactatctgtaccttttttatgcatcatagattaccataggagactgaatgcaataaaaatgtaaaatgctttgtataaaaatgaatatagcatcagagatttcctgcttcatacaatcttgagcttaaaatcttgaatcttagagtaacaaaaaaaaacctctcaaacttttggaatgactctatcttcaaatatcactttaaaaagaaaaatgatccttcgtaattaagttaatgatcattagggggaagattataatacatcaatatatttgttataggaataagtgaaatcagctaatatttatctgaatatccacaatttacccatgtttagtgccattgattaaataatctagtgaattataaatcccaagaaactgacagtttaatgatatagtctctgggagcatagatgagggctcattgcccagcttgttagagatgaggcagaaaagcggaatcaggaaagacttatgttatcgacatcagagctaatctggaagtataagtaggaatgttctttattttaaaatttttatcagcaattcttatcttatgaataataaatgttgccattcatttactcttctgctgaaaatttgaaaaataaatacataacaaagaaaacaaaaatcaagcatattcctgttatatactttgatgtaacattaccttttggtttatatactcctgggtcttttttccctatgtacacaaacatacagactccttttcccaatacattttaagttacagagcagacatgatattatgatttgtggcctttttttctttttttttaaattatcaatactagggaaagctgtcaagtgagtaaatacagtcatcccttggcatatgcagrgggttggttccaaatctgtgcacactcaagttctgcagtccagtcagtgctgagaaactgatgtaagtgaaaggttgaccttctgtatacacaggttttatatcctgcagattccgtatgatttggtttgaaacaatctgtgtataagtggaccctcaaaagtcaaaaccatattgttcaagggtcaactgtgtacttgtataatgtcataattaagagcttaaatttaatgctatcatgtgtcccatttgtataaatggatatataacattctattcagagaacccttattaaaatgctttggatttcttttgattttttttctaataaacacagtgataagaattctttataatccttaaatttctggaaaatgtaaaaattgatgactagatattcattctagtattttaaagtaacccattatatagctaaattttagactcaataacactagattgaaatctggaccttcatcatgaaagtcagaggatgaggaagagaattccttgaatgagtaacttaaacagttttcactgcctcaccttaagttttcttttgaatctattcaggtcaggtttttgtccctgccaatctgttgaaacttttcttgctatggtctggaacagttcccattttgctaaactcaaggatgaacatcttaacactcctagcaactttttttttttttggaattgccctcttcccttagcttttggcrtgccatactattcctggatttgttccagctttcactggttgttctttcttggttgtctttgctggttcctcctccttttcccatctttaaatgatgggggaatacccccaaggctttgccttatattctaatctccatctacgtatgctccctaggcaaatttagtaagaccttttctttaaaactcatatgctaatgaatccaaatatatgtcctgagcctgttctactattgtaaacttcttttaactagttgtttaatatctcttggatatttaataccatttattcagtcacttcggactcagaccaagaacccgtgagttttctctaaatcttttatctcccagatctacccctttaaggagtcttgtgtacttcaaaatatatccagactctaccacattgttcacttactgccctaattcaaaccctctatcttgtgtgtagaccaataaaaatagcctttttttttttttttgagagggagtctctctctggcgcccaggctggagtacagtggcacgatctcggctcactgcaacgtctgcctcccaggttcaagtgattttcctgcctcagcctcccaagtagtggagattacaggtgcccaccaccaggcccggctaatttttgtgttttttagtagagacagagtttcaccatgttggccaggctggtcttgaactcctgacctcaggtgatccgctctctttggcttcccaaagtgctgggattacaggtgtgagccaccacacccggccaataaaataaccttctagttggttttctttttcactttccttgctcctattaaatcttcatagcaggcaacccccaccttccaaagtaaacaagattatgtcatgtatcttggtcaaaacttgcacagtaaagtcctcacttaacatcataaatggattactggaaactttgactttaagaaaaatggcrttctttatgccttaggaactgaactcttgtttgtatcaattagcctatggcaaaattggttttgttatatagtagttgtttcacttaaatttgcagtttccaagaacttatcaacataaacagtgttaagtgaggacttgctgtattctttctttcatattcagggtaaaatctacctcctgactctgtcctgtgaggccttacataatccagaatcttcttgtgtgactttttctcttattgccttccaccctgctcactctagtccagtcatcctgaattttttgtttcttgaaaacaacaaactcatttccatttatgtgcctttgcactactgttttctccacctataactctttatgtagatcattgcatgagttcctccttcttttcttttagatctttgcaccttcttcagaaaggcctttcctatttttctaaaattgttaccttctgcccagttactccctagccccttactcacctttgtctctaacacttaaaaactccttgacatacgtgcatatttgtctcctcactagaatgcaaactctactgtaccccaggtgcctagaatgttacttacagtatggtagatagccagtgtttgttgaataaatgaccgagcttctttattctttgtagttcgtattttatccctcctaatcctacaagaaatttgaagtaggcttaaaaagtgcttttaaatatattaaaatagaaaacaggagggcatgcaaagtacagatagaataggaatgactgatgggaaacttaatatgcggctcatacaaggttttacatagttcttaaatgtggatcaggcatttgcctctgaagtcttgactgtgaaaacaaaaagaacaccttgtctataaggagacaacatgctgctactttggagaagcacagcttttcttatttcawcaactgtcctgtgaaacgcaaaatagtgaattttatacagcagtgttttaatacctgtctttaaagtaaactgaagaaacaacgccacgatatagctcaaggaaagcaactctgtggaaactgattagatattcacacacattcctatttcctcctgtcagcgttccctgccctcaccagtggacatgcatgcttctgagtaaggtagagcgtattacaacaccattatcaaggtgaaggtcttttctagtgacagaacagtgagaggcagtttgttcattattcctaaaatgtgaggctcattccaaagcaggttgaaaattaactgtatagtgtgcttttgtcaaatgaggcttcctggagtttctcaaatagctgaccatagtaactmttgtgatcaggctattctttggtagtttgtggtctttttataggaagttttgacatttagcatcttagatttggaattagccaaattatgggtgagtttcataacataactccaggaatcttaatagaatagtagagtattaattgcatttaatagaaaattttagtcaactcaacctgtttacttcatttgattgaagttgaatgtattcaaaattagttgaagaaaatcttttattagtatcataattaagttatttaatgtttcatttattagtgagtcaactgaatcttttaaattattgtacggtacaaataaccaaagtgcttggagaagaaacagtctagaatatgctgtgaatggtaccggttaggaataacatactaacttggaaatgaccacactgaatgccaaagattgattttatgttccaatgtacccttttttggggggacttatcacttttagtcttgtatctcagacattcttttggtgtactagagaatatatttgggagatggatggcaattattttgcatcttgttagtatctgtttaagaaattctcaaagtttaccattgttggtgtaattattctattttcctaacttaacgttgatggtttggggttctgttggtgggaaaagtggcttggcagtatggtgcaatgtttttgcaacacttgagaggagattgttttcatagagtttttgctcttccttgttccttcccttcttgtgactttgttttcaaattgcctttttttcatcactgtaactgtcttagctctgtacagctgcccttttccatgtctgttttgttatatacatgctatcttttggcccagagttatcactgaagcttgtcacagaactcttattacctttcctgttttttctccccagctttattttacctctacttgtaattactattgtctttttcctagagtaacagaagaaaatgcaatttgtctttactttcagtaccagcatagccctcttgagggtaatattagaacttgaagaaaacatttagattagcattttgaccaatataaattgcctatttcatttggaaatgacacattttttcgaaaaagtaaaaacagttttccgttgatataattatttttaaaatatacaagaaaaacaggaataggtgtcccagtacaacatgttttatttagtgaattttctgtcaaagggtttgttcaagtagaaaccatatgcctatttctttttttctttttttttgagacggagtctttctctgtcacccaggctggagtgcaatggtgcaatctcagctcactataacctccgcctcccaggttcaagcgattctcctgcctcagcctcccaagtagctgggattacaggtgcccgccaccacgcccagctgatctttgtatttttagtagagacgaggtttcaccatgttggtcaggctggtctcgaactcctgacctcaggtgatccacccgcctcggcctcccaaagtgctggagattacaggcatgagccaccgcgcccagccccatacgcctatttctgagggagattgtagggtccaacatttagagagtagacttaatcttcctacaagcaatgttcctaaagtttatttcaatcagtggaattgtggaggcctgagaagagtacagcttcaaagctcaagaagataaattttgatgtttgataaacctgagtttagagcatgcttctgtcctttttagctgaataattatttcatcatctgtaaaatgcaggcagttcctcaaaagggtggttgtgccgagtaaatgaaatataaaacatctagcgtggtgtttggcacatggcatctgttattaactactcttcactaaattctgaaaggtttagatttgtcaggtaggtcccatctggattggcacttgtcatcagagatccagagaaattccacaatgacatatggcatggattaaggaatacactttgttgggaaaagggaatatttacaaagccaggatcaggtaggggaaggaattgatttctctgtctccctcttattccacataggaggttctcagagttttgccagtctgctagacacagcatagattttcattccacttgagatatcccttccgttactattctcccttcttttagaataagtggccggtcaaatgtatcagtgtgtaatcatacaaactactagggaaccagacattatagttgtggatgcctgcagtcatctgagaaattaagccgtcaggcacgtggagactttgaggttcatgggaagttaggtctgccttgctaagggaggaagccatggtcctgtcagaagttgagcatggtttcagactcttttgctgggaaagacgatgggaatggttccagctcatggtctaggctgcccacagtgactcccggtgttttcagacaggtctgcttctcacatcacgctttattgcctagggcctgtgaatcagttttcccaacaaataagtgtcaagttaaatgtgaaatatgtttatttctatgctatttaagcaaactgatatcagaataagtaacagtagaatgcatgtcagagtctttgagtgttactctcaaagaaaattgatcttgattagcccaagctcaacttagttccacaaataattattgatttgtttaagcgtgatgtatgtgcttgctcaaggaattagaagatgagtatgacaaagctcattccctcagggagttgagtgtttcagagggatgaagtaaaagaagattttaaaactacaagtagagtgtaagaagtatcacgagaaacatcaacaaagggctgaggatagaaggtgataagtctcaagtatctcaagatattcagcagtgaatcttaacataaatttgcttttaggggaagaatttcaagcatattgataggtcttaaattttctagtctctctgggatagtaggaaggagaatgatttttaaaaagttgattatgtarcatggagtttggggactagtaaaaattttattgaaattatttgggaattgttttacagttgtttttagtggaggttgtatttctgaaaatattgcattttagtgtgatgatttactaaagaagtagcagggacttattctaaggtaggagatagaaaaactaataagtaaaaatctgctagcaactttaaatggctgtcaaactttttttaatgattaagtgctaatgggggcagatggaaattgtaaagcagtgcagagcattgaggtatagagtttttttctgtcagttgctctacttttgaaagagaagaaattagaggtcaaatttagtcatttctatggtccttttatgaacgtaagaaagcgcttttttaaaaaaatgtgagaattgttaaataatctttatttgatattacacataaaccaccctaaaatgcctttcagtaagtaaaaggaaccattttagataaaaggaatctaattagattggcatagttaaggccaaaaatataaagtagacattgccaccttatcttcaactcttgcctttaagaggcaagtgaacatgaaacacggatgaatcttgcttggttctgagacagtgtgaaggaatttcaccagtatttcaatatattcacataaccagttatataaatctaaaaataaaaccaatttccattaagttttaagatggcattcaccatctttgtgaaaagttgatgaaatcgaatcatatctttagaaggagtaaacagtgttagcatttactgaattggaattgctattaaaattcaaaaaaacaaacatattcatctaaccacaggccagtcttagttttaaaatcaggactgcccaacaaaatattctgtcattcattgatgatctgaattctggtatatgagatctattaaattatggtacacataaaaaagtcatgagacatttctgttttgtaataaataaggcagtggccagttattactgatgagtagcgtttttgagattagctatcaagtctgccctttctgccttcttcttaatgctggcaaagatcatttttgttccagggatgttcttcttgggagtctccaaatagtgcatcagtgtatcctttccccaggtgatgcctttgttcttattggtgtctgtgtaagagtatccarcggcctcacctgtctcctgcctggagagactatggagattaggcccagtcttgtgctggcctcccttttgcattgtgtggcactgggcacacttctgaacaaaaatcttcttgcctttctcagcaacacccatatttaattctcttccatcactggtgctacgaaggttccctctctgaagctggatgtcccgctcttttgaaaattacacttctaaaaatgaattccttcaaggattcttttcattttaaagagaacatttgctgtcaatccactcttctcattttatgaggtctctcagcattgcttaggaaaattatgattcacagaggaaggtctagcactaagatgtttccattggagatactattatatattgcttctcggctatttggctaagatgaaatataagatagatatggtgtcaaggtaggagcacagactaggtttttggagggtttggagttccagccctgactttgctgatactgtctatgtgatctcgaaattgtctcttgactttgggagtgagtaggtgatgtttctctaggtgatcctggagggtccttttacccttccaagttctgtaataattccaktgtttttttaaaatcaccactatatggctttgcacaccacagttttacaaatggtatgtataagaatatccaattttgaataatattggacatcatcctggcacattttgtcgaaacgtagtacacataggctagcctttgacttttcatttggtactttctgcttagctaatatttatatacaaggtagaacttggaaactttactgcacatggtagttgtaaacgtagcttggttgtggtagtgatgcttgtttcactttctgttaacatacagcccatgtatgtattgggatttaataatgtaagccattatagaaaaatgtcggatgtaacagtgatctcctcttgggcggctaagtggacagctttaacatctcttaaatgtcttaaaatattgtgtcaaaaatggtacaaaaaatggtaaccaggtaccaaacccagtttgaatttagcatatatctttcttccattattgtagttctttgtgaaggctttaaatcatagagagattctctctctatgcacatgcatgtgtgtgtttttgtttgcttgtaaaaattggtggttcactgaatagctagtgttatatggcatttgtttgtttagactttaatcatgaatgaatttacagaaactctgctttaagccgcactaaccaggctgtcaagtaatttgcttttcttataggtattggagccaactgtggaattctcagtcaaatgtacaatgaaacatcttgaatrttattttgatgctctcccattttgttcaaacaaattctgattaaatctagctactggcacattcttgctgagtctctggtatcacttggaaggaaggtagtagaggtgtggatcgctgagatactcccctaagagaagtatatcatagtgtcgtattgtttgaaatagtttcgtgatttctgtcccaggatttttttttgaaacagggtcttgctctgtgtcccaggctggagtgcaatggcgcaatcttggctcactgcaacctctgcctgccaggttcaagcgattctcctgcctcagcctccccagtagctgggattgcaggtgctcaccaccacgcatggctaatttttgtgtctttagtagagatggggtttcactatgttggccaggctcatctcgaactcgtgacctcaagcgatccacctaccttggcctcgcaaagtggcatgagccaccgcacctgtcctgggacttttaacttagctcattatcaccttgttgcctcccctatgtgatcagtttcccttaaccctgttagccaaatgaccatgtgacacaagttatctttacttttaatgttactgctttttattttttatttttatttttttgctatgtagcatataaaatttctgagttctagaagaattccaaaagctgtagagatgagaaattgatatagccaatttggacacaagttaaaaatgaaatcaatactgtcatttttttggaaatctaaaaagagagggaaaaatgtatcaggcaccgtttctctaaattgcttccagctgcttgcttcctaatatagaaatatttattaaaagtagcaggttaaaaattggattcctacagcaaaatatgagtggtttcataattttgttaaacagcaggaaataactgagatttttgtcactatagtggctttgtttttttcgagggtcatggtgtagagcaaatacatatttcccagccaggcgaacagaacagtaaatggcctgaacaatttaaacaaaccaaggaaaatgtcctaaggtagtaaatagggaattatgggattttcccttaactattgtaacastataaatgttcaaagaggtagaaggaaccatttaagacaataaataaatgaacatgatcataaaacttagttgggaatgaggcttaagtaaggaaaatggcatgaaaagaaagtcagataggggttgggtgaagaacagaaatttacatgttatctagactaattgcaggcacagtgaaagatttaaataattattaggccaaaatgctataaagaggtgtcttaaaattaagaaacttatgttaattctaacaagaaattgaggaaaggaagacaaatatgttgtaggtgttggaatgagggcttgagggaatgcatatctggaaaatgagggaaacagtggaggggaatagaaactgtgtaggggatatatatgaaagttgtttttcttaagatatttaattaaggtgacaggtacgcatgctcgggaagttaaaaagcaatttctggaaagtgttccaagttaaacctgaaggaggcaycagaaatcctgaaggaggaatgtagcaatcaaaaacattgtgtagaatgttcgtattggcagtatcaatagaggttttgccttatggtcctccttaaccagaaggaagtttgaacacagctgagatcactgcatatctatgtagtattggtctggggtggggaagaaacaagcaagacataatcatccattctcattcatgttcacctattaagatcacttaaaartgaatcatggttatttcatagtaaatagttgtcattgttgctcaatatatcattgtattcattgaccattttcatcacattatrgattaggattacaatttataaactacaaggaaaatagtagtgcatggccttattaatcatacagaaaaaagattaacatttactggtagtttgtgtcttaatataataaggactaatcaagccttgacaaatgagtaactttgataggaaatgtaggcagtcatctgtcggactttggaataaatatgaattatctatatgatatacacatttggaagggtttctaaatgattttctagatataattcatgaagtgtcaagataaagagtcaagtatttcataaaaattaatttcataatagctgtgattcttatcagaagagaattagggttggggtcttatagtttgaaatagtacatttagtatttaaaaaggttttttgatgcgaaaacaattatttttaaaatgaagctatgtataaagtctgaaaatcttttttttaaattggtacatttattaaaaacatagactaatggtcttatgcttaaatgtctttgtggttgtgtgctgactttcatccagtgtaactaagggactgttcacaaatacactctggatagaagtataataataaacagaaatggctgtcatagagacatagttccgttacaattaatacttgccagaaaatggagcttgacattgtttactattatactaacattcacaaaaggccggatatcacaggcataagggcacaccatgaccatgagacatcctttcatacttcccaaatagttttatattttagctatggacctcagttaccagagccaaacttgttcttaacaagtagaatttttatgtccattcagtcgaagagtgtcttacacctttctgggtctctttatttgcagataggagtagaaactgtaaccaacttcttcgcatcttgcagtcacatgtgatgcccaattttcatatgctgcccaattagcggtgacttgcagcagggccacaaagatgaggaagttctgtatggaggtgatcacatccgcatgcatcttccattttgtgtcctctgggtccaacctcattgagaggcccttgatccagaacactgaagctctaattcattggctttcagctgccatgctctgctctctgaaaatctttcttaatgggtcatggatttaaagttgaaaaaaagctatgggagtttctcaaattagcaattctcaaacattcttaaattaatagaaattcgaaaggcaaatattgagtcaaattatgatgctacaatcttctaaggcagtttgagcagaaatgaaactatgcattgtagaatatgaacagggtcaaatactttgaagttatgtaactttgaacaaactgctaaattaatctaagctttagttttctaattaaaaatttgtargaacaagatttgactcacaattgttctgaacattaaatgaggtagtccatatgtagtttattcactaattcttctttcaatcattattgaatatttcctatatactagcctatctgtcatacattggggatacagatagaataaaaattgtcttaactctcatgggagttacagtctattaggaaaaagcacagaagtaaacaagtgattacaatagggcttactataatggggatgagagtgaatgcagagtctgtgtaacaggctaatgtaatagccattgactcaagaaattacagtaacagagttgggtggtggaggcagatctgattttcatttttctcttaatttacgcattcccaaacttatgcatatggtcaaggtttactatagtgtgctttctattaaacctttaaacataagattggtaaatatggatattttttagaagaaaaatcctacgagacttcttaaacgattataaattatttccataattcataatttataagcgttgtttcctataattttagttgatttctattgtgggcctttaatcctccttgtatctattgtacccttcccttgcattgcccaccctgctccccatcctccagccgaaacttcttctcctttagtcttgtgtaattttaggactgttgctatagccggtatgtttgtcttagcaaattaatacttgtgtaggaattctgaaaagacaaactttgttcctgtaataacattttaagttgatgccatattttcattggctcttaaattttaaaatttcatctttatttgtggtagaagacacataacataaaatctactattttaaccattttaaaatgtgcagttcagtagtgttaagtgcattcacattgatgtacaaccaatctccagaacttttcatttttcagatctgaaactctatacttgttatgtgggtcttaattttaagactacagttcttacaaaaatttcacaaacataatatatttgctacttgctgggggtggtattaagtttattatttgtttttaatttttttttatttcaacaggtttttggtgaacaggcagtgtttatttacatgaataggttctttagtggtgccttctgagattctggtgtacccatcactgaacagtgtacactgtacccaatgtgtagtcttctcccttgccatccccaaccctttcccccgagtctccaaagtccaatgtataattcttaggcctttgtgtccttataagttagctctcacatatgagtgagaacatttgatgtttggttttccattactgacttactttacttagaataataatctccagttccatccaggttgctgtgaatgccattatttcattcctttttacggctgaatagtattccatttctttatccacattttctttttttttgtttgttttttgwtttttgagaccgaaaaaaatatttttcatttttcagatctgaaactctatacctgttaggtgggtcttaattttaagactacagtttaattttaagactatagctccrtcgcccaggctggagtgcagtggcacaatcctggctcactgcaacctctgcctctgggctcaagcaattctcttgtctcagcctcctgagtagctgggactacaggtgcctgtcactatgcctggctaatttttgtatttttagtagagacgaggtttcaccttgttggtcaggctggtcttgaactcccgacgtcaggtgatccacctgccttggcctcccaaagtgctgggattataggtgtgagccactgcagcctcccaaagtgctgggattacaggcatgagccactgtgcctggcctatccacatttctttatccactcattgattgatgggcgtttgggttggttccatatttttgcagttgcaaattgtgctgctataagcatgagtatgcaagtacctttttcatataatgacttcttttcctctgggtagatacctaatagtgggatgtctggatcaaaagtacatcaaatggatctacttttaattctttaaggaatctccacactgttttctgtagtggttgtactagtttacattcccaccaacactgtaaaagtgttctcttttcactgcatccatgccaacatctattattttttattttttgattatggccattgctgcaggagtgaggtggtattgcattgtggttttgatttggatttctctgataactagtgatgctgagcatttttccacatgcttattggccatttgtatgtcttcttttgagaattagctattcatgtccttaactttttgatggaatttttttttcttgccgatttgtttgaattctttgtagattctggatattaggctttgttagatgtatagattgtgaagattttctcccactctgtgggttgtctgttaactctgctgatttcttttgctgtgcagaagctttttagctttaattaagtcccatctatttatctttgtttttgctgcatttgcttttggttggtcataaagtctttgcctaagccaagtctagaagggtttttccgatgttatcttctagaatctttatggtttcagatcgtatttaagtctttgatccatcttgagttgatttttgtgtaaggtgagagatgaggatccagtttcattctcctacatgtggcttgccagttataccagcactatttgtcgaatagtgtgtgctttcctcactttatgtttgttatctttgtaagcacttggctttatttctgggttctctattctgtttaattggtctatgtgcctatttttataccagtaccatgctgttttggtgaatatggccttatagtatagtttgaagttggataatgtgatgcctccagacctgttctttttacttagtcttgctctggccacacaggctcgtttttggttccatattaatttcaggattgttttttctagttccatgaagaattatggtggtattttgatgggagttgcattgaatttgtagattgcttttgacagtatggtcatttaaaaatattgattctacccatttatgggcatgggatatgtttccatttgtgtcatctgtgatttmtttcagcagcagtgttttgtagttttccttgtggtttttcacatccttgtttaggtatatttctaagtattttacgtttttttgcagctattctgaaagaggttgagttcttgatttgattctcagcttggtcactgttggtgtatagcagtgctactttaattttgtatcctgaaagtttgctgaattcatttaccggttctgggagctttttggatgagtctttagtgttttctagttatacaatcatatcatcagcaaacagcgacagtttgatttactctttactgatttggtttccctttatttctttctcttgtctcattgctctggctaagacttctagtactgtgttgaatagaagtggtaaaagtgggcatccttgtcttgttccagttctcagggggggaatgctttcaactttctatgtttagtataatgttagttgtgggtttgttgtagatggcttttattacatagattggctatgtcccttctttgctaactgtgcttaggattttcatcataaagggrtgatggattttgtcaaatgctttttctgcatctattgagataatcatgtgatttttgtttttgattctatttatagtttattacaaaaagattttgtagatggctttaaaacaaaatatcaaatagtgtgttcttaatttataccataaagttagagaatatttgaattactgtaattcatttgatttagggtgactgaggcattatactttgatagcagctgggcttgctttttcttttttaaatcataaacaagttctattagagtttggttatttagccaatagaaatgtgtatagttaaatatgtttggactttggggaaacagtgtttatcaatcttaagaaatactcttatcgggctgggcatggtggcttacgcctgtaatcccagcactttgggagtctgaggtgggtggatcacgaggtcaagagattgagaccatcctggccaacatggtgaaaccccatctctacaaaaaatataaaaattagccaggcgtggtggcaggcacctgtagtcccagctattcgtgaggctgaggcaggagaatcgcttgaacccaggaagcggaggttgcagtgagctgagatcgagccactgcactcttccctggcgccactgcaccccagcctggtgacagagcgagactgtctcaaaaaaaaaaaaaaaaaaaaaaaagaaatgctcttatctttcataggagtggcttcagctataataggtaatcttaaagattttctccagtgttgactcttctttattttgttggtttacttcacttttagataaaatggttttcattataaattattagttggcccaaatgggagctactttaaggaaacataaaaatctgatttctttggactgtctttaattctaacttttattttcctgtgatttttgcttttcatttaaaatatcattttttaacaatagttttattttcttttgtaggatatgtagtagtaatgcttatattagtttttttcattgattatattttgaattttcttgtagccaatgttagctaacatggtccttatgataagaaccattattggttttgtgactggtggtggcagcagttcttttatcttccagattatttccagtaactttctacacctatcataggacactgagagtgactaccaattttgtattttatgatactttccttttagctttttaaagtctagcatacgtgttgtagaagaggtgcaaatagaaatgaaagtcatattttgatgttttacatattgtcagctaatctttcattgtatttcttagggctgctataaatttcattcttgtaccaataatacaaaatcttgtcaaaaaatataactcctatctaataatagatatattttatattttttgttaatgaattgaagtataaaaagtaataacactctatttcttgtccaagagtcatttttttaaaaattctaaaaaagtaaaatctgcaytttaagaagttaaatttagtttttaaaaatcttctagttggaaaactaaagtttggtacacacccagaaaacatttactaaaattgattacataaattaaaaacttcatcttcacaaaaaccaaatcatagcgaaataacaagattaccttgtatggcaaaagtctaaatataaataatgagatgtggaaaactactgaagcattgttaacaaatgaagagatttcacaacttgataaattaaatgccaggaattcattagaaatactggcagataatacaaatggtgcatagaaaaataatgcctttgaaaagatgttctgtcrtacgtaaaataatacaactgcaacttaaaacttccccgaggtactctgtttcacctagttgattggcaacataaagcctaataatatacttagctgcagatgcagtaaatcaattccttataaatctttggtgggaatataagtttgtataactttgggaggattatttggaaatatatttcaaaatttaactatacatactctttgagcactttcacttttagaaacttaacctggatatataaaagcacatgtgtatgaatagatataatcaaggcttttaattgctggaggtaactcttttagtaacttcatgtttttcctgtgtacttgaatatgaatggaatctctctggaaggatacagaagctgctaacagcacctgatccttaggagagaaaccgaggttgctgaagaggacatgaaaaacaaccttttaacttaagtacaatttacagaatacatgtgcatgtattacctgctaaagttaatattaaaaagaatgacstggaactaagactctcttgtcagccatgtgtaaaatacaccatcagtggacagcacaggtgtttagcacatcactgatgtgctggtgatgccacagtgtgttagcgtttgccactcaattcaaacatctctccctcaaaaggaagttccttgayatgctcttctcacccctgactacctaggacagtcatattcatttattctgtgtattttttctaagattatatatataattaatgttttgttctagttgtttcatatctttttccatagatagagttgggctctgtgaaggctgggagtccacccctcttgcactgctgcgtcctcactatgtagtatgatgccttggatggcgctgacatttgcagcatctttgaatgagtgaagaataattctagagtatcagacaaagccagagcctaacaggaaaatatgataagcctcttctcacccatgtgggcatttctgttccttctaacagtggcttccctaaaacaaataaaaagttttacttcttcaggggggcaggacacagaactctttcagaaaccaatataaaccataaaaggcagagatgcaaatacctctacattttgtcatgtaattttagtggcttcatggatttccctaaagctcttcaacttgaccacctcacttaaggatccactctgcaggattgttttttttgacctttattccactgacaatttttggtttcatttttctgatttttcccccttctttctagactgggctattgtgttttatgaacattttcaaatgtacagaaaagtagtaagaagtatacttttggacacccaaacgcccaacattccaccattcatattctacagttaaccttttactgtatttctctctgtctttctttgcttttttgaaacagtatcttgctctttgatccaagctagattgcagtggagtgatcacagctcactgtagtcttgacctcctgggctgaagtgatcctcccacctcagcctcttgagtagctaagactacwggcctgtgccaccaagcctggctaatttttttttttttttttttaatttttagtagagactgagtgtcaccaagttgcccaggctggtcgtgaactcctgggcccaagagattctcctgccttggcctccccaaatgctggttacaggcatgaggcacctacctaccatattttctttatcacataactatccatctatctctccatccttttttatttagtgcatttgagtaagttgccaatatcattacactttcctccatatacttcagcttgtatggcattaactacagttcaatattgtttataggactcttttttgagacagaaatttatatacaatgaaatgcacaaatcttacatgtaacatttgatgaattttgacaaatacatacacctgtgtaactcaaacttatcaagatctagaccactgccatgaccccagaaggtttactcatgttctttcctagtactttttgtttactggtttatgtgattataatttactatgttacatttatattacagtgatcccttaagtttatactgtctgatcagcattgcttctgtctttagatgaggtctgatggagatccaaggtccttaagaattgtcctagccagatcgagaccatcctggctaacacagtgaaaccctgtctctactaaaaatacaaaaaaattagccgggcgtggtggcgggcgcctgtagtcccagctactccggaggctgaggcaggagaatgatgtgaacccgggaggtggagcttgcagtgagccgagatcgcgccactgcactccagcctgggcgactgagcaagactccatctcaaaaaaaaaaaaaaaaaaaaaaagaattgtcttagccctaaaacaattaagatgtagtaggagtcagtaacaaagtcaccagccctggtggttgtgttgatggtggtctctaagcctttgtgaggaaaaggaggtgtaggaatactgacgaggctgacagaagtgggggtcttattaatcccttgtgttcacaggggtcatacaggttattttttaggtgaacaggtttactgccactgtatttttttccattttagatgttttaccaccgcacagcttactcagttactctctgaagtgagataaggaaatgaggattatagtaactgaggaagaacaatagtcacacatcttagaataagcatagtggtggagagagggtaggcacagcagtttagagccttttgccaccagttggtgatatttgtggagtcacggacccctgggaggtggaggaagtggagaatgtccagtgggaagaagaaatctaaaacttaatctgttgtcgtagaagtcttgtgatgtgtatatagtgattatattaccggaaggagggccttgagtgagttgtccaggttcttggcattttgaacaaagaattggacaaaacgcacaaaataacaaatgaatgaaacacaggaaagaagcagcgaaagcaataatttattaaggctagaaagcactccacagggtggaagtgggctcgagccagtggctcaagggcccgttacaaagttttctgggttttaagtacttcttttgaggtgcctatcagttagcccttatctggatgaaggatttggtccgtgcctaattaaaggctgaggtgaattggcaccctgtgcagatgaagggatagtccctgcttggccaatccagggtacttttcctttccatttgaggcgtggtggggggtggggggattgtagggagagtagcctttgatcgtttgttactccatgttgggaratgggggttttcctttggtttagctttaggaagtttcagaaagtttgtgttrattggccttacggtccccgcccccagacccaggtgttttccttttgatccaggtttaggaagtagcagaattggtctcaggttccctgcctccagaccttggtgtttttcttgattcagcaggaattagccttaagtttcctgcctccagaccctattctccagcctcaattatagcatattaaatgtctctgatataataaaagttacctcagaggcaattaatcttttcattagctttatatgggttggagatggtagtaacttcttaaatatgacataatttgtggtctgagaaataaatgtaactagatactatagctttcatgttgaatcggaaatacaaagtcagtgttttagtaatacccacatagtacaaccatcattgtcaaaacaactttcttktagttaaatcataatattattgcagatgcactagctattttcataaccgtgaccattatctaaaaatataatacattgataacttggcacaagtctttatagtaggtttgttatttttaattgcatggtggtttttttgcttatttatttattgagacagagtcttgttcttttgcctaggctggagtgcactggcacaatctcaggtcactgcaacctccgcctgtcaggtttaagcgattgtcatgcctcagcctcctgagtagctgggattacaggggtgcgccactatgcccagctaatttttttatatttttagtagattcrgggttttgctgtgttggctgggctggtctcgaactcctgacctcaagtgatccatctgcctctgcctgccaaagtgctgggattataggtgtgattcaccacacccggccttggtggtttatttttaagcatttatgtattcatcattgttaatatctccttattaaatgatttgctcttttttgtgtgtacttactaccataatgtaacagttgtgaccaatgcgctgcttcccaaagcttctggtaattatagataaatgttctagattggtccctcctctcttttccttgtgtgattccctatggtacagagttaaaaatcaatcaactagggagactgcagtcgggtattttgcaaagtaagcctttatgcagttggcttgatctctctatgtagcacaaaatcartgtataaaagtggtatttgagatttattgaatactttttcatatgttttacatttactttttaatcctcccaataactgtatgaggtagataccattggtgtcctcaacttacaactaaacccagaggttaggtaatggtaactaatctcatatagcttattagtgatagagcttgtgctcaaatacattttcctaactactacaccaaagacttcttattctgtctaatggaagctgcattgggttaagtaccaccaatagtaatactagctgtaatttgaggaggataatccaaatcctcagacctgggttatgtcttgtcactttctcatcaaagcaggttatgctatgacctcttccaaccccctatctcagggggtctgctcaccattcacttagcataagtaagcagtggctttgaatttttagtatcttgctgtagtggttttaggttgtgagctaggtcctaatcagtacttcctgttaagtgttttctgcatctcacctttggatacagctttttttttttttttttkttttttttttttaggcaaagccttgctctgtcctcaggctgaggtggaatggtgtgatcttcactcactgcagcctccacctcctgggttcaagcaattcccctgcctcagcctcctgagtagctgggattacaggcgcccgccaccacacccagctaatttttttatttttagtagagatggggtttcaccatgttggccaggctggtctcgaactcatgacctcaggtgatccacctgccttggcctaccaaagtgttgggattacaggcgtgagccaccatgctcggcctggacacagtttaattgtcattggatattttactgtgttcctatggtaaattactataattggaaraggaatgttgcaacgttgcaaacaatgtatggcaatcattttgctttccaagtatacattttcctactctaaaaacttaagtttgcaactgcacattttaagatatgtatgaaattttgactggaagatagctttatttatcttatgcccatttattatattatgtaatttttagtccttaaatattatcaaatagcacagttctagtaatagagaaaatgtaaacgttattggtttactagccctcctattaatgcttaaactcttttaggttttgggaggagttcttagttaataagtcaaataatgttattcctggacagtgttttcaatgcttctcattagccaatgagtaataaatgtacccagttttgagaagtatattgccagagttggattgttaatataaagcaaccattttcctaatcatctgtgttttttgtatgttctcacacagaagaaagaaccttctaaatccagcatcaagaaaaaaatgaccaaagttgcagaagcaaaaaaagtaatgaagagaaattttaaagtgaataagaagataacatttactgatgaaggggaggtaagattctagaagtgtttcatttctgaggtgcatttggagtattagaagagatcgactctctcttacttagcactcattaatgatagagtaaatgtttctctacagcatgctgggccattcctttcactgttactgtaggctgtacatcagctctactgctgtgaacaaggatgccttactgccaataagccgagatacttcttggtaatactgacacagagttggttttgaactttctagattatgtttttatagataaggttttctcttcatggtattgaacattatgttctatggaacagacatgagaatgctaatacatctacttgccacagcttcttttgcttcactcagaaaagcttctgctttgcacttcctcaattttaaatgctgtacttgcatatatcttgctggactggctatgggagggaattctctgctttataaagtagtctcagacacagaggtgccttgttwaaattcacctttcccttagccgtattgtaaatacatacccatagtatagggaagggattaccactcacaggttactcatgaaagttcatgctattatgtaacagttgtcttcattttaaaatgatgaaatagatccagtatgtcaagtgacttacctaaggagtggttacagtaggtagggtcttttgaatatcatctcatggcctcattctcaccagcgcaggttttcctgactatcctcatattagcacagagcaccttacctccatcatagcctcatttctctcaccctgcctcacttttcttgacagcacttactttgtgacttcagtctatatttgactattgtcagtttcttccactccacttcttcttgagaggaaggtattttgttgattttgtttactattctgtccccagcacctagaaaggtacctaacataataagccctcacaaaaatttattgattgaatgaaacatctatttcaataaaataacagcttttcatattaactaatgtagcacatcatatatttcatcatcattaacataaagactgcttaagcagcctctccagtggagtatgattccttttaattttggagttaaagttttggatgttattttgggatgtataaatcagacgaaaagtcacaaaatcgtgtgccattcaaaggtggtggaagttgaagaggaagcgtatctaaatracagataatgagtctttatgaagttacgaaaaagaggtcagcacctgagaaacagactaaactagaatagtcatatgacatctgatgttcactgtaaaatgagatgagtgctgttggtgtaatgaggttccttagtatgctactaagtttaactgcataaattataccaattagctccaaaatgaatgtaaatcctcaactataaaatgtttcaatgtgtacttagtgctaataggaaatgtttgtggctgtgagccatcctgaaacttctgacttaaagctctgaaagaaatgccactatatatatttttctagcccatagaaggataaactttttgccctctgattgcagtggggatgaggagtccaagtaacatgatattcatattgttaaaactgatccctcgcattgcctctttagggtcagtgactgctagcatggctgctcagtgatatttatcaaccccattggttgctaaaagttgaggctccataggaatctcatcttgaagaatggttatggtggccacagagtgagagaggagacattaatacctgcgatgtgtgtgcttgcagtttccatttgctggcaggttaattagcagtctttcaaaacaatggtagttatttaaatctttctggcaactaattattagataaaacaagagttattgttgtctgaattgtctatagagttttgtggtgttagacttagaaattactgagtcaaataaacctmtgtttttctggaagggacacagatatccagagattaatttatttcgcattacatagtaatgaaaaagccaggacatttagacaggtcccctcattagcagatcagtgccccatcttctaggtcaccttgttccttaccctaaactgtatgtgtaaaatatgtggatttgagcaagcctgtgaaacccaaactgattttctccttttcagttagttatttcagtcattatgtaatgttagttggtatgtgattcattgatccattttgagcacctgtttaatatgtgccagatactatgttgggctccaaggataaatgaacaagacatacaactgccctcaaggagattaattctagtaagagaaacaggaacataaaacaacgcagtgcaatgaactttgtgtgacagtaacacactgggtaccatggaagcccaaaggaggtacagcctgtgtcctactcagcccgactcctactgtgtgcagataattttgagctgagttgtgtggagaatrggatactaagaatgctgtttggaaagatgctggagcatctctattttgtgactgccttctcttccaaattatttggtgaaattttcttttaatcctgttctcattgggtatggcagtgttactttactctgactagggcagtctcttctatggcttgaagttgattagaagattaaataatacagattagattgtaaggcagaaaatgggtatctgcaccttttcagaatcatcagacaaaatgaagtgtctttctggggtattccctacttcctgttgacactgaccttttttttacctgtagttggttcagcagtggccacaaatgcagaaatctgccatcaaggatgctgaggaagatgatgacacaggtggtatcaacttacataaagcaaaggaaagacttcaggaagaggacaaatttgacaaagaagaatataggaaaaaaattaaggcaaagcatcgggtaagctttccatcttgaattcatactgagtaaaatttagtgtcccgaagtatatctaaatattcattagctattcattaataagtgtattattttcttcattgttttctctgacacttctttttctgtggctactcttttttctgtttatttgttcctttgctgggggagtctgtatattgactcgtttctgagaatgccacttaaatctgtctttggtctgaggtgatctaaataatattagtggatttgttgttattattacagtttttattttgagataattgtggtttcrcttgtagttgatagagatatcccaagctctccatttcaataattttgtcattactggaatgttttatataaaactatgcagtatgtagctttttggaattggcttttttcactcagcattattctatggagacagagccaagttgtgtgcatcagtgctttgttccttttattactaagtaatgtcccatcgtatggatgtactgaggtttgtttcaccattcaaccattggaaaagattgatggtgtttccagattcaacttaataaatttccatatcaattacttgataatacattaaatttattatattaaaattggagactttgtaaaacttctataaaaataagcatgtgcccttgtggtcttgaacttggcagttttctgttatccttgatatagtggtcacacatgatattgttataccattatactacttaattccctagaagtgaacatttcactagataaaaaaatgaattaatgaaataaagcagattgacattttttaaagaactttctttagcgtgcttttgatacagtgatttcagggtgacacagtgagaaacacctgagaaacactgctatataatattaaattttgtattaagaacaaaatacctttggatgtgaacattgttaagtacattctgagaaggattcttagagcttttcactcctatttgacctttcatggaccagtacacacttttttataaaaatagaacagcaattctcatttctttattttaatatttgatgcagcttcagagtagcatttgatgaaaaagtagatattggagatagctttagggatggaaaatgaatgttgagaaaagcattccaaaaatatggagaacagatgaacctgaaacgtactggttgtaattgttggatatttatgttaatgagagaactaagcatttcttgcattgctgctcttagtgcagcaattaaattgaaatttgatattagcaatttgttaaaatctttaatattaagagtatcaggagcttgtcatgtttcagcttgcaatctacttagagtatttatccaggggacaactgggcaagaatgtactgcatttctaagttgtagccagcagtaaaagaaatatgaaggatttacataaaataatgttcaccctcttccccttccttgccatctcttttctcccatgtggaagttgttactatatccatgtcattgaatattgttctggaaacctttagaaagttaatttcaaattggcaaattgtacttgttttatacagtgttaatgtttgctaggctctgccataggctgtgaacatagaatatttaaaatatgtgggtgctgctgagtgggtgcagtagtttgcacctgtagttctggctacttaagaggctgaggcaggaggataacttgagtctaggaacttgaggcagtagtgtgctataactgcacctgtgaatagccactcattaataaaaggcaatatagcaagattctgtctctttaaaaaacaaaaacaagaaaaaactaacatatgtacgtgggtccctccatcttcaggaagattataattaagtcttagttaactggatatgctgttactgcacaaaagctgcttgcacatcctttttttttttttttttttacataaaatgttttggaatgaataatatattcacatggctcaaaaatcaagataaaaaaattgcacattggctgggcgcggtggctcacacctgtaatcccagcactttgggaggctgaggtgagtggatcacgaggtcaggagttcaagaccagcctgaccaacatagtgaaaccccatctactaaaaatacaaaaattagctgtgcatggtggcacacacctgtaatcccagctactcaggaggctgaggcaggagaattgcttgaacctgggaggtggaggttgcagtgagccgaggtcgtgccactgcactccagcctgggcaacaggagtgagactccatcgaaaaaaaaaaaaaaattgcacattgagaattcatgcttctgcctatatctgtctgtcttattcatacctacacccttatagctaactacttttaattttaaacatgtcctttcactttctttatgcagatagaaataaataggaatacatattttttcttcttttcttatatgaaaggtgtatcgttgtgcacttttccattttcgcttagctttgagcttgtaaatgattttctttgcatcattattagaacacagcatgtgattttttagactgtctccatgactatctcatagcaaggttgaacagaacagttttgggctgacgaagttgtgagagaaatcacttgaactttacatatagctggttttgaaaccagtacttctgtgactacaagagtcacagtatttttttttttaaagtgacaactttctattttaaggaaaataggtgtattctgcacaagacataccttccaaataggattttgaaaatcttacctggaaaaaaagcacaaagaaacaaagaaataattagaatagttttctctattcgactgatataaatgttacctgacacatgattgattttatagtattttcattggtaaacacacatatgtatttgtgtgtattagagaaaactttgcagtcgtgagtactgtagcattagcatgtttactacaatagcatacataaggcacaaatatrggcactcaaatcatttatgcaccaagctgtcatagagtggatttctacccaggaaataaggaatgttttcttaagtggcacatcttcacatgtgggaaagtgaagcagtgatgtttgttgggaagaatactgtgctgtactgtggaataacctgtacttgagtcctcagtgtggaattagtaggttggtgaaaaagtaattacagtttgtacccagtccagtttggattactagtcactgactgggactttgctttcctaatctgaaaaattagggagtaggagtgggacttagtgccagatgtcagtgagatcctctggctccatagatctagttaagacatgggaataaaatcatccttaactgtttggaaaataaaattttgatttgtaatttttttctccctgacaagtcaggttgcttgctttacttgatgaaaagagtttcttcctgccgggcacggtggctcacgcctgtaatcccagcactttgggaggccgaggtgggcagatcacaaggtcaggagatcgagaccatcctggctaacacagtgaaaccccatctctactaaaaaaatacagaaaaaaaaccaaaattagccagtcgtgatggcgggcgcctgtagtcccagctactccggaggctgaggcaggagaatggcatgaacccgggaggcggagcttgcagtgagccgagatcgcgccactgtactccagcctgggcgacagagccagactctgtctcaaaaacaaacaaacaaacaaacaaacaaagactttcttctttacttatttccagtaacttttaaaactttactttaaaaactaaatatattattaatcctgcacaaattactttgctttaattaattgctttacttgaacacattgttggtttttgaagtcacatttttttcctaactgagtatactactactataatgacaattcttagttcttttagtgtagggttttgccttgggcaaatataattctgtttccctttgaggctgtcactcataattttgttacttctatgaaagtatattgagaagaactgtatgtccccaaagaatattgaaaatactgacaacagggtctaggggaagctttacttcaggaagacagaaaaaggtgacgaaacttttgacccaaagttgtgaataagggatgtgcctgaatgaattttgcatatgaaaaaaaaacttcgtaaaacctatcacatgcttctgtatttgacacatttcttttaatgtatattaattgtaaaagattttgtaagccttggcattttttttcagcatgttcaaaatattttattatatatttggtttaaaggataggatatttaatatgtaagtgaatttagtcttaatgattctgtttggaagtagttgtttgctcttgcgtttaaaagttgacagccttgaatcatagctttgcatgtgcactcattcttagtatagtaggattcaactactcattttgtcctacttgtttttccctcatactattacacctgtctttgaatcacatttttcatctaccaagttctgaaagctatataatttctaatgtgattcaagtaaatctttgtcttaaagatttagaaaactgaattataacaattttttacatttattgtttattttaaaattttatgttatctttaattgacacataataattgtatgtatggggtacaatgagatatgtcattacatgtatatgttgtgcaataatcaaatcaggctaattaacataaccatcacttcaaatatttatcattactttgtggtgagaacatttaaaatccattcttttagctattttgaagtatataatacattattattaacatggtcaccaagctgtgcaatagatcatcagaacttattcctcctgtctgatggaaactttatacactataaccaacatcttccctttgcccatctcccctgcaagccttccacccagtcctttggtaaccaccattctacgctctacttctgtgagctcttacgaagtctgcttctatgaactggattccacagataagtgagattgtgtattatttacccctctgcctggcttatttcactctgctaaatgtcttcttgttgcaaatgatggaattctgtattttccttaaggctgaatagtattccattgtacatatatatgctacatttatttaatccattgtttgttgatkggcacttcagtttttccacatcttgactattgtgaataacgttgcaataaacatgagagtgcagacatctayttgacatacgaatttcaattcccttatatataagagatctaaaggttctaactggtttagagtacaaaccagvccagaccagaccagaccagaccagaccatatagtttaatggcatcactgggagtagaactcaagctgcctgcttgccaaaattcatagctgctactctggacttcaggtatccttctgtaactgctttggatcatttagcagctttagttgctcttcatgagttgtcgttgtagcctttaagcaccgctttcttrtgagaccaccccagccttcagctttgtctggcacttataggtagctgtgcttaaataggtctgttatttttattttctctttagaacctctggaatcaatcattggaaataaaaatacagcaaaagctgtaacatttgcatatgaaaccattagtaaactagtaaactgtaaagacaaaatgccactcttacatacaagcaatgtgttttctaataattcagtcagaactgttgaaagataggccatggatcctatttttgaatgatttttacttcaatggagtgaaaatctgctctgtgttgtgtcatcattcttagttctgaaagatgacttgtactgaaggtgataatatttgctatcacagctgagaatagagaaaaacaattcattatgaagctctttcattcccttgaaattcgagtgctttatctatatcggattatgaatttagataacataaacatgtcaagatgtggctctggactacttccagagatggtacagcattactctaggttccatttactaccagcatgaacattagaaagttaagaaagaattaaaggaagactttagaaaatctatcttgttttattgttgttgacacataattaagttggcatggaatccagatgacttaaccataaatttktgtgatagttaagaaagagggaaactgtaatcaggcatctgaggaatagtagccacaagaatattaacaagtaacacttgcttaactggaccctgcagtaagtttacatgtatcgtcatattatatgctaataattaacttctgaaatcagtgagctagcatcatttttacagattacaaaactaagacttagaagggtcaagtaatgtgtccagaaccctgcagcttgcaaacagcagccctgggactcttaccccaaggtctttgttactctttaaactttatgctttttaactattcagctgtgttgctacctatttcaagccatcagacgttcttttacaggagggtaactctgaagcagtgaattaaaacgtggaggatgatcacaagagtaaagggttttgaagaacagatgacaaataatggagatttttcatgtttccagaacaaggtcattgatctctaataaattaagaataaattaaatgttgtggttagtagtatagtttaagactccatactaataccacttattcctgaatgttcattgcatagctagatatgtacatatactagtgccagaatccatttttccatagctatggccatttaagagtctaaagtaagagccagagactggtctggctcacatggtccttaatgaaattttactaagatcagaartgtcatcttgaggacaagggactcagtatctggtgcctaattctgaaatggatgttgtgaatgaagcttatttatatgagaggataaaagatccttttcatgacaaccctttttccttctagtttcagcccttctactgtcacaaccaggtttattattaaaatggaagccaacctgttgctatagaacatttgcctatcatttggagatgtctgcctggggaggtgtctgttcttactctcatgagcttataacatctagtgacatttagctcartatcttggtgtttgggctctctttatatccagcatcgaaaatgagacaagtattcagaattacataaatctgatctattttcatgcttccttttggggatttttttaaaaaccatatggtgttggagaggtgggttggttattaggttgatggtgagtaggtagagattggggttgaggagcagggagcagtttggtgccagtggaatcagggagtctgataggattaagttataaactgcaaagggcaatggtctatatctcttttgcccattatatgtatgcagagcctaccatgtggctcggtaaatattcaaaggatttaactagtgaatcagtgtttccacatcaatttgtttttctcattctttgtatccttgttatagttgttacagatttatacatagaagtccactttttaatgtcgttcaagcaaaactctgtaaaataggtaacagatyggagaaccttgttgtgttaagttcctgggaaggatttaggtttactggaattttgttcttggagggcaggggatatctttgggacttaaccattctcatgatctttctcttgcttacttttgttaagccagttttcttttttgaaaaataggttattctaacactgaagtaaagatgcatgtccccttcttccttatgtgatagctggggagtcaattccttaccaaactgacacagttgcctgagaatcacgcaaaggaatatactttcataacctcccaaaaatgagtcttattttcaaattacaaattttcaagtatcaccctagaatgaaaaagtttaaattagtagtcatgactgctcatgaaattcatgtttcatggtagtttcttttctggaagctaaggacctatagtgtgtgagaatccaaaagaagtataatatctataaaggtagtattttataccttgaaatttgattttctgtttttctgtcccttgtgaatttgattttcattattgaatttcgtgctccccttatacttaatcatttgtagcatggcagaactaaagataacattttgccttctttttttgtagcataaaatagtttttggtaccagtatgtcctcaaaaataaaataggaaaaataaagcatttaaggcatttgagccacacctaattaaaaggggaggaggacttcaattactgaatctaataagattcacttatacttttctcctgaagtaattgtactccagccttttatctttgttttgtcatatgtcataaaccgtctttagaaaattatttttttcctactcccacaaagaatatattcattttctaacttttgaattatgataaatctacttccagttctttcgcttctgtcttgatgtttactcttggctcttttcagagtactaataaagctttttcagataagaaagaaacgttttctaatgattcacttcaaattattttcttttagtttcactcagtattaaaagtttgtcattagtgcatttgtttcatgtcttggtaacattcacttcatgttgtaaaagtctttggatgtctcttgtccgtctgaaaattttggtagaaaatttaaaagggaaaattatctcatttgcatgcacatgtaaattctgatagccaatttaaagctgaaatttaaaatatcttttaatgactataatgaattaatattggaattcagtaaaagtagaaaattgtccatttttttctgctgtgattaaaatgactaaatggaaaaccccagcatggttatgtttgctttagtagaaaggatttttctgatgtgaatatgtcgaagttattctttgcaactttgaagtgccattttcagacactgatgtgttggaggaagatcagttgttgaataattacaacaaaaatttgcatggcttttaaatatggtcaattatctgtttcttctgcacagaagactggcaaaattaattgagtaatgttgtaaaatgctgtcagaaaaaaaaatgctatcaggatgaaaagacctgtatggtagcagattataatgatgaaagaattggcaacatttgtctaaaacatattgatacggatacaaatactatgtacgaacctacaaagtgaagtcaatgttccagtggaggagtatgaagtgtagtggtgtgctagatttgagagagtgaggacttcggctccccaggcccagtttagtcccaagtccatcacttactatgtgtgacatcaggcaagttacttagttactttgatcttccatttttcatctatagaatgggaatagtaatacctttataagttctgttacatagatttaaaaagataaccaaattgttatatgaaatgcatagcacattgttgatacttaataattctgaactacttctgttggtaagaaaataacagtaatgtgctaatggacaaagaaatttttatgaaagtacaattttattcctctctgtagttccttgatatatagctatagtcttaatgtaagcaacaaaacactcaaaagtcattgtgatcttcgtagaataacataaaatatagttatattccattttagtgtctaacacaggaaaactgcatggggggtggggtggaaagagaagggagataaagctacaaatacatgtatccacaagctaaagccagctcaaatgaagtgttagttatgatcagttatatcatattttttctttaatcttgttttgcttctttcatatattttgtagtctgctaatcctcaaaatcagtaattggtgccaacttaatttaggcacagattgtttagaaactgccatccattaacttatttttccccaaaagttggggaagcattgagattattttaatttcgtggcagaacgtctcttataatctcattagagaaccaattcagggataaagtttgataatcactattgcattaattggctgcttgctaaaataatactagttattattttcttctgtttttaaagtcacatctgttaatgtttaacccctgaatgttaacatttttatttttattagaatgtatcgcaaaaagcactagatttggcacatgaagacccgggtttgagatcagtcattttctaaagaagctctttgataataagcaagccaaaagctttctgagtttttcttttttctcctttccatttccttccattgaacttgtttctagaaattccaagtaatctctagaatgtgtctcttgtataattgtacattatgttttacctgtcctgttagtgtgtgttttatttgaaagtcagtactaaccattgcatagccagagtaagtgatatagaactgggatttgattccagatctgtctgacacattcttaatgattcatgaatacttgtgccaatcccatagtagtagtcagtaaatatttgttgaaaaatgaatgtcatatattagttagctttaggaaataaaactgtaatgaatgtgtagtctgttttatacctaattatatgctgstaatttttctcctcttccttgtctccaggagaaaagactgaaagaaagggaagccagaagagaagccaacaagagacaagcaaaggtaagggtttatatacatttatttttccaagctctattaaggtagaatggacaaaagcattttatattttggcaagaacaatgcttataatgttaaaatggaatttaaatcctcttcttttcaacatggattttatatattatttgtatatcatgatattccaatyggattcaagcccatgtggccttctattcactttcttgtattcctctggtgcaggacgaaaaatccctaagataatttgttactgggcttggccccatttactccaccacttttttccatatattttgcatctattaaatacaaaaggcagttgactctgtgggccaggcctgataggattttcatctgtatcatcttcaggtagacagcctgtgtgaacccaacctcataacaggtaactctgaaagcatcagttcagctcttagaatctaggagaaaagcattctgtatctcccacttttactatattctgtaacagatacttttcagcaaatacatatgtacagttttcctcaagtatgtatgtacaattataaacactgtccatgtgcagccatgatttttatctaatgtgtttgtcactgagaagtgttcagcttctgcattctgagaacatttagtagaaatgatttcctagaactagggcccaataacatatgtcatttctcatgctgtatctcattgtgctgtttctgactagccatgatttcttcttggcagttagcaaagctccaactcccttgaggaagcctataatattcttcgtcattttttttccatgctggccatagcacttaagagagcaagtcagagatgataactcatgctatagttctgaagtgggaagcaattatttaatactgaatataagcagaaaagactgcttatattaaatataagcagtattaaatatcactctgtcttcaaaggtgcccaaaaacgagagctccagtgtgtgcagcctgactgctaaataaggtggaggcttctgcatatgctttaacgtgcaggcgtgaaacaccatggcagaaccaccactagatctcagaggctgtagtgggaaagatttaaatttaacaagaaaatcttaaatctaataaaagcatttgatatttatgaatattgcatgttcagcataaaataagcccattttatttcactaagaagctctcatttctgcatatataaatgtaaaatgaaagatataatctagagccaaagaaagccctgttactgtatttcctttgtgtttattcatgcatatttgtatatatattactaaatatggtttattttttatacttattgatggtgtatgctcgatttttttttttcataatggtttaagctgtaagaarttgctatcacccttgagctatcctcctggaaacctcttcttttattcccccataaattggtgtgtatatttggttttaatactgtgtctgctggggaaatgaaaaaatgataaagttgtcacaatcaggcattttcactgggggttgatctctgaagtgaactccttatgccaaactcttccttccatttcccactccccttctgtgtttgtcctgtgtgtttgtttcctgacatctaaaaaaggaggaagatttttcttgtcaagggaaggtctcatttctatgtaaccactaagcatcggactaagaacagaaagaagagctgacatggctttgcarctcagccaggagctttaaatagacagaggctgtgttttattattgctctgaatagtttagctacctccatttcacagcccttttctgagtgctcagagatggtagcccttttgtaagagtgatattaccagagggatcagtggctggtctgcagccaggactcaaacattcctcaagacactgaggactgcctgcagtgacaggttcaggctgactgacagagcccaaggaatgagctcaaaccaaccttttgcacccarcttcctttcaaatgaaagtgacaggggttgaaggctctcatggcttttgaggtaccttttggaagcagacccagaagagattatttggaaacacttggtaaaggggtgatggcacaaatttctgtgatatgtaaggagaaatattatgtaaattatcaggtttctctcagtgcatgtgctttaaatgacagatgtgacttagtttttgagtaaactttgtcttctcgttgatcctcttatgtaaacctaatcattgtgttacttaggatattgccttctgaatcactttagtcagattccaggtagagcttccctttgatccctgaacctacaagctatccagaagatattttaatggtcaaagaaggtggtacttgcagacttaatttaccaggaaatgtagtcatagctgtttatagctattttaagcaatcactgcatagaaactgaaagtgtaagaaagggaggactcacgtagctgtctttctaccttgttttgtgtttcatgcagcaaacatcattttattatacaaggaaggatataaaggacacagtatttttttttttaattttggggaaagtgcttgaatgaagtttcatggaattatctttatttcccagaaaagagaaaacttaatgataatgtgaattttcaattttagaaatgaatcttctctggcatattgaaagtacttctaagaaaaattgctttaaagtgtgagtaggataaactaaagttggaatggacctctcaggaatctgatatgactttttgttaaaagatagatctaagttctgcctagattatattatgtgcagaattgggaatggaagataaatacgaagctgaaactgttacgaaggtttgctgggtacctaatagtggtttgggaaatataggtcttttgggtatcaaaactttctttagcagagaagtacttgaattgcacaatagaattgtttttactttagctaacaagatgtcgtatattcttatgacctacagattttaaactaagatctagaaaaatacttgtagcaatgatcaatagaccacattgctttttgagttcaggtaggttacataatcctggaatacagctttacctcattatctagctaaatttccttttgctttgagggtcacaagtgctagtaggaatccctggtcgctggaatgattttgtataaatgtaaggaaaaggaacaacagtgctgaaacttgaggaaatagatcctcagcaatatctcactactgtgctgcttttgaaaagaaagtgtgatttttatttatttatttattttttaagatggagtctcgctctgtcaccgaggctggagtgcagtgacgcgatcttggcccactgcaacctccgcctcccaggttcaagcgattctcctgcctcagcctcccgagtagctgggactacacgcatgtgccaccacgcccagctaattttttgtatttttagtagagacagagtttcactgcattagccaggatggtcttgatctcctgaccccrtgatccaccctcctcggcctcccaaagtgctgggattatggatgtgagccactgcaactggccaaaagtatgatttattaaacaaaagtctgaggctgatgaaattgaacactgactatgaaggaacaaagagtaggaaagagctcaaacacttaaaatagttaaaagttgctttgactatattaaaaatgatgattatagttcgtatttttaaggtgtggggaaaatatgtcatacattttgaggttgaagttttatagatgtacattttcacttgtttttattttttggtttgtactgtgtttttatttatacttaacaaatagtggttttaggtaatagtttcttgaatacctaaggtaatctctgtacaacagaaaagtagtgttgaagttagagctctcagaataggaggtctgaagaagtagtagttaattaattttaaaactctaggccgggcatggtggctcatgcgtgtaatcccagcactttgggaggccgagatgggtggatcacctgcggtgaggggttcaagaccagcctggccaacatggcaaaaccctgtctctactaaaaatacagaaattagccaggcatggtggtacccgtctataatcccagcatactcgggagggtgaggcagaagaatcactttaacctgggaggtggaggctgcagtgagccgagattacgccactgcagtccagcctgggtgacagagcgagactctgtctcaaacaaaacaaacaaacaaaaaaaaccaccaaaaaaaacaaaaaacaaaaaacaaaacaaaaaaaaamccttaaaaaactaatggacttgagagatgccctggactgactttttaatctactggtcttcaatgactttttctctgactcaacagtagtttcataaagcaaagctaactttattcatttgatattttgttcttcctacttttttggtgctaaaatatcctttcatttatgaaataatactgataattttttaaaaagtcttattatttgacaaagtaaaaacccatttcaccactttaaaatcttttttgagctttttctgatccatgaaattgaagagcgagtgtggcagccactgatctactccaatggttttcagtattatattgagtgacctatggactctcctctccaccccccaccacccccgcgtgagaatattatttgggcaaggctctagggttccatttagtcctcatccagaccagctcaactttattttcctctttacattttgaacttccagggaatattttatttgaaatattgttttccttaaatgtatacatacatagctacatagctaatacttttaaagtacccaaataagttagggctgaaagcaagtgaatgacttgcctaatgtcatagcttctttggtggcagaactggtatatgcccccaggtttcctgaatcttcattccctgttattgtttattgtcctatgccctttctgtatgttgcttttttttctttttctatgtaaaaacaaatcgcatccatgatacatgatctaacgactagtcatggaaaattactaatagcaaatacctttagtaaggaaagaactctgggctgagatctagaaggcaggctatgtcttaaagtttctgggtggctggggacaagccatttatctttctgggcctgttctcagcatgtgtaaaaggttacccctttcatgaagatttttctgactctctcacatattatgggctcctgcttttggaactactcccgtggtcccctgtctagagcaccgccaataattacagtgctgatgtggttgcacttctctctctctttggctctggctcttgttttcctttgtgtgcctatctctcatcacagtgctttgttggctgagggcaggctttctggctcacagttggccatctcctcgcaaacagtgctgaggtcactcatattatgatttcttattttgtagacaaggaaattgaagcttaggaagttgaagtaactttcccaataacatacagctaggaaatggcagagccaggatgcaaatctgcttyatatgacgctgaagcgttgactcttaagcattaggccataggtcatttccgaggtagtcaagaatattcaatttgagagtcttaaaaactgaagcagaagttgcaagtaaatatttcttctcctgaaattgctttccttatccacaattagttctcttttataggtggctgcattgagaaacagaatattaagaagcagaacagaaccataggcggatacagaatattgtgcatctcctattagttactataaaatctcactggaatcccagcagcttaattttttcttacaaatgaaawattaggaaacatttaccattatttccagcccaggaagacctgttaaacataccatattctcatatcttcttgatttttaaattttatacatgttttccctctgcctaggatatcttctccttcattgctttttcctctgaactgtttccgttttgaagccttttctgcctccttcaggccgactcatgacgttcttcctttctggaccaccggacttcgtgtacattattctgccgtgttacttggtgattgtctctcatcactagactataaactccttgagagcagcagctgagtttttttcatggatggcacataataaatgctctgtagatatttgaatcagtgaaatgcaactatattcattcttaaagttaacactttacatgttaatgctatgtcagttataagatccttgaggtctagcaccggggcctgcagaatacagtgaatttccattctgccagactggatgtatctaacacactcagccctttccaagttcctacttcccttctaccccatcttgtgttaaacaaatccgtgaatttgtattaagatgatagattcttaatattaaaacaatgtagtaaactctgtaggcaatcagaatcccattagaatccttcacgcatgccttatttgcgaagaatttaataaattcttaaaggatgagttgtcctaagatgtgcatattgattttgcctttcttccttctttttatctaacttcgagctcctcaagttgcatatggaaaacttgagtgtatggtactgtatgggtggtaaaaggsatactctagggtaatttgatatgttgattttcaccttgcctgtcagctttggaactgaatgcccatggaagttgtgacttcattctgtgatgcagttccttgctcataaatatttgttgattgaccaaaaaagtggatcctgctaaaatgtcttcattggcagtatcatggtgaatgttgcatttgatgccattgaacgtgagtagcctgaataattgtgaccttattcaaatgtggttagattgtaggagagctagcactcagatccaggtcggattgcactccttgactctgaccactgatgactctgcagtgggtgttaaggatgatcttaaacctgttcagggcagccattaactctgagaataagaggaaatttttcaggaaacaagtcaaaccttttacacttggagtattagaccagattaatttaaggcagaattttaatgactatgtcagaatgtgtttattctaatacttcttagagaattaatgtttggtgttagagtcagaatactgtttcttttattaaacttgcaaaatgtactaaccagataaaacttgaggaaaacagattcmtaataaatttgagtaaggtgtaaaaaaaaagggctgtgtgtgtacatatccctttgtttatgttgtagaaaatagttgtattattaagtggtctgatagtctgttcagttgggtggtcatttagatcctttccaatgaaacagcctaaacagtaaataaatccaggtgatgccctttatacttcatcatggttgattcagcttaggtgaagttagagataatttgacatttatatgcttgagttagggatttataggcacatctagcagaacaaattaactgtatttgaatcattgtggtcagtttcattatgtggctgagtctgtgttattccagtggttacatgctctactttgtagagaactgtgcctgtgggtatgtgtggatgtgaccatcgtgattgtggagactgatacttaggatcatttgcctatatttttgtatgtattagcattcattaatggtctaaatgatggttattcttttgactgttagtagtcattactggctgttgtaagattataccatcataatttctgatatagtatacaaaagtctctaagttgaaaaaaacatgtagattctttcctcctttcttcttcttcttgttttgtttcataactcagaatcctgttgcttatgtgaagaaaaagaggcagggctagagaactattataagacttgattttagtaattctcagcctatggtacaagaatctgtgtgggttttccatgttattactaggaaattctaaaattctcagcattgactatacagtgaataagttatctataccatacatatatattatcatagcttaaaagtatgtaaaggctatattaagattaacaaaatatgaacttatttgttttgctaaattcagagtacttttttgtcttgtattttcttaaatgacatataccactgtagaattatcatcttgtaaatagtttgatgttaaacgtcttcctatactgaaaaagattgagaacactgccatatggtatgtaagcagaaacagccatactcctaacacttagtcaaaattgaagacagtcagtcgtagggaggaagaaaagaggaggaagatggggaggaggaagccactattttttttttcttttttcttttttttgtgagacagtctcacttcatcacccaggctggagtgcagtggtgcgacctcagcttactgcaacctccgcctcccagactgaagtgattcttgtgccttaccctcccaagtagctgggactacaggcacacgccaccttgcccagctaatttttctatttttagtagagrcagagttttgcaatgttggccagggtggtcttaaactcctgacctcaagtgatctgcccaccttggcctatcaaagtactgggattgcaggcatcagccactgtgcccggccgccactatttcttaaaaggaagggaaggctccatttcctccatatcttaaaggagaaaaaaagccagtgggaaaaggaaataacagagatggaacacagaaaaagaacagacgtaagtttcctactgtgctagttgatactactgagtgtcaacttgattggattgaaggatacaaagtattgatcctgggtgtgtctgtgagggtgttaccaagagagattaacatttgagtcagtgggctagggaaggcaaattcacccttaatctagtaggcgcaatctaatcagctgccagcgaatataaagcaggcagaaaaatgtgtaaaggagagactggcctagcctcccaggctacatctctctcccttgctggatgcttcctgcccagataaattacctgttgtgacygccctggacgtgcctgcctaccagacacctgatcttgcaagaccattattaaagtctcacatttgctgttctttgcacctctaagtccattcttggcgtttggacgggtgagtgtgtttctcacagcagcactaagtatcactgtcagagactagaaataacctgaattgtagggtagataaattgtggcatagtcatatgatgaaatgttatatatgaaggaattactgctacatccaataatgggcaaattttgaaaacatgatattgagcaaaagatgccagacagaagagtaaatactatgatactctatttacataaaggtttttttgtaaaagcaaaactaatattttcggttagagtttacctttgaggaaaaaagggagtcattactgggaaggagtgtgaagggggctcctggagaacttgagagtgttctaatttcttaaactgggtggtagttacatggggtgtatttactttgtgaaaactcatcaagctataagcctatggtttgtgcagttttttggaggtatgccatacttcaattaaagctcaggagtttgagaccagcctgggcaacatggttaaaccctgtctctactaaaaaatacaaaagaaattagcygggcattgcggtgcatgcctgtagtcccagctacttgggaaggctgaggcaggagaattgcttgaactcgggaggcggaggttgcagtgagcaaagattgcaccaccgcactccagccaaaaaatctctctctctctccctttcatcaatctaatcaacaaggtctcactctgttgcccaggttgtggtgtagtggcactatcatagctcactgtaaccttgaccgcctgagctcaagcagtcctcccgccttagcctcctgagtagcgaggactacgagaatgtaccaccaaatctggctaattttctatttttatttttgatagaaacaggatctctctatgttgactaggctggtcatgaacttctggcaccaagtgatcctcccgcctcagcctcccaatgtgctgggattacaggcatgagacaatgagcctggccaaagattacttttaaaaaatgatgcgggtagacgagatctctttatatgctttcagcctagatattttaatctgtagattcagaaataaaagatattatggataactcttgtaattctagaagcattaggagccttagtccctggagtcattcatattttatgaaagctatgaaagacaattaataatttatgttattcaaatacacatttcttttaaaatccccttgttccaagaagtgtgatgttttacctcctaaaacttacaaaacaatttcctctaaatgagaaaatgagctttattttgactctggtgtaaattaaaatgaagaaattgtattttttaaataaggaggagcgtagtcgtcattctgctgttcagagacatttaacctcctccccaccccagtgagttttagtttctactataaacttatgaggtggtttggtggccttggaatgttgtggagatctctactcttcatgctatctgataggacactaagagctattgaattggcatttatttagaataaaggaacacaagggtgatgaaagggacattggtctgagtgatcattatatgtgactactgtaactttataaattgaaatagatgaatagtaactgaccatagaaattcagaaacatacaaagcttgaaagatcatctaataaagaagtgactatcttcccatgaggaggcatattcatttgacttacctcattcttaccatagattctggttatttatttatttttccatgcgcatcttatgtgaattaaatatttatttatttcctttcaccatctacagtctaaaggtacttagcctctgtaacgtacctggactgtgtctggtccagtactaagagtttacgatcttattaagggggaagtaggcactttttgttaatgtagcctcatttttatctttacttgaggaaataaatcttttatgattccagataaaatgttaaacttggaaaatgctgcagaaatggtatatacgtgatctaaaagttcttttatcaagaattctatcatttatcttctttggattatgagatgattactgttagaattaagtgcagttgttttattttacctatcttgattttcagctatgtacattagttttcccccttactacagatacatttgatttttatttcataaaattatctcatttccttcagttggaaatgatatatattctcaagctcatccatttatttatattagcacagctttctttggaaagtatattatcggaaggcttcagcctcatttaattgcttttaacatgagttgtgcatgtctgaattctaaacacaactgctattgatcccagcctcctggcatccatccaaccctaagatttttgccccactcagtagagctagtacatgatgtttttgtggttggtactttgaggagaacagaaagtgagagaagaaaaaaaatattgtcctctctaagcaaaagagaaaaatgagagtggatgggtctgtaagtccatattgtgagttcatcagtaatgctagatcagattttgggcttcagttcattcagcctttatcatttactgccaggttgttagagctctcctaaaagagcattagatttgaaaaatacgaggtccaaattcagttcttgccagtaagctttggaatccaaggcagtcatgtttcctccgagcctcagtttcctctttagaataacagtagtggtgttgcctgcattgccaaccttccagggttcttgtgaagataatacatgtgttagggctttgtgaactatgaatcacattaaaaaatgtgagccatgattaattagcattagtatacgttgcctttttaggcaggttcgttctcagatacttaggatttaaccagtggttcaatcgcggctggaaatcactgaaagatgtctcaaaatgcccatatctagcttcctccatccttacccttctcccatcagaatcattggggtaggggacttacttacatgtgttcatgcagtatatatgtataattatgatactactactgccccattaagaaccagtggtctatatccatatatagaataaactttatatatatagaatakatagaataaactttatatgtatagaatatrtagaataaacttctatacttttttggtgacagggtcttactctgttgcccaggctggagtacagtggcgtgatcttggctcaytgcagccttgacttcccagtcctcaagcgattctcctgcctcagcctcctgagtagctggaaccacacctggataattttgtttatttttttgtagagatgaggtcttcctgtgttgcccaggctggtctcgaactcctggactcacgtgatcctctcacctcagccttccaaagtacygggattacaggtgtgagccaccgtgcctggcaacttttatacttcttacaaccctgaggtgctaggccttttccacttttggtttggctacacccccatggcagaatgtatactagaagatatgagggtaaatgtaagcccagtctcttaaattagttacaaactcagcawgcccaaactctagttgtctttcagtgtgcctgattgcagtcagtctgtcacctgttgttcttagcctgaccccttttcaacaccatctaaaaccaatgctgggatataagggcatcagaatatgagaggtatgttgccaagagccttgtaaaacacaaggagcagcaggatttggtttctccttgacgggtatacctgtaaatcctgttgtgtgttcagctcagtgttggaggaaggagagagtgcttcgagtgatcacactgggagagagtggccctggtgtgttaggtggaaccaktgctgacttagagggtccgacagcctgggaccctgatttctcatcctggtgatagcagtagatcactgtgtggccttgagcaaatatcttaactatgctgcttgaagtgtccaggactatatatcctgtggggcctcttttagctctacaattctgatttctgtttttcaggagccgatgaactattatctgtcatttttatatgctttctaaccttcccatrtaatatttttgaggtgtgtcacttattctgtatagtatgtttgccagtggttgaaatacagcaggagactaaccatttcggtagaaaggatttgactggcctccttggggcttttggaaggcgtcagatttgggagggtcttatcaggttttttttactggcacacaagaagaataacaggagctggagaaattggtgaatcatagaggatctcgaataccaagttgaagatttgggctgactcaggagagtgtgggggatgcagcgagattttgagggggaatgaagcataagtggtaggatgatcctagaaggattcatttgtttactctacgcatatttcttgagtgccctactatgtgttacccctcataatgccatgatagaattaacctgctctaaggaacccacagtctagtggaggaaatttgtaagtagtgcaatataattaataccatgatagagaagttttgggagttgtctacatatgtaatgattgaatccaaagaaaaaaaataataaaatgtctatttggtattttccatgtgtcgggtagtattctaagtgctaattccatggggagtttaagtaatgtattttaagtgtacaaacttcagctcttgaagttgtaggtaataatgttattcccatttaacagaagaagaaattttagtatagaaggttgcatacctgcttgtgtgtagtggattcagaattccattttggtagttggactckggagagtgaatgagagaaagagccaggtcacaaatcctggggaacagcaacagttaaggaacaggcagatgaaaagcagctaggaaaactggtatatttttcagggaagtatgaaaagggaatttaaaggaggacttggacaggagtgccaaatgccacaaggagatgaagtaggttgagaggattcggcaatgagagtattatttttatgttaataggatcaattttgtttgcactgtgtggtttaatggggcgggctggagcagcttggaaggtcactttggagaccatttcagtagttgagatattaagtcctgggcaggactgtggataggtgaaaagggcattttattcaagaagtatacctgtaagataccagtaactgaatggaacatggagatattaggagagatgagccaaagatcaccctaaggtttccaaaacttggcatatatcatgtgctgactactttaggaagaactaagatctgtaatagaggacaatttttaatagctgccagtattgaactattgcataccatatactgtgctaaggcatgtcatttagtcctcacatgtaggtattatcaatacattttgacagatgagggacctggggcttaagtaaattaaatgtactcaaggactgacatttagtaagtgactccaaaatcttaacatttagcttctgttctgtaaggcaggtcagtaaaagataaaataatggacataattatagaagcaccacttatgactggtataaagaacagttcagaagttggagagattatttttgacttgtaggattcacaaaagaaagcatcccggggagggcatttgagtcaggccctgaagcatcaatcaagatgagtgtttgtgaaagttctttcataataatgaaccgtggaaatattataataacaataagtggggtcaaatgtgctaggttgacatcaaacaaaaggaaacattaagtcacaggttattaccagcagaattttacctggaaagtagagattcttaaagtggagcagtacaagttaaaatagagggttttgaatattaataattataataagtagtttgagctatatatagtaagcagtagtcactgaagagttgagagaagtaggaatgtgtgcttatgtacccagctcatgtttaagtatttttgcatatgcatttatttagtagtttgagtagaaagtttgaactttgaagagtaagccagagcttcatttgacactctaccttgggaaatgttggttgttcaatttaggccaataatttttaaaattgagatctagtctcatccatgataaaataccacactgttttgaaaattagctaccatagtcaagaacctggaagtgaacaaaatgcttctgtcagtcaacatagaagtcatgacacctgtgtgtatggagtacattcattctgcctctgagcaaggcccacacccatacacactaattttcattttagtcattcctaactaacatggttttgtgagttataacactgcggaagataaatagcaaattagaacatgtagtctgttaaaggccagtcccttatcagaaagtgatgaaacatgataatggacagcaaggaaaatgtataggaaaattattaacaaaacagatatcatgactttaaaacacagtggcaggggcacagagcccccagaaatctctctggacccagagggcactactttattataacactgatagttataatgcttttcctcagacatcaaggaaataataacttataatctgtcttcaggcagccctccatatatggtctgacttaaagatctctttcatttgaatggtagcttgaggaaactcctagttttctagatattgtagctttgcatatactgaaccaggttcatttttcttttgcctgcagttcttaagactactgactatatttctttaccttgtcatagaggtttgcagttaggaagaaggggcagaaaaaaattttggggggcctcatgtcatttaatacctaataacaaaggactttcatagcagcattgtgaaatactgtttgtgttatctccatttttcagatgaggaaaggagactcaaagtttaggtagaagggcattctgggtgcaaggaacattatcagtatggctggatgattgaagaccatgaaggtatggctgtggaagagtgaggagttcagtgtagggatttctactttttttttttttggcctacactttagagtaagaaatacattttccatcccttcccgctaacatgtacatacaacattaaaagaaaaatttcacaaaatgataacttaccttattwtttgccacatgctcagaattttccatttcattctattttctttttataaaatgatggtcacmatccactgatggcttcatgatacactgagttgatactctaatgagtttgatggcactggtctaatgttagttgaaagtggattattttatggagaggcaaagctaaaggggtatgttgtggttatattccaaatgttttcctatgccaatgttctctgatatgggcaacaaaagtccttgaatttgtgtcggttgctaacataactatgtctttgtggcagtgctgtaatatgacaataataccctatcagagctccctagcagtttgtgaataactttcacgtatgttatttaattcattacccataataaccttgagatgaaggtaagaggagctttctattgagtttatacagatgaaaaaactgagggttaaagaggtaaatcccctagccacaattaagaattaagctttttttttttttttttcctgactgcttgacagtgagtaggagaaaaagctaaggtaaactctcctttttgaaagtctgggcargaaataatgataaggatggacatggaagcgggagaagttagatgaagaattaaaggaaaacccaaataatggcttgatgaatttacttgtatattaaaagccatgcacacaattctaaactctggttctttcrtttttaaacccgttgtttttttttttgtttgtttgtttgttttagttatcttgtaaaattccagcccatttacctggcaaggccagggcataagattgccattatgctctgtcatggcttatgctcgttttcatcactcatcttctctttgaaaggagctgaattgagaaagcatttttcattgtttaacgttgaaatctaaaaatactgatatttgaacttcagaaacatatttgaaataagacatgtcagcaggtcttttgtcaattgtgaattgttacagatgtgactgagtcttccattttgatgcagattattctgcatttttattgataagctttcattaacattttattttgggggaatttcttayccttctaaaattcattaaatgcataagtcttgctgtaaatttcagtctgagcagactgtggattattcatgtttacaagtaaacttcaaaatcttttttttgacaagcaaagtttgatatgttcaaacttttatgagtcagtatatcgatactgactcaaaataatgctttctgcaatgtgttcattttttaagattttaactgaaattttggcagtagagatttttactttcattatagaaaattatggtaaaatgtggatatgaattaggagaaggctgaaatggaagaacttcattctttcacttgctcaggagaaaccctagagatagccttcacttctttcattcttatactccaccacaatttattagtaaatcctatttgactttatcttaaaagtagatgagaaaatttggtgaagtccatataacatctggagtttagttaatagtaatataccagtgttggtttcttggttgggagaaatggactataaaattacaataggagaaatctgcgtaaggggtatatgggaattctgtactatctttgaaagtttcttgtaaatctacagttatttaaaaataaaaactttattaaaaatagatccagagtttaaccactttttaacactcctgctatccctatcatccaagtcaccrtaatctgtaacatgaattactaattgtaacagtcttctaactagtctgctagtcttctttctcttatcctcccactcttctatccccagtttattctgaattatagtggccagaatgagcctttaaaagtaagtcgcatattataattctgttcagacccccatcctttaagagtttccctgtctactttgtcacaaaagctacaaagttcacatgtgatctagcttccagctccttctctggtcttatttcccactgttctgtcactaactctcttaactttagactgtctaattactcctcaaatgcactaagcagattctggccttcgctcttggtatcaccacatagctatgtgatttgtttccttmctgtctccagatttctgctaaaacataactttactagagaagcattcactgatttcctgatgcaaaatagcaacctcctcttatcctgtattctcttaccttgatatatttttctccatagtacttctctctaccaggcaatatataaatacatactagtttgttgttgcttgtttttactgtcactagaatgggaaactcagaacagggactttgttctgttcactgctgaatcaccagtgcctagaccgatacgaacaaacagtaggtactgagtatttatcgagtgaaagaagcagtaactctttaatacagtttcttgttttcactgtgacacttccaaaatagtgtcaaaattgaagaattatagcatattgtttattgaaaggcataataactctagggatgtttcagaatcctttcagaggcagaacagtaaaacaaaataaagagggggagggctagaaagcaatgttactggacccagatagatattagcacacatggacaatctctaattatacactttgtgtccaagttcatatgtaaactggagcattttttttttctccatagaaaagatgttctatactgtggttgatttccattatcacttaggctgcccatgtaccatacaarcatgacacttaggtgagtgaaaggggttgcagtgactaattgtaccaaaacaactgtcctgggcaaacccaggtatgatcactttaattataactcaaagatgccttcagcttctatgggaaagggcatcctgccctctgctgggggcttggaactctggaacacataagctcctgctggtagaaaaatctgaattataatgtaatgcctcattgcatttgattcatccccttttctttccagcatactctactggtcaccctagcagtgagaaaagaaagaaatatcttttccttccactgctctagaattaaaaacaaatttcagctctgcttcctttgtacccatccatttgcccacaccccaactccatcctcctccttaccagtcccacgaatttaagaaattgagctttgggctgggcgcgttggctcacgcctcaatcccagcactttggcaggccgaggtgggtgtatcacctgaggtagggggktctgagaccagyctgaccaacatggagaaaccccatctctactaaaaatacaaaactagccgggagtggtgtcacatgcctgtaatgccagatactygggaggctgaggcaggagaatcgcttgaaccgtggaggtggaggttgtggtgagccaagttcatgccattgcactccagcctgggccacaagagcgaaattcygcctcaaaaaaaaaaaattaagctttgatagggtgaatgcctccaccttgtttatgtataaaggagtttcagtgagttacaaagaaatttaagttaacaaatgattgcattgctagtagcaatttacaaaaatgacattcattgcgacattctgaatttgccttatgagttaactatcttgcagtaatcttgattcttacttttgttctgtatgtttttaaactcatcttctcagttgtttctgtggataccaaacaatggtacaatattatatcaagataaatcacaaatacatagaagagattgatgactaattgtattcaaagtcaattttacataattaattttccattaagtcgttatttgcattgaatatcctttaagatcattgtgttctatcttcctgtctataaaacaagcattttctttactatgtttggctatttcagagaaaagcaaattgatacaagcataaaatacttaagaaaacagccctcattcccttgaaattagcacttatgtaagtttgtgtaggggggtggaaggatgcgggtgtagtttataaaaagtattttaagttccacaaaatcagggatactttgagataatattctccccaggtttagacagctttggtttgcaaaacaaacttgttttaacagcaaaaataggagtccattttggttcagtgtgctagcttctcaactgacttttattatttctggcactagtatcatttgtttcttttagaagagtttgtaagtgaattgtggcacccagtgggatgtgtgtttgtgtttgaatttgtgaaaatatttgataatatttctctatagcagtgttttttggtgcagatacaaatatgttttcttaaaaatatggatgctaatttccgttcccccccccctcccatttccctttctctcacggtcattctctttcccttccattctttcactttcccactcctcccacctcttctgctctcatcttataaagacttctgaaaactaggaattaccctcgttaaatatgggctgtgttgtgacttgagatcaggagccactgctcaggaggaggcctggaataaaatctgtgagtgtttatagaataaacatcatgggcataattcatatttaaatcatcctgagtgctcacacaattgtgtatgactgtcacatgaatcagtgcaagatcagcaaattttgcattgtcatcttgtgttagggtaatatggtatttaaatttggactaagtggcccttttattagagtaaaaaattgagtcatggtatattgtttttccaggtgggtagacaaggatgtcttaattgtctgaaggtcaagtttgagaaaaacttgacattttgtccataagtaggatgatatttatcaaaaatgagtatgttgcctctgtccccttgggaacaaaagttayaatctattctctttcttccttttcactgtcagctttagatctacagacgtgttatgcctgatagttcagagaaagatgtttttgaatgactaaacaacccctttattatatgagtaagccattataggattgttttcccctcctaatctgtggttatctttgtcttgtaacattgttctgcctgtcccaagcaagaaaccttttatccttccgagaacrccttcttttggacaaattcttttgtggtttgcatcttctcttttttccttataaagaatctcaaatttctttcataaaacctcttcccagagaggttaaatgactgattgtccaagaaggagaattcagacttaaggccctctgacatacatgtacactgtctaggcattttgtttgaaccagaacatccctcaaatgttttatttgcaatacaaagctacttatgagaaagtttagatgtcattatagtttttttacagcacagactgtaaatcaccaatcccaagtaaattactctattaatctttcattcttctaggtattggactaaattggatcaaacagtacatgaacttgtttcattcaaataattgcaaagagtctatttctgttaggtgttgtcgctaaccaagtagctacctacttgacctaagggaagatgcattctatttaatctgcaagattgccgtgagtcagaaggtatattgctttgtgttatgttttcacaaaagtagaaaaaacaataattctgcagtgttttacagccacaggatatgcagtaaaatcagtggttcaccaaagatgactggacttacgggaaaaaaaataccgtgtgtgatgatgattaaaagttgcttaaaataaattttttttgaaaagttgcttagtggaaaaattgcatgacaattagaactgttgagaaacagaatgagccccctcatgagggaagtgtgctgcacactctctctactttagatgccattctcattgaagcaagggatttctccccttagtggaagcttgggtgaaacagatcccaaggcctttcaagacactcagaagctcataattctgttgattactctacattggaaagtaatcagaagcagaaaacaacatattatttagcagagagttatccgttagcatgacagttactttttaaccatttttattttattaatttttttttttttaagttgaggtattgctttgttgcccagtctgttcttgaacttctggccttaagccatcctcccacctcagtctcccaaratgctgggactacaagtgacagttgcttttagagtgggtgctctgagatatttgaaggtccttgagaatagttgtatctctttagtagctctaaaacctttctaacctcctaacaaatccagccttacttgacatctcaaaagctcatttcagccagacttgtttttttttaaactgtcaatgccagaataacggggtttgaattagtgaaatgctgcattacttcagctgagttcctttattggtgaaaaagaggctctggaatcagaatgtctgggtttgaattcttgkgccagttatttaaacccttagagcaatttccccatttatataatgaaggtaaaaatagtacctatttcatagcactgtttgggggattaaatgaagtaacgcatgtaaaggtaccacagctaaagttaaacaaccaataaaatgggattatggagccaggaagaggttttgcctatttcaagaaaaccctaacccaagaaaccatagaaccataaagtttctatgaagcctgcgttactgtgtatgacattttaattctgatttaaaggaaaagagactggctgcgtttagtcaatctaagctggttgtctgacacacacatttccaaagttctaatacatgtattttttaaattagacttgttgtatcttagctctttatctctattgagaacttaatgagtcatgatttgaaagtgcagatcctggtaggaaccagaaggtttgatgggtcacaagcttgtgaaaaattgcaggtacttctaatcccatttttagaactccctgtagcctttttttctgtcattatagaagaacagtttcaggggttgtaaacttagaagggtctstcagcaagagatttgttgttgaatctttaagctctcatcagaatgccttttgtggctgctgatgtgttaagtgcaaagatgaagagtagtgcctgtaatgtactaatgttcatccacaacaaatgaccaggtgtccaggagagcagttagaaaaagagaggatctttgtttccacagaaagaatctaaagctaacatctaatataataactaaggtctgcgttggctttccagttcatgaagcactttcacgtttcgcggtcctgttgattagcttcttactactgccctttataaggaggtggttaccgttgcactagcaggaactggagatactcagtgaggttggaaaggccaaataatgaaactccgggaagtatctgtgggtttcactgttttcatacagatgatgcctagcttataagactgtgggaacctaacttagagtgactaaggtcgttatgtacactagagcatgtgatgttcttccaggtttgcacgtgaagaaaatagaaccttggagaatattatatgttctccgagaatgttaggttgaatctttgaaaagtattaggttgaatctttaagaaatattaggtcgaatctttaaaacattactgataattgactatttcttgataaaaacagtaatatcacatgataggttgaatctaataactatttgtgtatttctgatttggtgttgatttttgtgatttgactcttagaggatagtctttttttcactcatttttaggtccattgggattaccttcctcttaccatgttatatatgacatttgttattttctgtcatcaaatgaggagacagaaggtcagacagcttaagtgactcgtctaaagttgtacataagttatgtaccaggaaaaacctcagacttcaaaccttttttccctctatgccacatcagcagacaaaatggcgaggggcctttggagccatgaggtatgaggaacagttacagaggaactatggatatttarttaatttggctcagaaaatacttaggaagggaaacattgacttttgagacacatagacctggattaaaacccagtgtattgactagttctgtgatcttgaacaagtttcttaaactctctgagcctaagttttttcctttgtaaagtggagctatattagtacctcaactctaaatttactaagaagtaagtgagataacacttgtgcatcacctgttagtacacggcacttacagacttgtccacaaattatttccctctcttaccacgcttttctagaagagagaaatcacatcctttttttgattatcttagaagtcatatcaaagaccagcatatgggtgttaaaatgtggtagctttccttgaagtttttagagagattttagtgttgtcttgccactactactagtagtgtccagataaaagtcaaaaacctcccctataaaggagattcttggtttgatagtggttagtccagctgacctcccaaacctttactacttcttgggttctttgaagaartggctagaaacacagagaacaaaaggccaaagcttggcatgttgtcttcataaacaatcaaaaatattctggaaaattcaaaactctgaatatatagcccccattgtgaaaagcaaaaatggatgaaatcctcgttgtcttgtggctgtttttatagactatatttaacttttcaaaagaatgttttcagattaaagcttggtacaaacttgaatataaatttatgtggttgcttcatatttatgattctttgaaagtcatcagcaccatttgtcttttattttccatgatctagacattattctgggaaagtaaaacatctagtaagttgtgtatatttatagttctttaaatttatgtaatacttttggttatagacagcacgagtggaatctcattttaacgaccaaatgagattccagaagtgttatatccaaatctcaatcacacttagaagcctattgttacagcatagttgctgtaaagaacttcattgaatttctaaaatatttgtacaaatcaagcttgtgttagatatttattgtgttaccaataacagagcgatgtcggttatgcatgatggatttggaggatgcggggtgccttttgaagataatttacactgtctacatttgatatgtaaaagatcwatatttcctaatctaaacttgtggatctgagtagatacagacttcactatgggaatcctgtggaaggcacttaaatagctccctggcttggagaattttgtcttggtaaggagagggtagaaacgcacagttcccatttgctttgccatttgttgtagctttccaaatctggcagagtttatctcatcatttgaagtgaaacagtctaggctgaggaaaataagtttacatcaagaaggcttattaaggcacagctggatggggctagcaaatgtgtctttttccttttctttatcttgcttctgtttgtaccttagtgatttctttttccctccctccttccttttctttcagacgaaggaagacatttaaaggaaaggtttttttmcatctacttatttgaaaataattttcatgacaaaataccaaatttgactgtcattgaatgttatacaaagataggcatattggatttatatacaggacaagatatttcagtgtaatgactttccatttccaaatatggaaaggtttttaaaaagaaaagatagattggaccaaaatttttgtttgttcatgtgtttctccctggaagaaaaggcaactcagctgagatgcactgaagtatcctcttgtgaagaacgagttgcctcagtgaactggagattacatgtcaaaagtttatttgtggatatagatgtgtaccacaccatcactacagcaacagaaagttttcgtgtcttttttcacctattttttgtggccagctactgttatttccactgaattatgatttttatattggttttcttttcttgttttctttccctaatgtggcaatttaattttccttttgaaattaaattatgattatttaaaaaataattctccttgtttttgccacaataacccatcaagtcttatgacaaagacttcctataatgtttcacttggttctttctttttttgacatgttatcatgggattctctatattaaagacttcttagatttattccagcatgaactgctgtggtgaatacttgccttcctttgtcatttggttgccaaggccatatgttagtgcaaagaacttgtgcattagagattaacatagttgtttttttttttctcagtttgaaaacttactatgtatgtgaacttagaaagattatttaactgctcaactgtaatttagtggcctatggtagtgaatagccactaaatgcaactgaaatacttttgctttcgttagcttccatagtgttccacatttggcactaactagaattgaggatagaacactttttttttaccgtggaaattttctaagtctttttttgttttgttttggagacggagtcttgctctgtcgccaggctggagtgcagtggcgcgatctcggctcactgcaacctccgcctcccaggttcaagcgattcccgtgtcagccttccaggtagctgggactacaggtgcacgccaccacacccggctaattttttgtaatttagtagagaccgggtttcaccatgttggccaggatgatctcgatcttctgacctcgtgatctgcctgcctcggcctcccaaagtgctgagattacaggcatgagccatcacatccggccgaaattttctaagtcttctaaacatttggattcattattgtgtagataataagattagctgtattcttacaaagataaacaggtagcttcctatttatataaatagtgtatactatagtttagatccttcttcaaatttctgtagtgaaattaatataggtataatataattttcctaaaatggtaatttctacattgctcccactgataaaatataatggataagatttgcagcagatttgggagcacttagtaacacatggttatggtatttggcctggctattttgatacagaggcaatgttgaaggccccaaaagacaaaggtcctttatttcacctgttcttattatcaagttacttcaataagtaaccttggccctaatctgatgactctcaccagctctggatgggtgacattagaaatagaataagagtgctatctgtgcacaaaattttactaataaaaaatgaattatacattctaatggggttattatgacatggcttctttaaacaagccttgtcagaatgtcccttattaccaggtggccatatcaaaatgttctgttgcttcttaaacctatcaagaccaggtttttatagatattactgcatattttttcagctttaagacatgatgttaaaaaaaattgctagtaactaaaggcaatttcctaacttttggatccttgaagactagttttgaataacactccatttgacaaaatactttcttagcatttgtattggtcagtttaggctgtcataaaaatatacttcagactggatggcttaaataacacatttattttctcagagttttgtaagccagaagtccaagttcaaggtgctgtcaagattggtttctgaggaggactctgtttcaccctcttactgtgttctgacatggcctttcctttgtgcttgtgcagyggggggtgtagaatgatactgatctggtgtgtcttcctcttcttctaagtgtactaaacctattggattagggtcctacccttataaccttattatctgttttaaaggccctgtctccaaatacagccacattgggggttagggcttcaataagttaatttggtggtgggagttgggggacagaaaatttaatccataacagcattgccttatgtgttggatatgtaaaaattaattagacatcatcttaatctctgaagggcccactttctagctcagaagcccgctgtgtaaacagattatcagagtataatctggtaaatatgatagcagatatattcaaatgacagtctcattttagctgggtattgaaaaaaattgtaggagttgatgtgtacaaggaaaacgtaggcacttcggcaaaaggaagtaacatcrtataccctagggttgctctgtagctaacagggaacctcaaggagcatttaaacaggaaagtaacataatccgggtcatttggcccagacttgagacagatgtggaatttcctatttccttaagtatgtaatcaaagctattattaccaagtggtacttaaagctgtatttctagaaaagctttcttctgtgctattttgaagtcttgctgctattgaccatgaattttttattttgtagcctaaggcatttttacattgttctctcttttgactgacctgaaaaaagccttatttttataagtaccacatatttatagacagactcttatgcatctttttgctttctctgaaccaaaccatacgtattgtttaaaacttctccttaatcatttttaaaatactctttaaaccgtttcttaatgcgtcacatgcattgtgagcacaaaattttacagtattaaaaaggattcagtattttatcctctagaaacctttgtaaatagtcaaaagcttgtagcttaatggtaatattccccctcccctccaagatggggaggctgttaagttttatgactgccctccataggatgattgcctttgtgcaagtttttctcatagatctacttagtgatgtggaagtcctggatgtaaattaaagatgagtaagcacagtgtgatcataatggcaagcctgctatttgaggtaaagcaatctgggaaaataagccttataaaacaaggtctgtctatttcataacaggattatagtttggagagtgttaatcctttcaattcagtaatatatagatggttcccaacttaaagatggtttgacttagaattttctgactttatgatggtgtgaaagtgatccacattcagtagaagccatgctttgagtacccatacaacccttctgtttttcactttcagtattcagtgaattacatgagctattcaacactctattataaaataggctttatgttagatgatttcgctcaatgataggctaatgaaagcattctgcacatgtttagggtagggtgggctaagtatgatgtttggtaggttagatgtgttaaatgcattttcaatttgtgataggtttatcaggatgcaacccctttgtaagtcaaggagtatctgtatacagtagtccttttgtgataataagggacatrttttagataaatagtctatatagagttcctaaatgtaatttaattaaaaaawttttttttgccaccactctatatggtgctgaccaatgttgctttatcttatggtagaatatccttcaaragcaaaccagtaggagatccctaacaaatagttgaattgtcaggtctaaatacttttgtatttttaaactctgtttacttcctattggagaagtgaatagcatcagggttgctttaccatgaggtaattatgaactgtggggaaaaaagaaaattagaaaagcatcccatcctccataaaatagattagataatcactccaagtaacttaagagttctctgaagtcattttcttgctttcctataccataaaacctacatgaaatggtgtttgttcaaaatatgcccycacacctttacatctgggaacaggcagaagcattcacattttctgtgctcatttgaaaagataactctcgacgccagggcattccattcatgttataatcctagactgctttattcatgctttaattccacatctgtctcagaaatggaggcagtggttagaaaagattgagcacctagtcaatgaatgttgggctgaaatgagctcagcaatctgtttgactaaagaagactcgtgtttaattccaccttgtgaagaaacrtgttttaaaaccccataacaacttcatggtgacatctataatgtaagcagttaatcctctrttgtgtagataataaggtaatttgaaacatgctcttaagttgttatatgtaaatagagagtcaaatttatttattttcattgatggatgggaagtgagacttaacaagtttcttgtctgtgttaacttttgtttctatttctgttagtactttaggaaattacagagaagtgcgtttcagtaatgtgcaaaaatgctcttggaagaaaggacattaaactatacacgatactatgctttttgcttttgctgggccaatgatatgaccttgagcaaatcatttaaaatytctgggtcttcaacatttcctcatttattcttaaaatgttgcgtccatatccaaagttctgttattcaataatgtctttgtccattcgttcctcttttttgctcctatcatttcaaataatgattatcattaaaatcattaagtattggctttaaaggagcaggaaagggatatgttacggggtttttcccccctctcttgacatgctttctctgcttaaggacactttgtactaattttcactaaaacttgagatgagagacttgactggtgttatttaggtggcaaactggcagaaccagatctagaacccacttcctggttcgtcctatattcagtagaccatattacctatgatgattgcttttgaagttatattaaaaaaatcactgacagaatctctgaaattactactgagaaaacagtagtaattcaagatattattttttgttatatcatattctttcctgcatctgtgcctttccatctgttaccacgaatgaatcgtcccaactgcagtttaaggccagcctctctatttggttgctggatcccatcctctcgtttctccttggggattttgttccaggattataccatgtctcttttgtattagcaatttctccgtctttaccagatcttcttattagtatgcaaacatgttatctctctaataaggggggaagtctctttctagagtctgcattcatcctcagttttgtcacattgatttccctttatagtaaaatgccacagaattctgtatgctgttattaccacttcctcatctctcatctcttcaggctacttactcagcatgttatacctccacttgaccraaacctgtcttttcacaatcagcagcaacttctgtcttatcaaatacagtggtcaattctgtctttattttactggacctctcagcctttgacacagttgtctgttctctccttgaagcccttcttcagtaaacttcaggatataaagttctcctgatttttccatttacctccctgggaactctttttccatcttctttcctaacttctcttctacttccagacttgaagttgttggaatgcttctgagcttagtccttggacttcttttcctctctgtcttcacttgctcctggatgatctcatccattttcagcctttaaatatctttccaatgttgatgaaccctaaatttctatctctagctgtgacctctctcctgagcccctggttcatatatttaactgcctacttaatatttccacttgggtgtctattaggcatttcaaatttatcacaactagacaaattttttatttacatatcttcatcctgatttctgctaaatcagtacctctccaagtcttctccatcatggtatatgccatcattactcaccaggttgattaggcacaaamcttcctttaacataccaggcacatggctacctctgggccttcacacttgatgatccctattctagaaagcttgttctcccccagtctacatatggaccatccgcactctgcctgcttccctcctccctccttcgtttctcaccttctrcctcttcccctcctcccgtaactattgatggctacctaccaattacctgctaattaatatttttccagccttgatgtaggtctctgtcttcattcatctctgctctttctgcccttctgtaactcagargtcacagcactggatcgtatctcagcttttatcctactctacattctcctcttttatgaaactcttcttccttggtttctctaactctctatccccacccatttcagaattattgatcttattggttcagttatctaatgttttgttttctcttttgctgcttgagaattaaataaagtttgccatcacagttctttacttcttattgtacttttcaaagattttcccccttaacttcagttatgatctcttcagagctgacttccaagtcttatgaatggagccccacctttcttttgagtctttctcaacttctacacacgaatgttttgataagcttcacacattaaacatatttataatatgactcatttttcctctacaggtggtctttccatcatgattttgtgaaatttaatgaaattaccaaaaacacgaatcaagcttttttgagtcttccccctccctccctttttatgtccaaattccatttacagacattctaatctccactgctttagtttaatactctttgtcacattgtttgtttttgttgttgtwggtttcatttgtttgttaatgtgactaatgacagtaagcttccaaatggccttcagtgtatcttaatgcccccatgtcactaccagttttttctcaaactcatatctaatcttgtcattctcctggtacctctagtagctcctcattgcacagtgaatacaatacatgtaacctcacagtgtggtatcataggccttccgtgattccatctccattcattgtcactttttttttttttttttgagatggagtctcgcactctcacccaggctggagtgtagtggcgtgatctcagctcactgcaacctctgcctcctgggttcaagcaattctcctgcctcagactctcgagtagctgggattacaggtgcccgccagcacgcctggttaatttttgtatttttagtaggsacagggtttcgggtttcacagggtttcaccacgttggccaggctggtctagaattcctgaccttgggtgatccaccctcctctgcctcccaaagtgctgggattacaggtgtgagccactgcgtccggcccattttcacaattttaatggctcattaaatttcccctgcctctgcccccattttcccatactctgctttgcaggtagtaagataaaatgctttttaattgagttaaaactaacagcatggaaaaatttagggatgtacatgataacaagtgtaatactcccaaggataacctctggggccaaaatttaagaataatcaggcaattcagctaagtcactttgaggtagaaaatcttctatttattacacatagaggtgtagagaattaagggaaaagattttactgggaaactgagacttgagctgatccataaaggaataattggatttggacatgtcaagggaagaaggcaaaattcaagtgaagatacagcagtgggaatagctttcagtgaactaaaaattaatttacccatgtataataccaggtttttggcattttattttgagaaggggaggggataaggggaagggtatatgattcattctcctctgatatctgcataccacttgttggcttctgtaggtgggaagtagcatttgttaatttcttgtatttgccaggcgctgtgaaagatatttaagcctcagaactctaaaaagcaggttgttaaatccccatttgcagatgagaagataaattcagaaagcttaggtaaaatacataaagcagtaccagagctagggttcaaactcagagcttttagctctacagtctgtcttcttcctctgaaaaattatgtgcaaatgcatttttttccataggtcattgtcagtggcctgtgaaaattcattcttcataccagatttttggataatagaatgtaaaaagcctcctataccccctggaaatctgagttcttctaaaaggccttttgaattttgccgttgaaaatccatcctcatttgaatgctgcctgtawcattgctttacttatcagtcaaattcaggatataagataccagaaacaaagtagcttttatttatttggaatgaaacaaatcaaaaccactagacaggagataagaaagatgtttcttcaagacaaacaagcatttttcagttatttaaccaccaagttaagtttgaatctgtgttcttgtgtcgttgttttccagcaaacattattccatgwgtcatataaaactaatctcattcatgactgatctcacccattgctaatctcattcaaaactggtttcatcaggcgaaaattcatgtgctattctggacatttgtaggttatccattacttttatgaccattgttttagtgtaatgaaacattactgtattttgtcttctgggctgccttagtcaccatccttctctattcttcctcaactaaatatgtaactcttggaaaatggtatattatatgaaaacactagaaatggaataattaactccttatttccatgttgtagagtttggaaatacctacaaattagaatatttttaatagagaaaaggaaaattggggtgtttatctataatttcaatcttctgaatgggaatactttattgccatgttgtacgtggcccatttaggtatcatgtaatattttcctttatccaatgtgatagtcaaggctattaataatagaatagagataattaattgatatttagaaataagtacctatttccaaaacagaaaagtaagcattctttttttaaaaaaccttagaaatayttttttcttttatatttgtctgtatgtagaaaattagttgcttgggaaagagttgtttttatttttgctttgttctagttctgtcatttttttttcttaaaaaaaaagaaaaaactgtggtacagcaagtttgttaacgctctgagcagattgctagtgaattctcttgatgtaagaataaacccacactaaccggaaactcatagtctgcttaaaaaaaaaaaaacaaaccagaaacaccactggttagaaatacagcttttggccagatgcagtggctcattcctataattccagctctttgggaggccaaggcgggtggttcacttgatgacaggagttccagaccagcctggtcaacatggtgaaacctcctctctactaaaaatacaaaaaattagctggttgtggtagtgggtgcctgtagtcccagctagtcctcaggaagactgagacaggaaaatcgcttaaacctgggcagtagagattgcggtgagccgcgatcacaccactctccagcctgggtgacagagcaagactctctgaaaaaaagaaaaaaaaagaaaaaagaaaagaaatasagcttttttcccccccactttctagttactaaattgcccttggtttttatagtgttttcaatcagaggaaatgggtattacttgtctgagatagtgttcttaatgcttatgagccgtattttttaggttagatgattsatggattttaatagcctgccagtcacttcatagacaagtcttcttaggagaggaataatgactataatgaaaataaagatatcaaaccatttatattatttttctggaggccataaaccataaaaaaaacctctctgtattgaatgtcaaattaaatttgaataaggggtggcaatactattctaacatgaatttattggtagcatgtctgcacataccatgggtggctccaattatcttaatacttatacttgttcaatatatattccccccttccattagcattgtagttatgttggccaaagagtcccctaaacttctttctttactatacagaagcccaatgatgatctaagtaagtaaaatatactctcttctggttgtaaaggtcatatgccatttgcttcctatagtcagatatagttgttaatattacttgtcttgactatttctatatattccctgcctaacttctctgcgcacacagactcctgaaagactgtacagctgtacctgtatttttgactagggattatgctgcagaatacctatgtcctttcctaattggatgagattggcttaaactaaagcattttactaaggatgctgcatggatgtgctgctgcactggtaatagactagacgtgggatatacataytgatgtgtctgacaagatttatcaaattctatcgtttaaaaaaaaaaaaccactttttttgaaagctaaccaatagaccctggtgttcatctccatggttgaaatctatttttctgcactacaaggtagtatgatttagtgataagaacatagtttgtagctagaagacttgattctagtccagaccttgcccttttaccaacagcatggccaaggtatttaatatctgagccctagtttccttttttataaaatagaaataaaggcccatcaaataggtktgtttgagaattaagggtcagtttagtgaaagtgctttgtaaactgtattgattatacagatgtcagaattcttatttcaggatcttacagtgtttccaggttatctttttcagcttttattattacataatttgtagatgtcataatcacaggagaataaagctgaaatctgtagtgattcataacacatattgcttctttcatctaaaattttaatgtccccaaattttaacttaattgacaattccagttccttatgtttgaataatggaaattttattttatttatgacctagaagtactgtcactgtataaaactctagtgagggattcccacaatggatgaaaggtattattcttttaaacattattctttttttgttgatatttaaggtttttgaaattttaaataataaaacctttaaaactaattgaaaaggtacaaaataaaattatcatctgtgttcccactaatatcaaatgttaacttttttttgcttcagattactttttattaaggaaacaaaatattactgaaaaaaacttttgccaaagtacggatgaccataataaatgtcaaattctgtagctcacattrtaagttgaattacagcaatatatggagaaactttaaaaggttatttaatcatagaatagccatttacctgtgtgcttttatggttgctatgagacaagtagaccagaattacaaagcaaactcacaattttagaagacagagccaagaatgaaaaacaagcatgagaatgagaaaatgtttttgctttgaagtttggcttgaatagccacatcataagtataaatgattgttctggcactttgaagcattataaagaaaatgcaatgcaacataccaattctttaatagttttcaatacttaaacaggttaaggaatttcatttcttttgtagcagagattcaaaaaatgtgtgttgaatatccttataaagataaaaaagcatatagaacttgatataggaccagataatacggaataaaccaacagatcttgggtatttgttatggtatagatgcatggattgccttagtcaaaggctttccctgagaatttcactattctgagtatttggtagttttactgtgtctcctataaggataaatgcaggttcatagaaatgtcttagataatcattatcgattgtaaaaatgaggaaaaaatatgaaatatggaacccacattctgtgcctatacgataatagcctataagtaggctattagttgaggaattcatctatgataagctgtagctcccaaccgtagctgagagagagacttctgctctctagttacttcttgggaataacaaatggtgtctgtgtagtaggatttatcagtggtatgttgcaaatgccctcggctattcctattccagagccgctactttgctctcaagtcctctgagtgttacctggttcctgtagtgctgcagcatcctctttttcccccattgcttcaacatggtacttgctgctagaatgagtttttcaaatgccacttaaaaaaaaaaaaaaggcctctaccctgcataggggtaggttcagaaacccgtggagagctcctcattcattaaactacttttttcaacgtaatatgatcttaccctacaatcctgccagaaatttacttgtttattacactgagttctattccacagagaattgggggagcatgtgagaacatttataataaaataatgggtaaatatatttagaaatgagggaggaaccgtggaaatactgacataaagagctgaaggttgagactaaggaagaaatcccacctgtacatgccatgcctgtagcagctgaggttaaggtttagctctgaactgctagatgtgacctgattttctgcttcccctcccagcaggcttctgctctagtgcatgcagcctttctccctgctctccctctgtgttcgagaccatttttgtgtgtgtctactgactatctttccatctaccacttagtttttaaattttgtctcaaatccacgtcctgcctcttatgaagcccttgtggaactcctttgaccgctatagcagttacactgactgtgcagcaatgtggggtcttcattaagcattttggtgacaggaattatgttttaggccagcattctcaaaaagattttaagcattttgaggaatttttacatttttaaaaaactaatcttttggtttttccttcattctcatcatcctgcagtggttcctgtgctcccaactttcttccagacccttgaaagatcatgtttcactctcctcctgagcccttcacaggcgctgtgcagggctgaggttataacctagccaatgaaatcatgattggctggcagataattaagtctgtctatccagttgactcttacatgtgcagaaagcatttatgaatgaacaacacattctttcaataattagaactttccatcgtggaccttctcaaattatatatgactctgtggataacttagccaatatgcaaagaaaaagaagacttctcaaaaaagtgttccaattctgcactttcttgcctcaaagtataattgtaaatcagtccccaccataatgccgttactcttgacattatattacatattgtggttcargaatgaatctcaagtcagcacgaacccggtcctctaaagtatgctacacgtataaaattggctgtctgatcacccattgttgtcataatttacactcaggattgtgctagttgaatttgtgagcagcaggcatggagccagaattctccagaacactttgtggggagggcrccgggaagagtgaagagctaacagggtagtataaaaatccccctaaaattagcaaagatgagtttctcagacctaacagcagtatcctcaatttgttagtattatcgatagcttcttaatgtctccaaccagaaaactgagagacctggaaagcctgcacatggatctgggaatatgctgcattgtcttatgctttatktagtagtcagaacaggtgttgctgtagttcggatatttgacccttcaatcctcatgttgaaatttgatcgcccccgagtgttggaagtgaggcctagtgggaggtgtttgggtcttgggagtggatccctcatgaaaggcttggtgccatcctggtggtaacgagtgaattctgagttcttgctctattagttgtcaagagagctggtgaaaagagctggcacctccctccctctttctctggcctcctctcttaccatgtratctctgcacaagcttgatccccttcccctctggaggcggtctgaggctctcaccagatgcccagtcttccagccaacagaattgtgaaccaaataaaccatttttctttagaagttacccagtctgaactattcctttatagcatcacaaacggactaagacatatgatttcatatcctttgccattaatatttttaacctcatttgttgrtgtttttcttcatttgcattatcctgtagtaatgcccgtgcaatcagcgtttttaaagacatacctgaaataattatcctacatatatattattaatttgaaaatatgtgagtactattattaatagaactagtgaaaaatatatttaaaaaggggtttctaaattcataatagtttttgtcattgtatatgttctcagataacaagtacaattatcatttgggatgagatggggattgacgaatctataccattcttttaatgatgaaggaagttcttatttctaaaaggttaataaccttggactcagaatttagtccaagtttccttagcatgtgtacaactggcccttactattattctcacctatccttcactgttgctctactaaacaacccctgttccttcctgcctctccatctttccctttgccctgtaagttccaactcatccttaagactgtttagaatcttatatgtgaaatcttcacagtcctcttgatttattttgtgtgtatgtgtatgctaatatagtagctctattaacaggtattttactctatagaagtctttcatctactgacatatagcagatgatcaataaatacttgctgaagaaaggaaggaaaagatgaagtgcacatgacagttcattaacatgtatagtagcttcttaatatagtgatagtttaggattgatttgaagattattcatatcattgacttggtagtgcagattttggatggtaagggatatttggttaaattgtcttttgtggaatgaattttgtattaactttattaaaaataattttatattaaaacccaaagatttgggttctagctctactaccgtatttttctactaatcctataattttcttatctgtaaaatgtgaaattctaacagattttcattcattcatgttttcattcattaaatatgtgctagacattgttattgttaatttttaaatgttaacccataaataatgatattgttccttctcataattatgcaccatgtttgtgttttccttatagcagtttattttccttatttttttggagggaaaaaattaccttaaaaaaaaaactgcacgaaataaactgtctttcaaatatgtcatcgccagagattgtagtctcaaatatttatctttaaataattacatatggataggtgatttaatcttagtcyagcagctcaatgatgtatggaaattctttttgtcagtcccaccgggggagcattgattgctaaacagaatattggggactgatatgcaagattaggtatttcttttctccagagaaagtaatagaaaatagaaatttcatgcaaatgtatgcagtggatagttagttatgattcccaagtattcatctacccaaagtaaatgtctcctgtgcaracaaaatattttctttgattttgtcatgctgaatggaaaactgattatattaaatgttcccctatcgaagtccacttgtaaatgactgcagcaaactgtaaagrgatggaatagagaatttcagcacttgaaggttttcactgcacaartgaattttatgaaaatctaatgatcagatgttaattatgaactagttaattggttttcttgattaaaaaagaaaggtgagagcatgagaataatacactttgcatgttttagcagtggagatagtagattggcacttagttttcagataacaggaagactaagaattaggtaatagtgcaattgaaatacctttatgcattctcattgtctttaaggtgaaggtggtaaagatgtaggaaattgatagttactaaaacgttcatcctttctaatacacttgagatggagattcttcagcagaatattaaaagatgtgtttatacactttaaagtgagttatcagtctttttcctgattataagccattgcttgttatgtgctacagatcatgactaattttaatgtgtaattcggatgaattaaatgtgaaagtagaagcctaaagtgaataatggagcagatttaagaaaattatcatggcatatcttagagccatttctttaatttttgtaaacacaaacttaattcttctgttgccgaagtgtcatgggaaaataacaaagtcaatagaattcaaaatgcaaaacgttaaaaatggtattttgctcatatgggcatactcttttgtgttcttttgtaaaatactttgtcataaaaaattaaagccttcagtaaaggacaactatgtgactttttaataaaatagttattatgaaattttgagggcactcgggcattttataactcattctcatttttgaagaggaaaaacgtcctttactactggaaagagtattataagtgattgcttttttcccttttttttaaaacggaaatttctcacataacctaggtagaaacttttgtaggaaattggatttgtagttggcatttgctctgttctatattttagatcataactactttggacaatttcaaaataaaaagatggaattttaggcaacttgtaatttaagttcagccaggtttgaaatatctgctgtgatttatagagacaagctttgacctggctaattaacaaaagcgcatactagggccaatcttacaaatgcttggacagtaaaattaactccgttttaaaaggtgtaggtattctcttaaactcttcaggaaactttgccagagcattacatatcatcactgaataagtgatttttttttttgcttgtacttaaggtgtgatttgtttcttctgagttattagttcccttgtgttatatccaagtctcctttgggtataaactcagtcaaaaaaaaagctcattagtctcttattaagtgatcttttcctaaactctgagtgttatttcctagcaggtattaaggattcactagttttccttttgttgcatattatatcatgactagatcccaatttagttttcagaccataaaggacttatatttctatatttcagtaatacatatcaatattgattttaacgtcttataaaattaataccttctctatatctttactgggatttttgaaagatgtaactaataatacaagtttacttaataatattgttgtagcactagtctttagtaattgtcaccaaaaatatttgaggaattttaacccaaaattcagtagttctgattaatacagagctagtagcagaggaaagatcacaagtcctattttaatagcgtagatgcccagataccaaccacatatgaggcttctgttccaattgtcctgctttcagaaaattcaggaaagtgttttcagactaatgaaaagttatcagcctgctgcccagaatactaaattgttttcttcctttgtggtgatagtttgtgatttgaaataaaccatttatgccaaaaagaaagttatatcaacttcctctttgtggcaattcactmtttaccaagcaggactggaatgtttgtatacatcgtgccacccaaatgtaatcgttcagaggaagtgactcagaactttaagatgcaaattaattgaaagtgactttagtaggagatccactttgccgtgactgtattatccatcttagatcataggcgtaagaattgttacttacatacatctactatgaattgttatagagcaattcttgttagttatttatatattctaaagagtactgacaatggacaccgatacatttaaaagcaaaacaaatgaacaagcatgcttgtgaatccaacgtggcagatctctgtagccccttaatggtatttagaactggtgatttttttaaagcattagtccttcacatattttttttttttcttcctgccaatgcgtgttttaactgtactctctaggcttattgtggaaggaattggtttaggcacattttctgtgrtgtgttattgtgagtgataataaatgcatatactggtatctgtttagttgccagtctcctttagctcaggatgctaacccatacatgttttagatttggaagttgtctgattggtactgtattataaaacaatctagagtttattgtagcaagagcattcctggtttttagcagaatattcactgagttctgtttgaaatcataatcattctgtaactgatacatatttagaggaattcaagccagtttggtattatacatctgtcctcatatcttagttgcttctctgataggaaggaaaggtaatttttattgagtgccttccttgtactgaatgcttggtacacatataatccttacatgatagtgacattgtctggccttgactagaagactaagaaactaagtgtttcagttgactggggggaaraaaaatccctgtagagaaataggatccaaaagagaaaaagtagaaagacttttttttttttaagaaaaaaatgataatccaaatatcagcttttaattaagctgacttttgaccatagagctctttcaaaaactttttaaaaaatttcttattacactttagctgagagaaacagctaacattcctggctttttaacttctttaaactgaaggtaccttccaagtgactcaacaccaaaaacaataaaccttttatgacttaaccaaggaagcacaaattatctccaaagaggcggaaagcaggccttacaagatccaggaccacccccaaagacagttcaaagaaagcaaagtttgactagctgcaagcaggggacaacccatgtttttgcttggcaatattctctagggtctcagcttcccagctgactctccacacaaaggcctgacaactgtgtgccccatggatggatgattaaaggagacagtgagatrggaaatcaaaagctgtccatggaagggaaaaagatcaataacaaatgggtacccaaaaagttgagtcacacaaatatcaaacccattttaaaaataaatgtttcttttttctttccccttttgtgttaaaggatttacgtctccaagggactagttccttggcagggaatcaaacttctaggccgccaaggtgagagtgtggaattttaactgctagactacaagatggagtggcgttctttgcaaatcccgcaggggacccgaggcaggtagtttgaacgtacaaaggattttaactttgttttaaatctgatttctgctttttttttttaagagacagtctaaggctagccatgacactaatatatgtctttctttcagtttgatcctcccataaatacaaataaggcaactgctgataatgtgagttctccggagtctttttcaaatacagaagtctttttaattcaaaggaaccatcttccagccactgacaattaggatttccartggtgtattattctagtatcaactcaatccaataagcctcttcatggaaagcccatgaagtaattttctaggtttcgaataaaattttaccgtataagcaaaagctgttcctagagagggtatagaagagatagttcccatgatcctccaaaaagttcactccccgaaataggctaagaaagaaaaaaactcttgttgccacagaagtcaaggataacatttgtayatacagtgcctccagtatcccacaaatttgtgagggggctgcccatcacagacccattaatccatgacactgggtaggcccacctaggattggactttcccaggactaaccagacaaaaagaatcgagcctttttgtctggactaaccagacaaaaagaatgacaaaagcccgctatggaygggacttaagacaaactctcctgaggtcttggcatattcagaacaaagagtaggctgcttaatatgttacatgtctcggagttcccagtcttttcaggctggccaccagacatgaccgaaaaatcatgtcccctagagggtggaaaccaagagcaggtattcctgtttggtcacaaagcaagctctcaaggatgtaaaataagatgagagggacgctttataacaaatgacacagaaagacagagacagctgaaaagctatttgtgggaggaaaaggatcagacaatatgaatattcatgttgaaaatacaccagaatttctacacccaagtcaagtcataccaataattttctcccattaatcaaaattttggagaaaaaaaaaaaaaaaacaagcgagatttctaccatccactcaaccagatyccatatacagagactgggagcctgactggtaagaaatacttacactcttgctagcttgtcaggctctaggttcacttgaatgtggcgtccagaagagcagaggggctttggtatcctgctcacrgtgtcaaaagagtaggggcaaatagagaacttcccctttgccttctgaaggtttgttgaaagtcagctgacaaaaggtagattaatagaagaaatggcatgccagtttattaatgtacacacatttgcatgggagtcatacaaaatatgaactgtgtgtgttaatctcttcaagcaagccaccagaaatcctagtattttcaaatgtgcattgaacacaagaaagttcagaatttcagctgcaacttcgtgtctctgcgttatctctcaatctctattttattctcactttctcacttttcaactgcctgtagtttctgatcatataaatgcactggtctatatcaatcccttttctctgcagtagttctggaactatctttattgggttttttttttctcctccccccaaccccccgtgttaagttataaattactttgatttttccaagtggcatttcttaacattataatcctgggatgaaatttatgatgcctgaagacagattttaaaaccaattacagagatctcaagagtgtattgaatatgcttgttcccatacttttgcatttcaaaataaacaggaaaagagggagatatatggtgttgccacctgtttatattttcacattagaaacacttcaaagcatgcacagctacctttttttttttttgtaaaaagaaaataaaatagaaaaagataatagaatacaaggaagtgctttcatatgatagttggtacctttgtgtcaccataaagacatgcacagcaatattagaattattttgtcatcctaaactttacctttacctggtgatacagtttgaatatatgtccccaccacatctcatattgaattgtaatccccaatgttggaggtgggggcagatgggaggtgtttgggtcacaggggcagattcctcatggcttggtgctgtcctcgcaatagtgagtgagttctcatgagacctggctgtttaaaaatgtgtagtaccgtgtcaggtgctgtggctgacgcctgtaatcccagcactttggaaggctgagatgggttgatcacctaaggtcaggagttcgagagcagcctgaccaacatggtgaaacctcatctctactaaatacaaaaaattagctgggcatggtggcacatgcctgtaatcccagctacttgggaggctgaggcaagagaatcgcttgacccaggaggcggaggttgcagtgagcttaaaatgcgtcactgcactccagcctggacagcaagagcaaaactctgtctcaaaaaaaaaaaaagtgtggttcttccgtcctcccctcgctcctgttcttgccatgtgagacactggctctccctttgccttccactgcgattgtaagcttcctgagacctcactagtgtgatgcttcttgtatagcctgcagaattgtgagccaattaaacctcttttcttataaattacctggtctcaggtatttctttatagcaatacaagaatggtctaatacacctggctaaaataatggcttcctactacagrtattttgactactgagaaatccaaagatatatcagctcagaattccasgtccagtccacctttctaaaatacttaaagtcctctgctttccttctgctaacacaaacaatggctactgctgtcactgactgagtgcctgcattagccaagcttagtataagacactttattttctcattaggctttagagtcattagttagttattaataccattttattccagataatgaatctctggtacagtgaggttgatttacctaaagttgcacaaccggaatggtggacccaagatttagcagaagtaactaccactgccctgtatattcttcccatacatgcccaagtttgccccatacagtcatcaggttagcagtggaattgtacctggttgggagactctgtgggagttaataatcctgcttcccaagctgtatcctctggcaagggactgtctctgctcgaaagaagggtgacttggtacctttactagttatgtttccagtatctaccttgtatgtgcctacacagttcatgtcttgtgtcttcgtttaygctgtaccatcacctaattgccctcctcatcacctctacatgttccattcctcatttaccctgagcgtaagtgaaatggcatctccttcatgaagtctttcttaatatctgccaccaccaccaccttgtcccagtaccagatctagccttctgttggcctagcctccctagcattgtaattatgtcatttcccctgtagaacatatrtcactgcctccttcgttttagaataatacatgcccctgtgttattgactgtttttgtctggaagcacttttagagcatggaacatatttggtttttctttgtattccccaaagtcccttaccatgcgtacatcatgcatagtaagcactcagtaaatacttgttgcgtgaattttttgcacaagctaatcgtagtcctagatttctaaaccaagtgagacaataagcccattgttctttctaagatttatgttaaaagatatttgtgtgatttaaagtttagcttccatatgtgtagctaacttttcattatagaatttattaccaagtctaaaactgtgagcagtatatatgagcctacgtacgtcttctgagacattttaccctgcatcctagagtacagattttttagttttgtgaacattctggggttatgttggaatgcgtctataaataaagacttcagaaagcatccctttgctccaaataaactgcaagctcataaacatgctgtagtcttaaatattttacttgctaataagcaacttctctataagaaatttttcctctgtggctcttttcagaattataaacaagaggaaagataggccagccagcacaaatatctgaaaggcacaaatatttcattaggaataaccaaaatgttttaccacctatctagggattttgatatctagggtattaaaaaaagtcattatggaaatgtattaaatatcttaaaatatactaggtaatgttggattctgaaagaactagagcaaaactgtctgtgggcatttatgaaataatgatcttaagcagccagtagaacttgtggataacttcattaatatttgacagaataatgaaaggactgtattgttctttgtgtagaaagatgatactcagacataaaatcagattttcttagtgtcagatttcttagtctgtcctaattcttctcttaagttctgttactcacatgaccagttttcatgagactcgtgtcaggaatagagtctctaacaaagaatttactgggggttgattgacacacagggctctaactcatgaaatgtttcttttgaggccacagaatatatctaaacagcagcataaatcaagagttcaaggtgtgcagtaatgcttgtggccagaggcttagggcacaaaacttcatgcctacaagctatgtttgagcattaacaataactggacccagaatcctgagctaacatacctttggatttcttaagagtgaagttggttcttcatgacataatgagaagagggtggactttggagtcaaacgtactgggatttcttcccagctctataaactatgtcattgagaaagttatttggcccctttaaatctcagttttcaaatctgaatttatgtaatgggaatattaacactttctatggttgtagcctttaccctgttgtaagctaaaaagttaaggattttttttctctcattgaatattcactttgttaactttaagtgagtataatttctttaaacctctctggcaacgatgggatttgaaattgggaggtgttcctgaatgtattgagtctttgcttgagttttttagctgatgttaagatgctatctcttcttcctttcctttctaatttttctcttattgtgtaactagattgaccatttcagagaaattaaagagaatttttacattattaaataatcctttccatttgttaagtagaatgtaaaaaaatttgcacctttacattaaaaatcaaaataaccttaaatttttttattttttaaatagtgataatttacgtactgtaaaattaaagattgctttggaaaacaggcagtcttcaaaaagttagtcatagagttaccatacaacccagcaactacaatcccagctgtataccaagagaattgaatacatgtccacaggaaaacttgaccctgcagacccttttgaagaaacagaattctgtggcttttaatattcataatgttgtgcaaccaccagcaccactatytaatttcagaacattttgacacccccaaaaggaacctagtaccctttagctccatttaattccctttccccctcatccttggcaactactaatctaccttctgtctccatgatctgtctattctagacattccatataagtggattcatgcaatatgtggtcctttgcgatgggcttctttcacctaacataatgatttcaaggctcctccatgttgtagcatataccaggacttcatttcttttcattgatggtacatttggctttccatatctgtgagtccctcatccatggattcaaacagacatgaatgaaaaatagttgaaaaaaattgcatctgtactgaacatgcacagacattttcttgtcattatttcctaaacaatacagtgtaagaactgtttacatagcccttataaaatattatattaggtattataagtaatctagagacgacttaaagtatatgggaggatatgcataggttatatgcatatatcatttcatatcagggacttcagcacccatggtttttgtttgattctaaccaaccatggatactgagggatgaccataaagggttctggaaccaagcccccacagataccaagagacaattttattccatcgtatgggtagcccacattttatttatctagttaccatttataggacatttatgttgtttccactttctgactgttataaataatgctgctatgaacgtttatgtgcaggtttttctgtggatatgtattaagttctcttgggtatatacctaggattgtagttgctgtgttgcatgataactttatgattaattttttgaagatttcctattttccaaagcaaactgctctttaattttaaggtccttgttttattccactgtccttgagtcattggtattataatattgggaagtggaagggagagaaaaaaaattttttttactctgatttttctttttataaatggacattttatttaaaaccagtgagttggaaatgaccctattctattagagcagggagtcagagcagggtggtttcaacagaagcgactgaggcctctttacaaaatgctaaaggaaaacaatagtttttggttggaaaccaaaatgttcattcagtgacattccattcagtggtatcaaggtgacattttttttggcaagatactctgtcatggtttgtaatttttacatttgtaggaatgttttccccactatttagtgtttctgcctttttgaatgcacatggttaatggattttcacattctactggattcattcatatgcatttgtcaaaacctgaattcattcaattcatttctgattttaaattgctgtttatttttcaccaaagatgagccagttttagtacctgcaaagagtagtttttcaatagctcactgagagaaatggactgggttcctacttggagaagtgatgataaattgatggaacaaaccatgaagaatgtagtaaatcaaacatgcacatgactgaaaacccatctcctctgtttatttctctgaagatagatctcaactagttccgtcagggttttttttttttcccctgagatatgacagttttggccaaagattgaaaatgtagccatgtgccagagagatatatgagcctactaactccakggctattttatgaattatkgaaatgtwactcttacccttaaaaaatgttgcatttgtgcttttattctgtttttctgcttctgagcagcctaagacttgcatatgtcaccaggcagctgaaacctaaaacatgttcaaggctttcagggatgaatgaccttaaagctcaggatagtctaatttgagacctatgttcttattatcagttcagcccygagcagtagtaactgggagttgcgggctgcccgtggactctttgaaagttatggctctgctctccccacaaaatgtgttatgtatatttactttatatttttcatattgtttcaggggttttgtggcttccaggaaccccaggttaagaactcctaatctaaagctctcctgaacctgttataatagattccatacaaagatcttttagagttttaaaaaaatttcatctctttaatttcaaagatattatttattataaggtactattagattgtttaaggggggggggggttgaaatcctgtgatccagtcccaccacctgaagtttcctctatatatgttttttatagtacgttctttatattctactaactcactgtgaacacttttaaatgtcattaaaatattatatgggggagtccttttttttcaatttacatacagtacaattcactgtttgtggttcacttctatgggttttgacaaatgcatagtgatgtatccatcgtaatcaaagatgcagtgtagtttcatcacctcaaaaatgccctcttgctgcctcctcctgatctattttttgtagcgatgtgtgccttttctggaatttcttatcaatgaagtcatctcatatgtagcctttggggtctggcttttttgggtttagcaaggtgcatttgagattcatccactgtattaggctgttgttgcattactataaaaaaatacctgagacttggtaattggctcatggttctgcaggctatacaggaagcatagtggcatctgcttctggggaggcctcaagaagcttccagtcatggcagaaggcatggagcagaagtaagrgaagtggggtgaagtgacacatacttctaaaccaccagatatcgcaaagacagtaccaaggggatggtactaaaccattcatgagaaatctaccctgtgatatccgattacctcccacaggctccacctccagcattggggattacaattcaacatgaggtttgagtggggacacagatccaaatcatatcatccatgtttttgtatatattaatcctttttttattgagtaatattttagtcatcaaactatttactattaatacctggtttaccatgtagtacttttatttaccttcctcaaaaactgtggtgcattctaacattgatactcctttgagccttaatcatttatttagtttcaattatgttattttgtgtataatattttatatttttctagtatgatacactgcttccttagatgatgtaaatatttcacatttctgcttatgttagaatttagagaaagcaggaggggtccttgaggatatgactgccaaactgctggaatgtcttttcccagtgtgcacacatgggttgatgataaatgttagtacaggcaccatcacatgcattgctcttccagtgctcataacagccttgaatggtagatgtcagtgttcagattacactgatgaggaaacagaagcttcctgagttcatggcctaaggacacacaactagccattagtggatcagaagtcaaattagtgtcttgtgactcatctcctattagagtgtttattattgtaagaaaaatagtgaactggacttggaatttttcttttacttaatatcttatttagtgtaatatttctcagaaaagacaagaaataaagatgatcaataagatgcaccattatttaatagggcgttatgaaattgtagcatcatcagtatcctgttgggctctgtgaaatattcatatattaagaaagcaagtgagtaagcaatttaggaagaagaatgaattttgtgcaaagcagccttagaagaaatctcattttgctaaaagtcttaaggttaaaatgctgaatcagagtccttaactggcatactgtgtctcagattacattcttcttttataccaatgctcagcacccaggaagtgtgcagtaaacagttgttaaatgaatattccaagttccgaagatccttccggttttggaatatgctctttagggcttttgcatattcatatgccagccctttgcctgccattcttaactttattcactgcatgcattatttatatcacttcctcatagtccttcagtcaaatatccccattgttttggaatgatgaggaaaaaaataaggtattgagaggaaattgtgtaagtgctactttattgacaggaccaattctgtactgaggtggcgtttgtctgaatttacctgtttgttccttgatatggcttttatccttccccagcatcctccattgcctctttttttttttttccttttttgagacgatgtcttgctgtgtcccccaggttggagtacagtggcgtgatctcagctcactgcaacctccacctctcaggatcaagtgattctcctgcctcagcctcccaaatagctgggattacaggtgcccactaccatgcccagctaatttttgtatttttagtagagatggggtttcaccatgttggccaggctggtctcaaattcccattgcctctcatcccctcaaatttctacatggttaggtggccagagctgaaatgtgttgccttcctctcatttgctgtgtcaattgtatatattaatgctgggtgttaggaagggcagagatgtttctgggcaagatccccataattgtaggggatcaaagttggggttttcaagtacacttcagccagtatatattagagatgcaccaaatacatacacatttggccatatgccaaaggatcaagtatataaatcagtattaacgctataacccaaatcaccattatagaataaatttctaggaggcagataaactaaaaatattgcaaaatatttttgttaatattacaacattattattaaaaagtgatggggccaggctgttaaaatttaacatcatggtgtgggaaccataatttctcagcactgtcagttgctcttgtgtttcctgttctgcacatctgccttagtaaatacatactcactttcagtaatgcatttaataacatcactaaccttttttgtgttcataattcagaaaaaattttaatttcttctctaaataatttagtgcctaggatttatagcttggggaaatctcaaaatcagtctatctttaactactgaggatggtcagctatccatagcaatcaatttttattttaaatttaaaaactatgaagaattaatgcattcttggaaagttgttttgaagtttagtggaaacaaaatgtgttttgattacctcacttttctgtaaaattttctttttaatctttacattccttgtcggaatcaaaaatagtttataataaattttggaatttttcctcttcatgaaatttcaaagttgacattttgcttttaattcatacaatatgggaagactttaagtcctaaatggaattaaataactaaaatttcaattcagttcttaaaggttattttgtttttatgaatgctgtatggcatgtaggaacgtaataaagataattctctgtatttaggcttctaatatattttctcactgataatcactgacagcctagcatgactagggcaacaaattaggaaatttgttttaaaaatcaggcagtgggtctctaatacattaaatatgtttttactcttgtgtcccatttatatttggtgtcagacaacagacattaccatgtactttgctgagttctgggggaatggaaatgaaaagtgtgttattatgtagcatattttagggtgttactgtgtgccaggtactctaagtgctttacctatgttgtttcatttcacctgcacagtcgtcctgtgaaacagatgctttttacaagttttactgaagaaacgatgcttagaaatacttgatgacttgtgttatcaggtatagtataaagaaacatgtttggtctttgtccctggttcctggacagaacacccttaaacccctgggatttcctgagtgacaggagtgtctctggttttacttaagaagtcacctttcagcacttggcatttatactaatgaggtggcttagggtggcatctctagatagcttcagggtagaggctggttaccagaaagaccaaacagttgattagagggtggagcttttagccctattccccccacctccctggaagggaagggtggctggagattgaattataaaagcccttgaaaagtgagttcagagagcttctgcatgggcagacacattcatatgctgggacggtggcccacccaggaagggcatggaagttctgtgccccactcccgccccttcccttgtcctgtgccccactcccgccccttcccttgtcctgtgccccactcccgccccttcccttgtcctgtgccccactcccgccccttcccttgtcctgtgccccactcccgccccttcccttgtcctgtgccctactcccgccccttcccttgtcctgtgcctcttcctctggctgtttctgagtttaggcctccataataaatgggcaatcattaagtaaaaccctttcctgagttctatgaaaagttgtagagaattatggaacctgagaggggcctgtgggaacccgtgaatttgtagtctactggccactggtgtccgaagtgtgggcagtcttgtgggactgagcccttgacctgtgggatctgtgttaagacactctgcatggttattgtcagaaatgagttgtattgttgggcacctgttggtacctgttggattggtgtgaagagacaccatgcatttgatgttagaaggcaccacaacaggcaagaagcagcagagggtgttccaggagagaaatagcatgcacgaagacttgaggtggaaagaggcttgactagtgccggtatctgaaagaacgtgttgtaaacaggtgtcttacattatcacatgtgagatttgaaatctatttcagaattctaattacaacacagaattggagtgatcagaattggggaaagaatacttgcaggaagacgtattaggcagctggcgcaatattctaggcaaaaaaaaaaaaaaggcttgggggccaaggataaggaaagtggagattaccacatgtaaggtatcataggaaacacctgcatgttttacgaagcttataaaatacacttgatactggaaaaaacaaaaacactgtataggcacatccaaagttttaatgatgagatttgagattcagggtgatgtaggagaaaaccccttgtgtatgtccaggtttgtatgaccttggtaagtaatttagtcatcagaatcacagttttgtaatttcaaaaatgggaacaataaatctttttgacctacttcataggctttgaagatcaagtaagataatctwtgttaaagcactttgtacgtttgttgtaggagaatgccacatcttatttgtgtttcttgccattatcaaaaccaaaacaaaaayaaccagtcaggtaacatttctgttttgggatattttcacctgacctacttgtaaatgagttttccaactaactgttttaagaaaagtcattcctgttttaggtgaagtaatttcctcagaggttcttaaactgtatttcaggaactgccagttatagaggtgacactgatctcttcatgtgggtaaaatactccccctttctgcccagggctttaagagaggagcgtgcatgcgtgtgtgtgtgtgtgtgtgtgtgtgtgtgtgtgtgtgtgtgtstgtgtgtctgtgtgtgtctgtgtgtgtctgtgtctgtgtgtgtctgtatgaggatgatagggggttcttgttttgagcaggctggaagggtggagaaagatgagagaactagtcagtgagggggtagtggtggtaacttgcaacttggaaatatgaagagaaagaagcatgttgacagccagaatgcataatcagtcggccacatgttaggggatccataaggtgaaaactgctttctatctctatcaaatgttagacatttagcagggcttgtggaattgattcgctcttgattgactgctccccagaaatagcagaacctggctttcattttaatgcttatgtgggtaacggttctagaacagctcattttgttatcagggcagggacatgattttgttcactgcagcatgtccagaacctaaaagtgtgtctgctatacataataggtgctaaataaagmtttgttgaatgaagacatctttgtcttaatccatttgtgctgttataacaaaataccttagattgggggtaatttataaacaacagaagttaactgcttgcagttctagaaggtgggaagtcaaagatcaaggtgccagcagatacagggtctggtaaggacttgttctctgcttcatagatggtaccttcttgctgtgttcttcacgtgatggaggggctgagcaagtttcctcagacctcttgtaagggcactaatctcattcagataggctctactgttaggacctaaccagttcccaaaagctttgcctcctcttctttttttttttttttttttttttttttttttgagacaggacctagctctatcacccactggcgtgcagtggcatgatcttggctcactgcagcctctgcctcttgggctcaagccattctcccacctcagcctcccaagtagctgcaaactataggagcgtgtcaccatgcctggctaatttttttgtagagatgaggtttcaccatgttgtgcagactgatctcgaacttctgagctcaagcagtccatctgccctggcctccaaaaaagctttgcctcttaatactatcactttgggggttaggtttcaacacatgaattttgtgggggacacaaacattcagaccgtagcatgtttttgtaagrcatcctctcagtgttaattaaactgctgtcttcttggtttctatatttaagagaggtytgatgtgtacgactaagcttctgtgtatattctcttaaatatattatgtacctgtctcagtcactttgggctgcggtaacaaaattccatagactagtaatttaaataacacacatttctcagagttctggagcctggaaagttcaatatcaaggtgccagtaaatttagtatctcctgagggcctgtttactgatttgtagatggcttctcacgtggtggaaggggacttagctagttctctagttcttcttttaagggtgctaattccattcatgagggctccaccctgatgaccatcacattgggattagggtatggacatatgaaagaagaggggtacaaacattgtgcattataatacccctgtaatccatagagtctagttgattctccttccttaatatttctcataccgatcctccaccttcatctccactgccacttccttcattaattattatagttttaaaactgatatccttccttcaaatgttataccttccaaccaccctttctattgctgcatttctaaggtactaatttagtttcctgctaaaatgcttaaacagttttcccttacttacagcagtgagtttccagccatggtgtcctaacacactgacataactgggaacggtgtcaggcaaacttgtcttccatttgattcctaaattagatagctacaaagataaaaaagctacataccctcctcacaatttgcccacaaggatattcctgtggagaaaggacagacaagaactcaaagtcatccctctgctcatgtgagaaaaatgcttatctgagtgtttcctctgccctattgcttcactaagccagactaaggcatgagtgactattcctctacctccacctcacatgtcaattgtgtatttagtaagaggctaatcagagactcaaaagaatgcaattgtttgtctcttatctacctatgacctggaagccccctccctgcttcaagttgtcctgcctttttggacagttgtgaggtgatagatatttcagagaatatttgactcatgaaaataagtcaaaaggaggtaaaaacgaggatggttctgtcagcccaaaacatctgagacaaatctcaaccaatttagaaagtttattttgccaaggttaaaggacacacccatgacacagcctcaggaggtcctgaggacatgcgcccaaggtggtcggggcacagcttggttttatacattttagggggacgtgagacatcaatcagtatctgtaagatgtacattgattcagtccagaaaggcaggacaactcgaagcagggaggggacttccaggtcataggtagttaagagataaacagttgcattcttttgagtctctgattagcctcttactaaatagacaattcacatgtgaggcggaggtagaggaatcatcattcctgccttagtctggcttagtgaaacaatagggcagaggaagcaatcagataagcatttgtctcacatgagcagagggatgactttgagttctgtctgtcctttgtccacaaggaatatccttgtgggcaaattgcgagggaggtatgtagcttttgtagctatcttatttaggaataaaatgggagacaggtttgcctgacacagtccctagcttgacttccctttggcttagtgactttgccgtccctattttccttttatggtcccattttggtaaattatctcttaaatcattcatgaaatcaaagatagagacagagcagctaagaatgtccattttcttaccgtatgtggctagaaagtacatacttctaggctttgctaaaaagacatagtacttcagaatgttttcattatggtgatactatttttaacttagtgacttgtgttgtaaatgatagtggttttattaataaattaaaggtattagtcacattatactttccataatacaggtattccacattttattggtcattgtcatgaattgactgtaatgccgcacagacaatatggtatagcaccaacattgcagtcattttgtaggtcaggaaatagcaaggcctggatgttgtcaattacaagagtcacattaaaacaaatccaaatagcattttatccatttgaaagtaaatttttattactttgaattcgtattttctttatataccaatgtaaataaacatttatattggaatactgagttaaggtatttatattaagtttaactttcaaattattctcttattaaattgtaggtattttgtgagggtcactttataatgctaaaggggcatagtaaattgtggcattatatattaatacacttgaataatgtattctgctcaaagtgtcagagtgcagatctcaaagccagcagagcagctggaaattagaggaatcgccagaggcagccacagagagggtaagcctacctctgcctgaattcttggctaagtaccacattgtacaggctcaggggagacccataggaaactagaagccacaggatcaaaacagatataagcagctccttactatggattagagtctgcagttttaatctaggcaaagtacctgcctgttagaatacaaattcaggagtcctcaggaaacatgatagaatctagtgtttcggtaatatgttatctacaatctccagttttctacaaaaatattagacatggaattaaacagaagagtgtgatctataccccaaaaaaggcaatcagtagaagctgacttagctcagatttgaatttagcaaagacttcaaagcagctattttaattatattcaaagaattaaaggaaaatatggtatcagtgaatggaaaaatgttctgagcagggaaatggtaaccattaaaaaaaaaaaaaaactggaaatcctagagctgaaaagtacagttactgaaatttaaaaaattgccaggtgagctcaaaagcagtttggcattgtcagaagaaaggaacagyaaacctgaacacccagtagaaattgtcctgtatgaggaatagaaaaaaaaaatgaagaaaaaggaacagaacctatgagacctgtgaagtagtccagtatacatgtgcttggagtcctgaaaggagagatgaaaaagagacataaacatatttgaaggaataatggctggaaactccccaaatttagtgaaaaacattatcagatccaagaagcttgcagagtcccaagaaatacaaacacaaaaccattcctagacatatcatggtcaactgttatgataaacaaaaaattgtgaaatcagccagaggaaaatgatacttgcttacccttcaaggaaaacaactgaaagtatttgttgctgatgctaaaatttgagcttttaggaaaacaagaattttggaaaacttgtattcaccaatatttctcaatatttgactttggaaaatttgtaaccaccaacagcttcccaatactaaaaaggcttgtttttttttttttggttttttttktttgtttgtttgttttaaagacatcgatggtggataacaaatgtgactttaaaaaaattatataatgcaatgtgtcaacatttagagatctgcataatctatgtaattcagtgaacaattattttccaagtaaccaatgtatgatgttacaaaatcattcactaaagatccattcaaagtgcaaggtagaccaatggattttaatgtaacaaatttcaaaaagttcattgatatggtttcagttttcatatgacaactagtttttaagaagctattacacatcaacgtttgttatggaatgaacaaagaataactgcagttttctgaaaaggttctattactcttccctttcccaaatacctatctgtgagaggccagattgtctttacatttttcaaccacaacaatattgcaacagaatgaatgcagagcggatttgagaatgcagctgtcttcacttaacccagacattaaagagacttgcaaaaatgtaaaaaaaaaaaaaaaaaaaagttctttaggaaattacagctatttttcataaaatatatttttatttaatacagtatattaaatgaataaatatattttttaaatttttaatttctaatacagtaaatgtcagtagatcttccccatgttaacaaaagctctttggcatcctccattctttttaggtgtaaaggtgtcctgagaccaaaaagtttagaactgttttgagtctgctctgcctccaccttcagatagtacattcctttaagggcatcagacgggaaaattagaaatatcttgtagctcaggaaattagaattcttgagtttatggtgacatccaatttttgttggtgtctttgattattttcaagtaaacaataaaataagctgtcaagtgtgctgcttaatgcttctaatcccccctccccccaactcaatttctttccagaccttttattttttaccaaggactctcaccaggaaaataataarggacttttgcagtggtgactaattcttatgtttagaggttatcaaagaatgttagagtactttaatagtgaatagcataatagtgctagcacagtcattactatgctattctgaactgttattcaatttctgggaacgagcattaatcatttgaaatcaaaagaatcaaagaatcattgaagtttatatcatttggtatgaagaattgtaaagatggtaactgaaagaaactgaaatttttttagtcccacttataattttctgttaaatgcatgtgccactgcttgtttcggtttatctggtagttgacaaaaccaatctaccagaaataaatttgtcgtgtgatgttcataacataaatgtataataagtttaattttgcattagtttgttttttgacaaaaataaccaccaaaaattaaaaacaaaagaagcccacttacctacctgcttgcatgaaactgaacagatctcaacttccatacattccctcccatgcattattgcttttcccatttcttggtgttcctccccttctcccattcttcttagtgactctgcacttgcatttgaatttagaagacccatcactacaaataagcttgtacagatctgattattgttgttgtttcgtttttaagagatgggatctcactccatcacccaagctggcatgcagtggtgcaatcatggctcactctagcctcagctgtctggcacacgagatcttcctgcctcagcccctggagtagctaggactacagacacatgccaccatgcccagctaatagatctgatagttttttaagacttacacttttgtggtcataaaatcagacaaatgttactgtactctggcttctgatcttttatattttcacctagtatttttggtagttttgaaacttacatgtgtggacaggatcactaaaacaattttgtatgctatttctttatgtttatttttattttattttagagatgttgcccaggctggtgtgcaatggctattcacaggcgtgatcattgtgtactgctgcctcaaactcctgggctcaagcaattcccttgcctcatcctcctgagtagctgggatgacaggagcatgccacagcacctggcttttatttctttgataattgagttgagttacacagaaataataaaatagacaattttctcctgtattgtgtttaaaggactgaatagtgatttgctttctgaatcttcttttatttttgaaatgataaggattttcatttctttgccaatggttgtggttctgaaagtcacataagggcctacaccagaagagaaagctaatctgtggatgtcaattagagggatatccattggggtctgcaaataaaacctgattatttatcaactgacttcttcaactgcagtttcccttattattattttttaggccaaagatgaagaggaagcctttctggattggagtgatgatgatgatgatgatgatgatggatttgatccaagcacactcccagatccagataaatacagaagctctgaagattcagatagtgaagatatggaaaataaaataaggtatgtttttactatgggtatgaaatacatacttagtactctcacatcagtcttttaatgaatccaaaagacattactaagagttctactccaagagatgtttgttgcttttttttgatacctttacttagattcctggaaatcctgctgctgtttttttactcattttgctgcagattgttctggtcatgttagggcctttttgattatttctataatccctattaatagatatgagtatgatatatgagttgtgtttttcctttctctattctttttttttttttcttatctttctctgagtcctttatgcctaagtatttgatgcactaaaatctgttctctgcaaacagagttagggttttattttttttcattgtcagagaactctattaaagatactgctaaaaattgtccttgaattttaaaacgtggacattattcttccacattcttttatatggaattaaataacaaaatactggtggggctgggcgctgtggctcatgcctgtaatcccaacactttgggaggctgatatgggaggattgcttgaagccaggagtttgagaccagcctgatcaacaaagtgagaccccaaatctacaaaaacaaatttttttttaataaataaaataatggaacacttgtacagaaacaactcttgacaaattccttcactttaaagtctatttgctattatttatttgctaccattggcagaaacaaatgaaacgtgatgaataataatatgacttgctcaccatttgttttcagagtactatgtattagattacattaagagtttattgatttcaaagttgagaatgttaaacttcatgctcaatctaaaccagtgagcttctttacagaagggaggtactaataacagatagagttagtatgattgaagggaagaggaagcctgatggaacccttgaagtgctagcacagggtgtttgcagttggagaagtaggccatagagagctataatttgttttaaacaagaacattatgaaaaggtcttaaagattttcttaggacaaaatgctgtagagagacagagttactcttcatttgaatcttatgcatatttaaacatgaattattttttaataggaaaattcacttatccaaattcagttttctgaggtgatgccagaaacttccatttgctgttggacaactaggtggttgaacatatgagctttatatagtatgtgtaggctctaggtagtggacatcattgttttactaccacaagaggcaccacagataaaaataatttgattaggatttagaaaaatatacaaatgtttgtgccataaggattaaataatttaggttctgggcatattcctaatctttaaaaattgacctctaagagtaaatatacatgctctgagttccttggtgtatggtctgagacctagatgaaccccagtggggtcaggtttgcttccccttgtgttcctatataaatgcacctcttttagaatggtttatggggtctgtattttggtagatgtgatttaatgtaacatacatgactttcagtcattgtcttccaagtgtttccatgtaacttgactccctggaagcaacattaattggttcttgcatttctgcagccatattttgcatatctatctaatatacctttaaaaaatagtcaacctttgaaacctttggcaggatgtcagcagtccttctgcatttgatttatatggattttttccctaacattttagatagtttctgggtcatctttcatctgtgtacagcaggcatttcatttaattcttctgccatttcttgcccttatagtgacatttccatgctaccacctagttaatagaacttgttctctagtagctcatgtgtttcatcctgttaattggctgtaaatgttttgtacctagaaattgtccttacatttttttttttggtaccaacacttaactgctctagcctcaattcccacccctaatattaatgtcatggcacagagaatgccttgacatatttgaattgattaattgattgatgaaggagatttacagggttaaaaaagaaatgtaattataagagactatatcattggtcctaatattaataggttaaatgatacaagagatgacagaatatagatggagagttggaagaagccaagttcatacagtgtaatggtgatgaacaagaaggtaggagtactgtgagagatgacaaagcatcttaacttaaagacaagggttcagatggaaagtatttaagcattatatgaaaattaaaacagttttaatttcatgcacagctaacaagtcagcattagtggagactgggattggtcaacttgttttaagctgacagaaattgtcttttgttgaagaggaggatatcaacaagggcttgatcactgatgagggattttattcctgtagcgtatataagggcttcctagcaggttttttgttttggcctgtgaacacagagattgtctaatcttatagcctccttctagatgaaaaaaccaaggctttaaaggctaaaataacttgtctgtgatcacaataaaagttagggacagatcagtgtgatctttgtaaattaaactaactccctagttctagaatctcagttaggttgtatagaattaccctggtgttgagagaggtagctcaggataatgtcatttgactaaacacctggatccatggactaaccataagatagacatggtttcccaccctcagcattattgatattccggcccagatagttttttgtttgagaaagggtataagctgcttaacatcatccttggcctctaccactagcatttgggacaactaaaaatgtcttcagacatggcaggtatctctgaggaagcaaaattgcccacagttgagaacaactggattagaccccagatggcagatacatattactggtgcttaatttcccctgtccttcagtcagagtaggttttttctctattcacttccatttggcctaagcagtcctcagcacagtctctgtcaatcaattggaactggtacggaaggtaaaacctatttgccattcctggactagcaggcaggatttggagtaaattataagtagtagcctacatctgtaatttctatttatactttaatttccatttttctcccttttctgtggtttatttgcctcaatggcaatgaatcaagatgtatgtaaactaaaaccaaaattgttttagataaagaaaatgtatttggaagattgtatatactagaattttgacagtggtaattgctgttgctgctagcatttgcatagtagcgccagtaaagtttttctgtattcttccagkttggctacacactggaagcatacagcttccatctgcttatgcttctcataagctgtatgattacgtgctaagatcttatgatgtcagctttagtgagtcctcttgacatgttcacaggttttacttgctgtgctgtctctagccctctactcagtaattgaggcaatggctagtactccagcctcttggacatcatcacatctctcagtaggttattctctggctatacacttagcattttcagagacgaattcactcttatgggactagatagaccaattggaaagtagctattagtcctggccgggcgtggtggctcacacctgtaatcctagcacttcaggaggccgagatgagtggatcacgaggtcacgagatcgagaccatctggctaacacagtgaaaccccgtctgtactaaaaatacaaaaaattagctgggcatagtggtgggcgcctgtagtcccagctgctggggaggctgaggcaggagaatggtgtgaacctgggaggcggagcttgcagtgagccgagatcgtgccactgcactccagcctgtgcgacagagcaagactcccagagagagagagccgagcacagtggctcacgcctgtaatcccagcactttgggaggccgaggtgggcggatcacaaggtcaagagattgagaccrtactggccaagctggtgaaaccctgtctctattaaaaatacaaaaattagccgggcgtggtggcgggcgcctgtagtcccagctacttgggaggctgaggcaggagaattgcttgaacctgggaggcagaggttgcagtgagccgagattgtgccactgcactccagcctggagacagagcaagactccatctcaaaaaaaaaaaaaaaaagagagagagagagagagaagaaagcgaagaaagcaaagaaagcacgagggaggaagggagggaggggaagagaaggagaaagaaagaagctattagttccaacctaaactagcatgagcgagtttctttgaaaatttcctctgggtgtttctttttcctttacttcattgacacatataaatattcagcatgagtaacacttttgtttctccacatggaaaagacactgtcagttggaactaggcaatggagagccagatttagtggagaatgacagaatctggggtcaatagttccccctcagggagggctgacagggttttaaagagtttttacttctgccttctttctcagttcagtgcatagctgcaatagaatttaaactaccttygaccctctaaaattatcagaattgttatctccagcactgagatttcaaaagggttctgatgtggattcaacccagtttagttagcatgactaraagagaacttgcttataatatggtttcagggacaaagaaaattatgtgactttgggtttcttttaatgagctttaagaatacccccatgaatagtttatttatcctcaaaaacagagctgtgaaacaggggaccagctaatctacccgcagtacagaagtagttggggccagatgtccaaactccatttaaggatctaggctttcatgtgctatttttgatgacaggtgtagaagggagagcttgatgttctcwggcttttttactcttctttatccatcttatatattggtataggctgtgttttactctggctttcacctctcattcttcctttgaatatgtggaataggtagaattaatagatgttaggatttgttgttgttgttgttatcattggagacacaacagcttagtaggaaacccagctctctgtttcagtgggctttgtgacattcattgaatttattggtctgctgggaactgcacagagtcctgtgttcttatckcaagtaagttttgaaagagttttgtaccttttgaggaaccaagacctcagatactgtaattgcctttgggctaatgaatgatttttcatttcaaatagtccatacaataaagttacaccatgttcaaaataaaaatatttttaaaagcttctrtgtggagtgccaaggaatagagtaagaatcttctgcattatttaaatcatattttacttaagagttaagaatacccacttgatctgttagtctctggattataacatttcttccatccattctttcaactaaaaatgttttagtgcctgtcatgggccaggcatggatccagaagataaaacattaaacaggaaacatatctttcctgctttcacaaagctttttgttccatggaggttacaggtagctaaataagcaataacacaacagtgtgatggattagtgctgtggtttgtgcacttggggaggcgatggtgagtggagtaggtagggaatgaacatggagaccacataagtgatgggtccaatctaggcctggtgggtcagaaagagcttcctgcaggcagtggtgtctacactaaatcggtcttaggtgtaagtattaactgagcagaggggagggtaaattgcacttctaaaaagcgtggcttctaaagtgagatgagtgtctttaaccgtattccgtttaaactcttctttcaataaaattgtttcttatagctgtgcttcacaagctgagagacttgattctgagcatataagattaatttttgtatatctagtagcatttatcatgtttggtttttggccatcttcgtgtgaattgctaatgatgtgaaaatttgcaaagtattaaatacaatgaaaaagaaacagccggatgttccagatgttcattatccagtcaaattaaatttttaatatatataatcttaacctttttcaaacaaaaaaaggaaaaagaaaaggtgatgattcaactcttactaccttacatcaatctttgctttgtagactacattctctgaggcaggtagcttcctaaagaattcttacatggtgcagggtatttcgtagattattctaggtagcataagaccaattacatctatagtttgtactgaggctattgtcctcatttagacctgataacttctttatggattgataccttttccagtacagagtaaactattccacatctaaatataattaggtgttcttttaacctatttttacacatctctgaatcaaaagactaatcaaggtttttggtctgcatgtttgttcttttatttgggtttttgttttgtttctaaaaatctgttccatattcatttttctatcttttgagtgaacttgcctgtctttaaaaatgatctcttatgtgaggtagatgaactgctttaaccactgtagtttctcctagtattgagttctgtgacatctcttaaataagttttgctcagtacctattctaagattttacagtcagcttcataatttgtgggaggcttttcacttggaaaacaatgttctcagaagccattttcatttctttcttgtttttggatggagctaaaagagctttttcttagtctaggtgattgtttaaaaaaactactattcactgcagtttccaattacttgaacctctccttcattatgaatctcattgtgtgtagaaaatgtagaaagaggttggctcagcttaattatatagtgaatttattgtgtgcctgccattctttcctcttactcttttcagcttcaggagtatatgcccccttcccatatgccaagcaactttcaagagaaaatctcagtcgtttcttatttgtcaaacatttgaaaataagaacaatatttggagaaactcctgaggcagattgttggggtggggtttgggaaaggcaatatttgtcttaggacttttagagaaaggttgctacacattggggaaggaggatgttattttctggggtgaggactgggttgagatggggaagacacagtttgagaaattgggagtttaagaagctactctcttactgttactgtttttgccctgtgctttctactctatcatttagtcaaccattatatataacttaggacagttgtgagcctgtcatttttcagaagcgccaggatctctaagaagggtgaatagctcaggatgctatgaggctaagatgaaccacccttgctagtagggttctctggcagctgccctaactctggtgcactgcaactttgttttcactgaaaagacctttgtgagtgacttcttaggatgtttctttttgtcatttcacattgcattcacatagaatgcactcatgcctaatgactgyaaactttctatcacttggttacaccataagttccttgtctacctcccttttaaaatttttagattgtacccatgcttaggtttttggttcttgtttgattttattttgttattacaagtaattttaatgggttttaattttcgctattgtaagtaatttttaaaaattgttagtaaattttttaaagatcgtacccatgcttaggttttgggttcctgtgtgattttatgttgtaattataagtgatgttttggtgggcagctttgttgaagactgggttttctttcctttgaagtcatttgaaggactaatgaagagtgagactaaactgtaaaactycattttgtcagatagctggaacattagggacatgcttgggtaggtggtgatcttagatattgaaaactaatcagggaaagtagattgagagagaagtggatgggatgtgtttctgaggagcacaaaatgttctacatgcagattagctgtgagaaaaaggcatagcataaactcaacttgtatgatgtttaattttttttttttaaatctgggagaagagacataattataccttctaaactgctgtggagcagggattcttaacctgggctctatggatgagctttagggaaatcttgagatttcgtgaaaaatgatggcatgggtgtgcatgtagcacagacactcccatgcagttaactggatggatttatgacgagaaaaatagagtggggccaaaaactttttgccagccccaaatggcgttgtagatattttacagatggaaacacatatgtgaagtagtggtatgatgtgcagtcttctgccttctagttcttcctcaccaccaccagccttttctgattattagaattctgatccaagaggaccagttttttcctctccttttgcagttatgtttataatgaactctgagcccatcaatcttttcttagatgaaattgtttttacaaatttgtttttaatactgagcagctagaaaagagacattaaggacatgatacattttcactaccgattctacatgtggtagcctttgctgacaggagaaagctgagcacattttatggaatgtactgcagtaattaatcttcattaggactgttgcatggcctcgtaaattaaaatttatggtaaggggaaaagtctctggcacaacatatttgaataccaaagtgccagtactttaggatgggtataaaggtttctgagaatgtttcagatgatcacaagctcatgtattaggtttaaattatttaggaaaaaatccaagctacatttatgatatgaatgcaagaaggagagttttatacaaataggtgcccaaaactgggctctcaggcgctaaattcttgtctctcacagtagctttccacagccagtttagcagcatgttgtaaaaggacacctcagggtttctgtttaagggcatattcactgttctccacctccagacacccacccttagcttccttgcagctttatcagtctttggttcacctgatttcttaacttagcattccaaaggaaagaagaaaaagcaagagattgaaaagctgctcagacagtctaataaagggagtgtgctttcttccagcagccccttgtccttgcttttgtgaaatttctgaataggctgtacagtgatgtcaatcccctattttgtaatttaacacatacaaacttgcacaccccwaattgtacatgaagaaatgcagctgccacagaagttatgagctctgaaatgaggcatatgccactttctggccgcacagtctcttgttcagagtcaggcttacagaatcccccataatttcagttgccgttttataacttaattattggaactgtctgccccagcatccttggaagtttagtgctcactccactagattgtgtttctataaggcactgcatccagcaggagagaagttaacagattttcccagaagatgtttttcttctatgttgccttgggccacagccatatcagacagcacttggaacttttttttttttttctttttctgatggagtctccctctgttgcccaggctggagtgcagtggcgtgatctcagctcactgcaacctctgtctcccaggttgaagcaattctcctgcctcagcctcccgagtagctgggactacaggcgtgcgccaccatgcctggctaatttttttgtatttttagtagagaaggggtttcaccatgttagccaggccggtattgaactcttgacctcaggcaactgcctgccttggcctcccaaagtgcagggattataggcgtgagccaccgtgcccagctggaacatcttgaagtttggtttagtggttctgattattgtgtcctcgcagcccaggaagtgtggtttctaggttacaaaggacattctgacttgttttgtttggatttaattcacacatcatttaaagtatgctgtttaccagtgagaggtcttcctattcatggcaggtaccaatgattaccttcctcttctgtgataatatgttatttgccccactctttcccacacttgtaagtttattggctaaagtgtcctaaaagccagaaagggaattaaaaattcaagtggaataagccctaggagttctcgctacatggaataatatatcagtgaatcagtctctctccttatgcctttctctatcaatacatagaaatttaaactatgcctgatcctggcagggtgttctcagaagcatctgttttacaaaaatagttgctctagcaggtgtgagatatgaattacatgaggttctgtgaaccgagagactgaatgccttgcccacatgcaccactgcttgtagttttggaatattgatctacacgctgtattattatcaactttgcaacagggaaagtagttttgtgaaattaagactgttagaacaaaggcaggctacttggctttgtggggaaaactgtgggtttggggatttgacagacctgagtttgaatctttcttttacaagttatggacctttgacaagttacttaatctctgtgacccagctttcttcatcagtcaaaggaagataatttttaccttgcaaagttactgtgaagatctaacgagggtaaaaagaaagtgaaatatgacattgaatagggtcattaatgtgcagtaattattttaattactaaaagcaaaactggtaggagtttgtaaatgagtatatacattgataggaataaaacttaatgtcctctaggatagctacttttccttgttttcctcattgaagtcattcattaagtccccaggtagcactaggccctatattcaaaacagtttgcaaaaatatcttacagcctggttgaaattaatgatgtagtgacagtaatgtcatgtaacatagcctattcaaaatatggatggagagtccacgttaccaaattggagtgtaggaatgcccttacctgtctgttttcctttgacagtcacataatttaggcatttgataaactgctagtttaccatgtgactggcagagagcaataaagaagagatactggaccccagcccctcatagagcgtacgctccagcaagagagacagaccataaggaagtaaacaaaaagcagacaagaggtggtgacagggccttgaaaacaataactgatgagagaggaattgggagagttcactttagccaagatggttaagaagaaccctctctgaggcaagacctgaagaattattgcaagccacctctgggaggaaggaatgattcatcctagtgttctaagcatggtttgcgtagacaattattatttaaatatttaccctaatagcatcatcatgactgtacaattctgtgtattcctgttaggagattccttggctgcttttcacctcatcatcattctacccatgtgtctatcctgattgtgatactgacttcatagaaggtgatgagtataggaaacagttgctagtctagtccatacagtggcaactcattagaaaggagtgagccagcattgaaattctcataagaacagaaaagtggaattgagatggtctgagtactctaaatgaggatgggaaaggtaagtcaggtgatgtattaaggggcatgtagttctttggggataaaaaaagaaaaatctaatgtgtttttatgctcaatttaattaagttataatgtattgggggtatactaactcttttaaactatacatctttttattgactttctgcctaggaattttagtttttacagtaaacatggagtgaaaaatatagttttcatatttctcttcactacctctccaatttcccctattagtaacatcttgcattagtgtggtaaatttgttacaattgatgaactaatattgatacattattattaactaatgtctgtagttcaaattagagttcactttcggcattgtatatcttatgggttttgacaaatgtataatgtcatgtgtccatcattatagtatcacacagaatagctcattgccctcaaaatcccttgtgctccacctatctatccttctctttccgaatcccttgcaaccactggtctttttattgtattcacagttttgccttttctggaatgccatatgggtggaatcatatatgcagccttttcagattggcttctttcacttagcaatatatttttaaggttccgctatatctttttgtggcttgatagctcatttctttttatcactgaataatattccattgtatggatgtatcacagtttgttcatctattgaaagacatcttggctgcttccaagttttggcaattatgaataaagctgctataaatattcatgagcaggattttgtgtggtaataagttttcagctcctttgggtaaatatcaaagggcatgacagctagatcacatggtagggagtatatttagttttataagaaactgctaaactctcttccgaagtggctgtagcattttgcattcttaccagcaataaacgagagttctttttgctccacagccccaccagcatcttgtattgtcagtattttgaaatttaaccatttcataataatttctgtagtttaaagaaagctgtttttaacgtttaaaatacagtagactgtgataataatatgctttgtcttttcagattttggttatatgctggattaagtactattctgccaaacatgaaattctagctcagcatagcccttccttatgaacagggctgccctttgaggaactgtcttctcagcctctcaaagtgaaggttcttacctgagataaggctaataataatatacttaattttaataaaaacgtcaaagactattgttgcttgctgaggaccttaacctaacagggacccagaacctctcttccctccaacaacatttgtcccagacccctaccccattcagtatcccttcctgagtgtcccagctccccaggagttctctcatgagccatgatagcaccctgtactccagcctgggctgagcaagaccgtatctcagggggtcgggggacatctcaagttaaaagactttcaccttacatggtaaagaccaatataatccagttaacatcaacagaaaagtaagatcatgcccaccatggggagttggagaagctatagttaacatttataatgcatttaccatgcatatatcacttatttaatctctccatgaggtagatattagtcacatttacaaacataaaaattggcaccctgtgacgttcagcagttttcccaagttttaggcaactgccagggtttaaatcgggtcagactgactccaaagccattttcttttcctctataccagaattttggaaatgacatatttaataacagtgcttgaatcactgttaagtaactatttttaaaagcagtcatttcaacattaaacagggaagggagaaaagtagatattttttacattatgccatgtgtacatttcagagaagttacctgtaaagttaaggggataaaaggttccatggtcacagtatcttccaaatatactgagttaaacttgatagagacgaagttacaataagatccaggcaccatgaactagatgttataaaatacctttaataataaaccttttaggaaactaaagattcttcttaatcacctagttacgctttctcctaattttgtcttcagatcctgtgtctcaatgttatccacaaggttattgtgtgttctatgccttgtggaagcctaaaagcattcattttcctgctttaccagtcaaataaccctctaaaagcagtaaggttggtctgatatgaattgtttttagtgagccaacaaaagctactagaatcaggggtctggtttttggttttgtttatttcgcacagtgcttgttttatatgtcagcaaggtataaaatataaaaaagggatctaccctttttcctctaaagggctagatagtaatcattttacactttgagggatactcatctctgccagggcagtggtaaagcaaccgtagacaatacataaacaagggggtgaggctgaatcatcattaaaacttgatgtataaaacaggcactgtgtgaaatttggccaacaggtatagttcgctgaccaggctttcctatttaaagtttgtagttcactttaaagtcttggttgaaagctttatatactttgcaaaatttaccttctccttctctttgaaaatgggaaccaggccgaacatggtggtgtgcacctttagtcccagggaggttgaggcaggaggattgtgtcagcccagttcaaggccagtttgggcaacatagcaagacccccatctctaaaaagaaataataataaaatgggaaccactttttgccagtctccagtctttgaggatcctcttccattctccattgaatcagagatggccaaatgaacaagatggtttccacattctctaagaacccagtgtgtagttctcaagagtcagggatgtacttcatttagagtagctagtggcttcatataatcttcatccactttgtttctttcctggataccaatgtttcttgttttttctaaaggtctttctccttaaaagaaaacaaaagttatgagttgagaatttgctttttggtcttgttttccatcaacattaggtagtttgtgacaaaaatgaaagtaatttcaatttttacttttaatatttttggcaagtgctgtattcgcttattatactctttgttgaaatattgtatctgctggtggcaaaccaccctgagtctaaagtccaggataatgaggggagatcctactgttactgcatgtcttatggaacctgatacctttgtcttgaagtcatagtcatttgttggctgtgctacatgctgttaaagaaaaaaattcatgacacttactaaagaagggtaagtcaaacgttattcaaggggtaggggccactgcaatggggttttttagtaggggcaagagattgagctcaactgagagtacaactcggacaagtgagagttacagagatttacagggaggggtcattaatggaaagttattaagaaggaacatcagggttgtggaggattctggctaaacagattccacaggattattactgaaggcaagcctgcgggatgggaaatttgaccagatattaagggtgagagatttttgttcagctgacttagcaggattcttgctaaaactggactaagtgggcagacctggactaaagacaaagcccagtcagaaagaggacttagaatagccagactcgagtttggtcaaaagagagtatctttgtcagtacttcattgagggttaaggttttgatgtgatcacacatttttaaaaggataatagttagatattattgcaaagaacatcaaaattactcatttttattgaagtgacatgccgagttttgatctttttataatcttaaaagtattgtctcatttctcagagcctgaagttattgggtacttcttttttacaatataatttcccktccgccattagtgttttaattttcactgtggctttgatctcttcaatttctttggaattaatgatacagtgtttagagaaaaaatacaatgcagatttaaatgtctacttacatactggcttaaaatgaatcatctatgctgcaaagaagataagaatgtggttttagttagggagcattctttctgaccctgtatgacatacagtaggccagtcagatactaaacagtacagaagctcagcccagtgggtttattcatgtcttcaagaaacatgtattaagcccttgggtaccaaggcagtgtggctgcacagaacaagacagtttttgtccttagggaacttgtaatctaatcgaagataagcacatagacagttgccataaggcatttcagatggtgtgatagagatggtgcgatggaagtgtgcacaatgtgagggtaaccctaagagggcacttgactcagatgagggtgggtcagggaaggcttcccggagctggatcaggtgaaggagggcaaggagtgaggatggttgtagaagccctagaaaacataggtggatttgagagatgatcaattcaattaaggttataaaagagaaggtagctcaaggatgacttccaggttttcagtgggggaatagtccttttcacttagaagggaaataaatacaggaagagcagatttggggaaaacatgtaatagaagcatgtttactttgagatgcaggtagaaacatccaggagctggttgaatatgctgatctggtggtctggaaaaaaccctaggctaaaatgcatatttttaagtcattagcattgtrgaagattgtggaaacactgaactgcatgagaatacccagaatgaatatgtaagatgaggatagttgaggcccaaggatggaacctggggaaatgaacatttatgtaatggatagaggaagaggaaactgggaaggtacaatcagggaggttgtagtcaacctttaagtattttaaatttagatgattgctgattacatctcacatggaagttgcagtcatggtaaaatttaaactgtccattgacagggcgttaactcagcagaagttgtgtttgaaaaaacaagttactgggtttagccataatttggccacttatataatttttaaaaacatgcaaagccaaaatttagaacactggaacttgtgatattaaaaacggaggattagtcagcagacaggagcctgtgcacccacagactggattgagtgttctgggggtgctcccacacgtgacactctcctctgttaactccgctggaagtcgaattcgcagcaaaatccattgaaatgttgccttttttgttgcagtgatggtaattcttggggctttgaacaaccctaaccgtcattatttttactattcagatgaatggacctttattgaatgaattctttaagtcatcttcagaaatgaagactaggagccccagacctcaaaaagctaaccatttggtaggcagaagaagaaatcttccacctcaaggtggaatccttgaggaagaggtatcatttgaactggcttttgaaggataagggaggtttagatagttagaaaacagaaaagggaattccagatggagataaaagaaactgagaagctagggcatattcagggaataraaaggagcctcaaagagcaaggggtatattaaggggggctaatgcagaacaggttacagaggcaggcttataccagatcatgagactctttaaagattatactaataatctttctagagaaccactgaaatttttatgaaaaaggcaagaccaagtggtgcttgacagagactacttctctaagcatgcttacaatgggctcaaaagagaaatgttatacatgaaggttttataaatgatatttcaacaagaacttttatttaagatkactggttcttaatttttttttatttgaggggaggtgggcatggaaaccattattgaatggcttcctaagaaggctgatatataagactgaaaagtaaaattatcaagaattctcacaggtttctccatatgatccatggagcaccattttctatcctggaatgatgacttccaaccttttcatcatcacaagacaagcttttgtgtatccattttcacaaaaatttcaaaatcatcaaaatagaatttccctgtcatcatctgttttgttttcaatgataatggtcccatgttttaaaagatttttgtctctcaagaaagttaatatttcacatttgtttcattaacgaagatgtaattttcagttcatccaagtatatgaagtattgaacgtttacaaagctcagttaatataattctagccaaaagcaaagaaatcccacaacttagtctttgccacacaattgcagatttttaaaaaaatattgaaaataacccatgattcatatatcttgacctaagcagtctcaccttttcccatacatctgtagacacagggaccctaagttggagatcaggttatcacaggaacagagattatgtagcatacctactctgtcatcatstgttcagattacatattacatgctgattttttctctgttgtatgatacgtcctttcagtggcacaccagacattactaataaagtctttattatttggattattgaaagactgttatctctgaattctttagctctacttcttatttttatagcagtagtagggcgtacctactctgtatgcttctgagccttgtggaattaaaaagagtaattgaygtatacctagctacccagaacttcaaatttaatttttttctttattgcaaagagtaatacaggctcattacagaaaaatgagaagacatatataacagcaaaaagaaaattaaaaaaaatcttccaaacctttttctatgcaaacttacatatagactttttaaaatacaaatggactctctctttttgtgttggttttataatattgtcagtgtcaaaagcaattcctgaaacatcatttttaatagctgcatagtatctcatttctaattttataacctatttaatcctttatggttggactttgggatttctaactttctgaaattaaaagtagctatcccttgaatatccttgtgcctaaatctttgtctaaatctctatttccttcagataacgtcccagaagaaaaattgccaggaatatatattttaaagatttttgaagggtactgccaaaatgccctcaagaaagattgtgcccattcacttttccactcacgagtttacattctaattgggagttaagatgcatacagttggaaaagaaaatcaatttagtatcaggaaatagcaatcttaggtgcaaaatgactgatagataattggcgcttttccaattcagaagagctcacttttaataggcagatttgtacctttcacgggagataaggaattggagatgggtcttgaaggacaaggggaagacccagaagagggaggtgccacatttacagcaaacaccgtggaaatgcccaagtgtctgccgatctcgcgagtgagggccgtgcttgaggagtgagggactgggaggaaggctgacctgaacgttctaacttcaggttttcctctggctcttttgtttctcgtgaaattaacactgttattctggggtgatggtgtaactacaagtatctgaaaaaattaaaatggtgaaaccaggaaatcaaccctattaaaaaatcggttcaatttctcggattattttgatgtttggggtttcagaaaatttagaaattcagaaagttatattccatttaaaactcaattacaaataaaaattttaaaattgaattcacattccaatgttgtatcttgttttcttaattattagcaatgagtgagttgtttggctcagatggttactttggttatcaagacaagcttttgtgtatccattttcacaaaaatttcaaaatcatcaaaatagaatttccctgtcatcatctgttccgattacatattacttgatgattttttctctgttgtatgatatgtcctttaaatggcacaccagacattactaataaagtctttattatttggtttattgaaagactgttacctctgaattctttagccctacttctgatttttatagtagtagtaggccttttggtgtgctgagttaagccatgcttttgctttttaagatgtgctttatccattacgttgcactgtcttaatgctgagcagtgatatgtttgcttttgacccttgcctcgaacatttaaagaatgtggcaaaaatctaagtcccacagaagtgctgacacgaagataaaatgcagagctcaggcttggactcgccccaattttgaaggaaccccctcattgtcagtcatctcagggacctccttacctccctcggcttagtggagaacactaatttcactcctttttcgacctctattgcattttcattatttcattattgcatatttcattattttgttacattatcccccttttggtaatttgtctgtagaatgcctatactgttgtttaataattaacttgttatacagattgctgcttatttgctatagaaagtagtataaagggcctttctagaatttgaagtgatccacagagcagcaaagctgcctattgtgaaaatacttggactacataaattttctaccttttattatccaaaccacctatttcctgcagggcatgtaatgtgcaggagcacattaacagaggatgcaatagacagcccactaattaggccatttctgatgagctgacctgagatgcacttgatgtataggcagagcaaataccagtattcccttgaaccaaatagatcctggcactataaccctgtgggactgtcacaggactggccatactcataaaaagattagggctcaatacttttttttaagaccctctttcactaagaattattttaattctttgctgactgaatttgtatcacagggaactctttcatgttcatctctccaggcactcttttaaaatgcagtgatttgtggctttaaagaacctcatagtgccatctagtttgtctttcctccagtggtgaaagagaatggctgagtcagagcattggacacttctgggaggaaaatggaggaattatttccagttttgcatcaagctggtcataaatggatatgctgatgaggcacattmactttgatatccaggctgtcttcttaaagagtaatccaggccgttggaagttgagcagtttgttctctttcagaacacatcatgtgcttggggtataatgtaatatttctgtgatttttttatttatttattttgctgattagatatagtgaatgtgagaatttaaaagggagtagtttttagaaagttaacgtgtattgagcactactgtgtgttctcatttatctaagttcatttaattctcacaattttaagtaaattatataatccctgtctttacaaataagacaactgagggttagaagtgttaactaaaggtctgactgtgttgatgtcaaaccagtgctctttccacagttcctggcatttaaatgttgactgagtcaactctaattgctttcaaaagcttgcctttggggctggattcagtatcattcatatctgagtttgaatcccatgggtgtaatcttggtccaggcatttaacctctcttaacctcattgcagaatgagactaatgcactccacactgagggttgccatgaatataaatgacataatctatgtaaggtatttagcgcagtgccacactctgaggaagccctggattcatggttgctgctactaatagatggactttttattttgttttaatcatatatccaataattgggtcatcttggaacagataatatctcaaaatgctttgaggagaatgttttgctttttcttctgtttttagcatatcaagtgatttcctcaactttcagaaattagctttgtttttatggtctatgtcttgagtatgtacttaatactgcaataatgtttgctttcttaaggctatctgtatctttgatacagatttttaaatggaggaaatttatttgatgtcttaactaatctgtaatttaacatctcaggttctattttatgcatgatctctagatcacaacttaatgcaacagatattagaagcagtacctggtgtccagatagctgttagcttgcacactgctacctaaagataacctgactttcagtagaggtagtttggtgtggcaggacaagcacacactggagcgagacatacctgtggtgcctctcagtgtcctcaaattgtggatgatacagctgtaacttcctagaatgattgtgaagattggatgacccagtgtgaacaaagtaccttgcatgtgcctggtgcgtggtaggacctagctactgatgggaaggtacttactaattatacagatatcttgatgttgccatggtttccttcattcttgaataatatcactttaccaactctctgttaattttgtcctattttaaatgtttgatttcatactgagtctaaagtaaatctttggatttcttctcaccagtgataccaagaagaagcaggggatgaagaagaggagcaacagtgaagtggaagacgtgggaccaacaagtcataacagaaagaaggccaggtgggacactttagagcctttggataccggcctgtctttagcagaggatgaagagctggtgttacatctgctaagaagtcaaagctaaatacttcctgcgcctgccttctccttgaaaccttggttatgactgygtaggcaagaagttgaaaaacagttgatttgggggcacttaggtaccatatgccccattcccaaagggcacatttctggatagaagcgatcgtatctccaagtccctctcacaggacatgctttgtgccatcactgagcatactcagatcgagggtggatgataccatttcctgaccccgttttccagcatgtgttctgttagatttttatccatgggttcctacgccttgtcattggaaacactgcctttgtcttactggcaagttctggagctcttgtgtcattgttagaaatccctgtcttgcttactgtacagaagtttctgttgctgttaaaattgctcatgatttcgacgtatttaatattttcaaagagactatgatggaccagccctgagaaagaatgagtatttttgaattgagatgatcaataataaacatatttcctataaaagaaagtattaatgtttgcattgtgtccagtaacataagagacctctcacaggaaggttcttaagattaaagtgcttggccatttcctcaaactgtgaatttgtcatattcttaagttagcctgttctcaaggatatcatttaacttaacacttgcaggtttgctagcaattgtttataaaatcggtagaagttctgaatatgaagactgactaaaacatggcctctcactgtgcacatggtagctgcaggtcctctgcaagtgctccagtcagcacctaccacagagccccacccagactcagctcctggtaatgagtacgatgcaaaacaagacagagcctcttttttgttacaaataactcagattcttcaaggggaaagaatatggtaaagaaatgagtcttgacgtgaaactgattttatagatttgccaccttctcatgattctgtccctttcctattttcccactccgtgcacaaacattttcagtaacaggggcaaataaattataaatacaaggaagaggaatgatggcattacacctgggtatctcaaaccttttcaactcagcctaagtccatgtttgtctcagaaaagtttctcctcttttatttgatatcctcgtgagcccgcaccaacatcatttcaccatcaaaaggaaatcaggtgacacctcagcttctcgctcttcccactcttttctttactagttcttttgatgcctcttctgtaactttttttttttttttttttttgagacggatttttgctcttgtcgcccaggctggagtgtaacggcatgatctcagctcactgcaacctccacctcctgggttcaagctattcgcctgcctcagcctccctagtagctggaattataggcgcccaacaccatgcccggctaattttttgtatttttagcagagacggggtttcaccatgttggtcaggctggtcttgaacttctgacctcaggtaatctgcccgcctcagcctcccaaagtgctgcgattacaggcgtgagccaccgtgcccggccacaacgttcttatccgttgtttcttccctattctcacagctgctgcctttagtcagagttcattctcccatcatgatctgctgagacccctgcaagatctgcctggccactgtccctctgctctcacatttctcctacccagctttcccctggtgctcagaattctcttcacagcacatggatctcagcacacttctctccagctgttccttctattatattacagtgcctatcatacaatgttacagacatttgtttatatgtctgttgcctcttttatatgacaagtttcttgaaagagcaaaagggccatgtttcatccccagagccaaacacggcaactgtcctatggttgcttagtgaattaatgaggagacattataaaaccagctcaatttttaaagatctcttgtagcacattcccctaccacttctcataggaaggatatagaatgatagaaatgagaactagatgaaatggctatataaagaagaaaggggaaagtaggtgggaaaggaattcagtggacaacaacttgggtagatttttaaaattagagtttctggccaggcatggtggttcacgcctataatcccagcactttgggaggctgaggcgggaggatcgcttgaggccaggagtttgagacatgcctgggcaactttgtgagatcttgtctctacaaataatttaaaattagctgggtgtggtggtgcataccagtggccttagctgcttgggaggctgtagtgggaggatcgcttgggcccaggagatcgaggctgcagtgagctgtcatggcatcactgtgccccagcctgggtgacagagtgagaccctgtctcaaaaaaaaaaaaaaaaaagtttctgatacaggatctcttggccttaaatattttcaaaagacataaagttgcaagagtatgtaaactgaaggtttaccattgaatttaccctgtatggtttcagattgttttcctgactcaagtaaggaattaaggcagtttactccctatatataaatattgaatacacatattgcaaggcctttggttcatagactagtttgagttgtattctgtcgctggaactgaatgcatcctgactaatatatatgttgtaggggattttagtgtgcagatttttgaaaactaattctaaagatcagaatagtgctaatagaaaacttgggtaacaaatatgtttgtaagtgggctaaattagctactgttttggctcctgtcatttgtaccgtgtgtatgtttagtggtaatagaccctgttttctctgacatcaggggtgggtacctggttaaaatcttgccagccatcagaacccgactcctagagacagagattggcgcagccgtaatacccaggtggggacaattagactccttccctggaagtgataataaattctgtacccatgggaagttactatgaagggaggatgtagacgtaaggcctcgggctgcctctgagagagtggggagaataagaccaacacagaggcgagcagagtaacgagatgaagaaaaagccccggatgacattgtttgagctcctgggcttcacctgaatgtatttcgtggacttcacagttgtgtcatgaataagtacatttcttttttgcataaaatattttatgttgtatttctgtccctggaactgaatggatcctaacatatgtgtctgagggacttttactttgccaattttgaaaactagttaaagcatcagaatagcactggtagaaaactcatgcaacaatgcatgatggattgtattttgcacagcaaatactcactccagccccctccctccctcgggaaacattcttaatagctcaccaatattgggcttggtcgtgtgacctgcttttagtccatagaacacagcagaagtgactgtgggcttgtcacatgcagagctctgaagctgcattgatgtttccatcagtcctgccttataccttcagatcagcatgaaccggagagaagacactcctcggtctgggcccaaggtgagaaggcaggtgaagcagacttacagccacctctcaaacctgcagaacaagaaatccactgagacttgggggtttattacagtaaagcctgactaatacacgaggtgggagaaacacattaccagtgagcaagagcagtcattcattcgacaaatgttaataaattcagcaactcccatataccaggccctgtgcttctgagagatacagttccctcccttgctactgtgtagtggggggaaagagagaagcaatttcataatttgagtgcaccttgaaaagagcagacggaaagaggaagattgtttgagtgagggaattcttgctggaatgcaggaaggagggaggacataggtagttgcttggtctaggacccagacaatatttcttgtttgatgcttaatgaaggctaaggggccattcatcagactcatgtaaaatgatccctaaaattacataagtctctgatggattcacccagcggcagaaccctttggaggactgccatctcataagcttaacgtggcattttagatttgtttggggctgtaaaaaattgttaagtttaattaaatgtaattaattttgttacacaacatttgaaatatgctgaacatgaaaagtcacctcaactgccagaggctgcaggtgttcgtaggaagtggggggaaggagggaggatgggaggtggtggtgtaggtgaaggggaaagagcctgcaacccagatttcaaaccctgtttcatgtcttttaagaccactttaactagacatgtaatcacagtgtgattttcttccacagcccctgctgatccgacagcccagggcagacgtgttttataccatattacctagtgcccgctgactctgaaattctaacccattagcctgtgagggaggctggtgctttcaaaagctctgcccaaacagggatgaattgagtgaataacttttttactctatgaaactgaaattaaggtagtgagcaaaattggaaggttatgagacagaccagggagcacatgataggcaaaaagagctcaaattagaagttagttaaaactataggtgaaaaagaactggcaaaaagacaagagtaagtagtgagggaccccactggtcataggaccagaagcaatgcacagagtagtgaatcctggtcagggctgtctggggaagactcccagatccaagctgaccccctggttcttgtctccatgaggcttcaccttttcatgggtcttcttggattcctgtataagtttgtctcctctgcctgaggcgtaagaccccgttgtcctgcctgagctaggcttagtgagtctttgggttttttgtaccctaaagagcttcagtaaaactcagaatactccaatgcagtgcttcttagattttagtgtgtataggaatcaccagacttagcaggtgtgtttgtgaaccaccctgtgttgctgacttctctaggaagcacttcctttggtctccaggccataccccacatcgttgtgatggggctttcactgaagcaagcctcatggccagcaccagcaatctgttctttctcaatgtgattgatgatctttatcactggaatgctgaaagtcttccagtgctcctccttggagagcctacctgtgacgttagatgttttctctagcacaaagagtccttggagcatttctgagtgtcacaccttcaggttgcagcgggaagatggatgctggcagctctcccatctcttttaaagtgttttaattaaattcttgttcctgtcactccatggaaacagctcttgtcaactcactaccagcttccatcttgctagatccaaaaacagttcttggggctcatcctaatcaaccttccagtaaaagtgatgttcctaccttctcgaaatgctttttcacttagctttcagagaactaactctctctctctctgtctctctctctgtccttactgactactacttttcactctccttttctgattgctcctcacgttcttgacttctaaacattaggggccttcgggttggtgcagaagtaattgcagtttcagaccatgaatgttacatcattataactaggatcaaacacatctttattaatcaaaataggaacaattacagtcaacgtatttttgccagtgagaaataagtttgttttttcctatagcataaaaatccgtgcttaaggcttcaatgaacttttcgaaagcattttctgcatcctgctggttgtgaaaaggttttccctgcaaaaagctttgatatgcttgaagaagtggtagtcggttggtgagacgtcaggtgaatgtggcggatgaggcaaaactttgtagcccaattcgttcaagttttgaagcgttggttgtgcaatgtgctgtctggtgttgtggagaattgggccctttctgttgaccaatgccggctgccagcattgcagtttttggtgtatctcatcaatttgttgagcatacttacttctcagatgtaatgattttgccgggattcagaaagctgtagtggatcagactggcagcagaccaccaaatggtcaccaggaccttttttggtgcaagtttggctttgggaagtgctttagagcttcttctccatccagccactgagctggttgtcaccggttgtcatataaaatccactttttgtcgcatgtcacaatctgattgagaaatggtttattgttggtgtgtagaataagagaagatgcgattttttttttttaaatttagaatggtcagtgttgagcttttaatttggaatgatcagtgttgagttcttcggcaacttctcatgtaagaggatcagcttcgatgattgctctcaatgggtcattgtcaacttccgatggctggccactatgctcctcatcttcaaggctctcatctgctttgtaaaacttcttgaaccaccattgcac

SEQ ID NO: 93681 - DNA, 69270 bp, Homo sapiens
tagtgcaaacacaagttatttatctctgacttctagagtccacctatggcccaatcacataagacttaactgtacagtagttccatatccaaggaggaaagagttccatataaaggggaaagaaatgaagggaaggaaacaacaccaatatcctgctcttacaatgtggaaaggcaagagatattgtttctagttgatagaactagaaattaagagtaagtttattacttaaatttccaatgataggccgggcacagtggctcatgcctgtaatcccagcactgtggaaggccaaggcgggtggatcatgtggtcaggagattgagacaatcctggctaacacggtgaaaccccgtctctactaaaaatacaaaaattagctacaggcactgaggtgctgaggcctcccaaagcagctacagggaggctgaggcagaagaatcgcttgaacccaggaggaggaggttgcagtgagccaagatcgtgccactgcactccagccttggtgacacagcaagattccgtctcaaaaaaaaaaaaaaaaaaaagaataaagcagaaaaggagaagcagtaaatgagccaatctgcatctagccaaccaagaagtcagtaagtaatgttaaatcagggaattgtgggtgtatacatttatctgtaaaagatgtggtgcagcttttccctggtgtcattccaacctgtgtggctgttctcttgagcagtggtcgtttatctccatccaccttctctcccacctaagtgcgtgccaccacccgatggaagattcgatggacatggacatgagccccctgagaccccagaactatcttttcagttgtgaacttaaaggccaacaaagatgatcactttaaggtggataatgatgaagatgagcaccagctatctttaagaatggtcagtttagggctggtgcaaaggatgaatggcacactgttgaagcagaggcaatgaattacgaaggcagtccaattaaagtaacactggcaactttgaaaatgtctgtacagccaatggtttcccttgggggctttgaaataacaccaccagtgtcttacggttgacgtgtggctcagggctagggcatattagtggacagcacttagtagctgtggaggaagatgcaagaaaagatgaagaggaggaggatgtgaaactcttaagtgtatctggaaagcgatcagcccctggaggtggtagcaaggttccacagaaaaaagtaaaacttgctgccgatgaagatgatgattatgaagatgatgatgatgatgaagatgatgatgatgatgatgatgattttgatgataaggaaaccaaagaaaaagcaccagtgaagcaatctatatgagatactccagccaaaaatgcacaaaagtcaaatcagaatggaaaagactcaaagccatcgtcaacaccaagatcaaaaagacaagaatccttcaaaaaacaggaaaaaactcctaaaataccaaaaggacctagttctgtagaagacgttaaagcaaacatgcaagcaaggatagaaaaaggtggttctcttcccaaagtggaagccaagttcatcaattatgtgaagaactgcttccggatgactgctattcaagatctctgacagtggaggaagtctctttaagaaaatagtctaaacagtttgttaaaaattttccatcttatttcattttggtaacagttgatatctggctgtcctttttgtaatgcagagtgagaactttccctaccgtgtttgataaatgttgtccaggttccattgccaagaatgtgttgttgaaaatgtctgtttagtttttaaagatggaactccaccctttgcttggttttaagtaggtatggaatgttatgataggactaagtagtagcggtggtcagacatggaaatggtggggagacaaaaacatacatgtgaaataaaattcagtattttaataaagtaaaaaaagagagagagagagagatgtggtgcaatctcccagaagatataaccaaaagttgtaaagtggctgcccctaggtagaaatgccagcactgggaggtggggggagtagggagtggtgatgggggagagaagactatacctttcattttaaattattttgtgccatttcattttttaactatatgcaatggaataaaattatgtgcttttcctctctcctgtatttctcttcatatcatgactctcctcccaatgagacttccagacttcagttttgtgtgtgtggtttttttgttttgttttgtttttgagacagggtccaactctgtcacccaggttggagcccagtggtgtgatctcagctcatgcaacctctacctcccagactcaagcaatcctcccacctcagcctcctgaatagctggaattacaggtgtatgccaccacgtccggctaatttttttgtgtttttggtagagatggggttttgccaggttgcccaggctggtcttgaactcctgaggtcaggaaatccacctgcctctgtttcccaaagtgctgggattacaggcatgaaccactatgtccagccattgattttgagtttaaaagagacagcccagatataaatcaaaatatttataggaatccaaattcaagcacccatacatgttccaccctaatgaaacgggaaaagttccttatcccccttgcagggcatgcaacagggggagtggctcgcttcatcagtgccccactgctcaaacctctaggggaagcatacagatgggcagattgtggggctctgacccctcggcagcacctggggtgaatgcttacagctcccgaagccccagtgggcgtgtgttacagggtgctcttttagttttgccatccacaggcagcttgtgttaatcacctctattagaccttctgccttatcacaaggacagagggctttctgtatccctgggttcctgccttggtgtaccagaagtatcggatcacacatgggcttagagaatgagtgcaaggttttttactgaggagtagctctcagcgaggccagaagggggatggagtggaaaggtggttttccctgccgagccgggctgcccagtggccaggctctcctccgactgccccggccaaactccaccatggctccactgctcgatggcctgccggcatctgttggcacctgtcagtgtgctcttccaccaacgtgctcctctcggcgtccagccgcttgtgtgcctgccccctacgatcttgaggtgtttttttgttttgttttgttttgttttgttttgtttttgagatggagtctcgctctgtcattcaggctggagtgcattggcatgatctcagctcactgcaacctccacctcccgggttcaagcatcctcctgcctcagcctcttgaatagctgggattacaggcacgtgccaccacccccggctaattttttgtctttttagtagagacagagtttcaccgtggtagccaggatggtctcgatctcctgacctcatgatccacccgcctcggcctcccaaagtgctgggatttcagacttgagccaccgcgcgcggctgggtctcgaggtttttatgggcacaggatgggggcgtggtgggccagagtggtcttggaaaatgcaacatttaggcctgaaggcaggagtgcctgtcctcacctaggtccatgggcacaggcccaggggtggagccctagccagggaccatgcccttctctacccagcacttccctgcccccatcccatatcactaactgaattacaattctgtggtcagagaggagaagaaagttagaaagaagtgctattgcacaaaatgctgatgtgggcttcctaaaaacagcctcaggccccgttcctgaacaaattcatgggtactaaatctcctaaataagctcagggatctcagagttgaaacgtatgtgtcccgcttcttgtttgaaagcgaagctcaagataggaaggtggcaggctcaagatactgttacacattctagaatttggagggagtctcacagattcccatcctgcccccagtggggtcagccaaaagccttttcctcatgtagctgagactggtggggatgggaagttgctaggcagtaagaacgtagtaaaggcagcctgccagttccccagtggaccttcagaaaatgttagttgcggccaggtgtagtggctcacacctgtaatcccagcactttgggaggccaaggtgggcaaatcgcttgaggtcaggagttcgagaccagcgtagccaagatgttgaaatcccatccctactaaaaatacaaaaattagctgggcgtggtggtgcatgcctgtaatcccagatacttgggtggctgaagcaggagaatcatgtctgagcctcgggagatggagattatagtcagccaagatcgcaccactatactccagcctgggcaacagagcgagactccgtctcaaagaagaaagaaagaaaggaaagaaagggaaggaagggaaggaaaggaaggaaatgttagttgcttctttctttttttcttctcttcctccctcccacccccatttcttcttcgtcaatctctctaatatgcctccttcatttctgacccagaaatgcccagtccctgcccagtccctccttttctggtcccacctcctctccccaactctggcattccctaacccaaccctcctcctcctagaacatccagagccactgtagttagaatcacttccttggggctctagtcaacctccctagtcacacaaatgggttactcctcccttcaaaaatccctctaaaatgatagtaaacaatcttaaaaagaatactacccacaaagacaggaagaatgggagagatgacaatggcaggtaaaaaaggtcactttggaagatgaataacaaatggcagattaaaggaagttgtaatctacttgagaggtgaatccatttgttctggagaacgcttgagagactcagggcttagacacacaggaatctcaaagatggggaggcaggagtggcaggtgttcccagttgtctctccaatagcctgtcacccttccttcttgccaagagaccttgattttatccagggccatgatgtaccctgctaaaataaaaactcagactctcttgccactaggggcagccccccaatccagttctggccaataaaagtccacttggaggacttctaggaaagctagagagctttcctgaattaaaggaacaaaggggagctggcaaaagccttcttccctttgcccttccccattccttctgccccaatagtgatcaaggtgcctaggagcaccataaatgtgaaagccacatgctgaagggaagagaaggagatgggacatctgtgtcaccttggagctgctgcaccagcctgggcagcaaccactagatgtcttgttgttgttgttgttgttgttgttgttattgttgttttcaaatcaacagttatctggttaaaccactgtggtcacgtttcgtcagggacagttgaatacaatccttaatccataaaatgattgttgatggaacatcgtctacagaggagttagccagattccttctcctatcccacagagccggacaaaaagatgcttcctctttcctcctcaaagaccagaagtttattttctagagaatttatctaagagactttggattgggatggggaatacgaagcccatcagagaagtagataaacgcatgaggctgagatgggaggatcaaatggaaaccaacattctacccgcttgggccaccagccaccttccccagcctcagccagatcactgaattccagatcaatcaggaaaaacagtagagatggggtttgagttagggctaggcatagggtagggttcaggttcctataaatagctgaaaccaaatgatggtgagctgtattatgatgacacaactaggctcacgaccagttgagacgtgctaaaataaccctcttccaagaggtgagtgtgggagacagaataacggccctcaaaggtgtcacatccgaatctccacctgtgaacactcctcacrtggcaaaagggactttgcagatgagaatagaaattgtaagaaagggagattatcctgggttatctgggtgggcccaatgtcatcccaagggacttcctttaagaaggaggcaggagagtcagagtcagaaaagaaaatcgtgatgatggtgacagagagagaagtgacgtagcagcagaaacagaggccagagggagagagagttaaagatgctaggctgttggctttggcaatggaggatgaggccatgagccaaggatacaggcagcttgtagaagcaagaaaagacagattctcttctggagcttcccgaaggaactcaaccctgcagacccagtttgaatttctgaccaccagaactgtaagataatgtgtgttgtttgaagccaataaatttgtggtaatctctaacaataggtcactagaaagggaatgactgatccttagtggggtgccagggagaaggctttgcaggaggggttcatttaaactgggccttaaggcaggaaacgaaggtaaaacaggagtaaagggaattcccaagagtggtaaaatatgttatcagttgtgggtaaacaagaagggaaaggactctcctatccacaggagatcaatcacagtttgcctggatctgtccctgtttatgcccattgtcccagtataatttttttttcttttgattcggagtttcactcttgttgcccaggctggagtgcaatggcgcgatttccactcaccgcaacctccgcctcccaggttcaaacgattctcgtgccttagcctccagagtagctgggattacaggcatgcgccaccacgcccagctaattttgtgtttttagtagggacagggtttctccgtgttggtcaggctggtctcgaactcccgacctcaggtgatccgtccgcctcggcctctcaaagtgctgggattacaaggcatgagccactgcgcacagcctagcgttgcttttcaatctgcaattacaaaatcgtggcatgccacttcacgcttctcgccaccaacccaaccacccagcccctagcctggtcaggagcaggaggttccccgcgtgccaccaggaagctcgggccggccaagagcgtagactcttgagaggagygagacaggtgcgcgccagccggccttcggggctttatgggaactgggccgtgcggcggtcccgccctcgtgcgcaggcgcagaaccgttgtgaccagagcggtkgcgggctgagcggtttcgagccggcgtcggggagcggcggtaccgggcggctgcggggctggctcgacccagctkgaggtctcggcgtccgcgtcctgcggtgccctgggtaagtcggcggccctcccggagcagccgcccgagacgcgggagggcgaatgaaataaacgaaaatagacattttcccgaaggcgaaatagacatcctccttcggcgccggggcttggaggcgggcggcggtgggcgcgggttaacgtccccggggaaactgagaccccagcaggtccgggccgggggcggagaggaacgcgggagggcgccgggyccctgggcttttcgtaccaagctcgaccgagccgcccctacccacccccagctgcgaacccrgccgttcagaacagagactgggcattgtccccacagggtctcccgaggaccttgtacccgcgcggyttccttgggctggctttggacgacgctttcgccttcctgctgcctaggayccgccgacatgaatcccatcgtagtggtccacggcggcggagccggtcccatctccaaggatcggaaggagcgagtgcaccagggcatggtcagagccgccaccgtgggctacggcatcctccgggagggcgggagcgccgtggatgccgtagagggagctgtcgtcgccctggaagacgatcccgagttcaacgcaggtaaatgtgcctttcagctagtaaataatgtgagtcaggtcaagctccttcttcagaataaatagaacctacatagtgttagggaatctaatgagctttggggtgaaactaagtatgtaaaaaagaaacaatatttaatttttctacctgtgctgaaaagagtcaaacgctaaaatatttgtagagatttatactgaggcaaatatgagtgaccaatggcctctgatacagctcttgggaaatcctgagaatgtgtgcttctggagagacataagatgtcaatcartacatacaagacatacattggttccatctggagaggtgagactactgggggagggggagtggtttccaggtcatagttaagattcaaagattttctgatgaacaattgatttaaagttttgtccaaacacctggaatccacagaagggaatgtctggattatataaggacttgtggctgcagatagaatyaatagaaggcggtttagcacggtggctcacsccygtaatcccagcactttgggaggccaaggcgggtggatcacctgaggtcaggagttcgagaccagcctggctaacaggtgraaagccacctctactaaaaatacaaaagaaaaaaaaaaaaagccaggcgtggtgctaggagcctgtaaccccagctactcgggaggccraggcaggagaatagcttgaacctgagaggcagaggttgcagtgagccgagatcactccagcctgggcgacagagcgagactatctcaaaaaaaaaaaaaaaaaaaaactgaaaaaagaagggaatgtctgcattaagataagaggttgaggagaccaagatttcccttaggcagaggaagtctccaggtagcagtctattgagagaataaattgtaaatgtttcttatcagagttgattctctcctgaatcaggaaaaaggcctagaaaaggaaggggattctcttcagaatgtagattttccccacaagagatagctttagctttgcaggactatttcaagatatggcgaagaaacgtaatttggggtaaaatacttcactttcagggcttgctatctgtcatgtgatgtcatactagagtcccgctggaatttggtatcttattgctacaaagtctgctttgtcagtcttaagatctgttttaatgttagtgctggtcagctgggcctgaattccaaaagggaggagggaataatgaggcatgtcctacctcccccgacaaggttccaaagttttcaggttaactttggagtgcagagtgtattcctttgtgtttcgcttctttcactcagtccacccttttttggaatactaatcattatagctaatatgagtatctaccatgtatcaggcagtggtctaagaaatttgcttgatttattgaatctgaacattaaatgagttgatcatgtaactctcttaagttggttaacttgtgttaaactaactcaagttaactcataatgaacattaaatgattcacttatgagttaatcacttaaactcagttgagttaaatgagttaggtataagttaggcataattattatcctcatttctcagatcagactaaggcataaacagattaacttgstggaagacattcatctctttgttttaaaatggcaaacctaagatctaggctagagattgaaatacttcctggaattataccacccatctgtcagggaaaagaatttcaggaaatcttaattaatcatcaaatatttactcttgttctgtcccctttacgcagcactctttaacacttgtgaaaaattgtgtaattcttcctgagaccggtgcagtggctcacgcctgtaatcccagcactttggaaagctgaggtgggcggatcacttgagctcaggagttcaatgccaggctaggcaacatggcaaaaccccatctctacaaaaaaaaaaaaatacaaaaatcagctgagcgtggtggcacaagcctgtagccgccgctactcaggaagctgaggtaggaagattccttgagccccaggaggtcaaggctgcaatgagccaagactgcgccactgcactccagcctgggtgacagagtgagactctgtctctgaaaataaaattaagttcatctgaatttaaaatgagacctaatagtgtgctttcatggctccatttgtagagccagaatttaccagataggcactgactttgccagcagagggagcagccagctctttctgtgggtgacttgttaaaccttacgcttcttagcactcagcaycccctgggctgtcaaaccctcacttayttacacaggaccttcatttgaaatgggtcattctggtttccgaccatctcttattctaacaatttgtcatctgcatgcattgggaagcacagattagggaattggagcagctagttctcatttttttgctctgtatccagaggccttccttctcaacgtctgccctctcatctttcaaatgtcctctattccgcatattgaggaagaaaagagtagagctgaaaagagggaaagcaaagattatggggggaaaggtgggacttttaacagcgtactgtggaccttggcttttcccagccaaggtcastaccggcaagcaatattcccagcatcctctgctataatcctctagaataaataactgtttgggaacttcatacaaaaagctgactcccagtaggtattgagttcagtggcagtaattagcattcatgacacaacttgcctgaacatttgtaaaaacattatgtttatttacattctattcctgtttcagtgtgcatttgactttatgtcaaattgaaaagtggttgatttttagataccaacactgtaaagactgaacttttaaatttgaatgctaggaatattctttaaaaacttacttagattggcaaccaaatgaccatttgctttcactggagctcagcgatatttacacagcayttgagatattctctctacaattcaatttacaagctattagagaatctttgagataacaggattttttttttttttttttttgagactgagtctcgctctgtcacccaggctggagtgcagtggcacagtttcggctcactgcaagctccacctctcaggttcaagcgattctcctgcctcagcctctcgagtagctgggactataggcacccaccaccaggaccagctaatttttagtatttttagtagagacggggtttcactgtgttagccaggatggtcttggatctcctgacttcatgatccgcccacctcagcctcccaaagtgctgggattacaggtgtgagccaccacgcccggctgaaaacaggatttttttcatttatccagtctctttctggacttacaatgtagaatcaataaggtaaaaatctgtagtggggtctaggaattggtattcatttctttgttttgaagattcccaggtgattctgagatacaaccaggtttagaatctactagcctaataccatacaattttaatgggtttggtgttggtttgttggtataatttgcatatagtaagatcccctttttagtatacagttccatgacagagacatatagtcatgtaactgccaccacaatcaagatataaaccagttacattactctcccacatccctttgagtccacgcctccattcactcccagcccctggcaacaactaatctgtttactattcctgtagttttgtcatttccaggatgtcgtatgtttgaaatgtttgttttttggtgctgtaaagaaatagtattcgaacattaatttattttatttagtaaggccgtttttattttttgtwgaaagggtacacttgtcagcagttttgtcccaagagtatactgaacaaaggagacagggttatttataacctgacgcatttaccctactgctgtgtccggtttctattggctgaaacgggaccttacattttctatttgtttcgattggctcgcaacttagaattttttaaaagaggcaaaggtagaggagaacaaaggaaggaggaagtaacttgtgggatgctgagataggtaaaaacacctttaaataaggaagaggaacaggctgtgacctaatgcttgcttggaccagtataagccttccagggcaaatatttaggctaaattgtgggagctaagaacgtaaagtacagtgatttgtttattatggctagcagatatttaagaatgttagcacaggtctttgaataaattttgcttctaagagaagttactgtttattcctaattagggagcaaagtctttgaagaggaacctccacttcactttttacacataaatggcagcacttttggaggccgaggcgggtggatcatttgagactaggagttcaagagcagcctgtccaatatggcaaaatgctgtctctgctaaatatacaaaacttagccaggcatggtatggcacacctgcaatcccagctactcaggaggctgaggcatgagaatcacttgaacccagaagggggaggttgcagtggctcaagattatgccactgcactcctgcctgagcagcaaagagagactctgtctccaaaaaaaaaaaaagtcataaatggaatcacacaatgtgtagccttagtctggattctttggttaacataatacattaaagtgttacccgtgtagacgtggatatcagtagtttttccctttttattgagtagtattccattgtatgaatataccacagttggtttaaccatgtaatagctaaaggacatgttccatttggggccattataaataaaatcactgtaaacatttgcatatgggtgtttatgtgaacataagtttttatctcccttaggtgagtacctgggagtgggactgctggcttatggcaagaatttaacttcagtagaaactactggccgggcgcggtggctcactcctataatcccagcactttgggaggccgaggcaggcggattacctgaggtcagaagttcaagaccagcctggccaacatggtgaaaccctgtctctgctaaaaatacaaaaattagccaagtgcagtggtgggcacctgtggtcccagctgctcgggaagctgaggcaggagaatctcttgaacctgggaggtagaggtcgcagtgagctgagatcgtgccactgcactccagcctgggtgacagagtgagaccctgtctcaaaaaaaaaaaaaaaaaaaggaactgccaaactttaacattcccactagcaatgtatgaaagttccacttacaggctgggcgcagctcatgcctgtaatcccagcactttgggaggccgacatgggtggatcacaaggtcaggggtttgagaccagcctggccaacatagtgaaaccctgtctctaccaaaaatacaaaaattagccaggcatggtggcacacgcctgtagtcccagccactcgggatgctgaggcaggagaatcgcttgaacctgggaggcagaggttgtagtgagccaagatggcgccactgcactccagtctgggcaacaaagcaagactccagctccacaaaaaaaaaaaaaaaaaaaaagttccacttaatccacatcttcaccagcactaactagtgagtgtcagcattttttattttggccattctagtaggcatataatggaatcttacgatgttgatttgcatttccctaaatgggaagtgatatttaacatcttttcatgtgcttttttgtcatgcatttctttttttttttttttttttttctttttgagatggagtctcactcttgctgcccaggctggagagaaatggcgcgatctcagctcaccgcaacctccacctcctgagtagctaggattacagggcatgtgaccccacacccagctaatttttgtatttttagtagacatggggtttcatcatgttggccaggctgatcttgaactcctgacctcgtgatccacacacctcagcctcctaaagggctgggattacaggtgtgagccactgcgcctggcctgtcgttcatatttcttcagtgaagtatcaaagtcttgctgatttttttgttggtgttgtttcttactattgagttttaagagttgtttatatattctagatatagcttttatcagatgtgtcaatgcagaaaaatcagcagatattttctttcagtctgtggtttgtcttttctttctcaatattttattgcaaaaagcagaagttctcaactttgcagaagtccagtttatcagtttttttttaaaccagtcatgctttttgtgttgtatcttaatatttgcctaacccagcattgcaaacatttttcttgtgttgtcttctagaagttttaggtctgtgattcactttgaataaatttttgtatacgatgcaaggtatatatcaagattccatttttggttttttttttttgtggctacatagtaggtgtatttacttatgggagtacgtgagatattgtgatacagacatgcaatgcataataatcagggtaaatgggatattcatcccttcaagcatttatcctttgtgttataaacaattatattcttttagttattttaagatgtatagctaaattatcgactatagtcactgttgtgctatcaaatactaactcwtattcattctattttttgtacccattacttatccccacttctgccccacccccactatctcccagcctctgctaaccatctttttactctctatcttcatgagttcaattgctttgacttctagctcccacaaataagtgagaacatgtgaaggttttctttttgtgcctgacttatttcacttaccataatgacctccagttccatccatgttgttgcaaatgacagaatctcattcttttttatggctgagtagtactccattgtgtatatgtatcatttctttattcatctgttgatgaacatctaggtagcttccgaatcttggctattgtgaacaatgctgcagcaagcaaggagtgcaaataactcctccatatactgatttcctttctcttgggtgtgtagccggcagtgggattgctgtatcacatggtagctgtattcttagatttttgaggaactcagggttgttttttgttttttgctttttttcctggagtgcagtggcgtgatcttggctcactgcaacctccacctcccgagtacaagtaattctcctgcctcagcctcccgagtagctgggattacaggcgcccaccaccatgcctggctaatttttgtatttttaggggagacaaggtttcaccatgttggccagactggccttgaactcctgacctcaagtgatccaccagcctcagcctcccaaagtactgggataacagacgtgagccaccacccgtggcccagcaccaattgttgaaaaggcatattgcaagtcccctggttatgcacacttctgtccaatgtggctacaaatcaagggttaccatgaccccctcctcaggcttgataatttactatgatggctcatagaactctggaaaacatttatgtttaccaatttattataaagaatatgataaagccgtggtccccaacctttttggcaccagggaccagtttcatggaagacagtgtttccacagagactctcgcaggcacagttcacaacagggttcacactcctatgagaatctaatgctgctgctgatctgacaggaggcggagctcaggtagtaatgctcatgcgcctgccactcacctcctgctgtggggcccagttcctaacaggccacagaccagtaccagtacctgggggttggggactcctatgataaaggatacagatgaagagttgcatagggtgaggtcagttcagttctgacgctgcctctctggggtcagagtccaatcccacaggttcagggctcagtcccgtaagactgcttcccacttcagatgccaatcttgagtagtagcttgtcacttctacttccgaccaaccagctataaattggggttcccatgactccctcctcgaattcagttaatttgctagggtagctcacagaactcagagaaatatatttaccagtttattatatgaataatggatataatggaggatacagacagggagatgaagagatgcatagggcaaggtatgggggaaggggtgtggaccttccctgccctcttcagcacaccaccctcctggcaccttcacatacctagcaatccaaaagctctcccatcatcagcccttacaggtttttatggaggcttctgtgagactgagtaacaaacgtaagaagccatgtttgctaatttcttcatgccaacatcatttcatgaagcccctgattctgtgacgatgtgcagatgtgccgctttctggaagaatgatttgaagacaaaattggwtagagcacacagcccccatgtctcttgcccgagtcactgtatgtcttaaacgataaatgatcctagtcttgccttttcctacacttaagataacatctgggtcaggcgcagtgactcacacctgtaatcccagcactttgggaggccgaggcaggcagatcacctgaggtcaggagttcgagacctgcctgagcaacatggtgaaaccccatctctactaaaactacaaaaattagcctcgcatggtggtgggtgcctgtaatcccagctacctgggagcctgaggcacgagaatcacttgaacctgagagacagaggttgcagtgagctgagatggcaccactgcactccagcctggggcgacagtgagactccgtctcaaaaaaaaaaaaaagaaaaataacgtctgacaaggttagcgattatgcatacctctgtcatctatagccagatgcacttttgcacccaaactttgatgtgattctgttttaatgtaacttctgaggaagtctcatgtaacctttgagcatgtactaaccctccacaacctgtatatcagctctaaggggagacacagttttgaagcagtttgacagcacctctctgaaggacccctctggactatagtcatcagtctatagtcctcagtaagatttctaaataaaactaattatttaaaagctcaatttttttttctctagttgacatttcatggcataggcacaattgattaaatcgttggccattggttatcaactaacccttcagtctctctccccttcctcggagatagaggggtgagactgaaagttcaggccctctgattacacgattggttccctggcaaccagctccccattttgaggctatctagcccctaaccatcagtcatctcattggcatacaaaaagataacttaccactttggcgcttccaagtactttaggagctgtgtgtcaggaaacaggaagaccaaactttgtgtccaggccttctacatctgtgaatttacccaatcttcggttgaaaatatttggggaaaaaaaaaaccgtgtaagactgcctttgcaagccaggtgtgttggctcatgcccgtaatctcagcactttgggaggctaaggtgggtgggtcacatgaggtcaggagttcaagaccagcctgaccaatatggtgaaactaaaaatacaaaaattagccgggcatggtggctcctgtagtcccagctacttgggaggctgagacaggagaattgcttgaacccaggaggcagaggttgtagtgagccaagatcaccccactgcactccagcctgggcgacagaatgaggctccatctaaaaaataaaaaaattgcctttgcaaaattttaagttccaaaaagcaaaacttgcctcacacgaagtactacattgaatccacactaataaactgatatggtagacattgtatcaggtatcataagtgatgtagacattgtatcaggtatcataagtgatttagagatgatttaaagtatacaggaggatgtgcatcgattatatgcaaatactatgccatttcacgtagaggacttgagcatccatggattttgatattgtaactgcccaaggggtttttcttgcctgctacacaaataaagatcgtggcattgtagtaaggaaaaaatttaatagaccacatggccagccacaccatgtgggagatggagttagtactcatcatctcttccaaagctcctgggttaggggtttttcaaaagcagtttagggaaaggggtgcgactggcaaggcttgctgctgattggggcagagatgaaatgaaagggggtcatggccgggcgtggtgactcacgcctgtaatcccagcactttgggaggccgaggcaggtggatcacctgaggtcaggagatcgagaccagcctggccaacatgcgaaaccccgtctctactaaaaatacaaaaattagctgggcgtggtgtctcacgccagtaatcccagctactcaggaggctgaggcaggagaatcacttgaacctgggagatggaggttgcagtgagccaagatcgcgccactgcactccagcctgggtgacagagcgagactcctcctcaaagaaaaaaaaaaagaaatgtaaaagggttaaaactgtcctcctgtgcactgaattgtttctgggcgaggccacaggggagatggttggcaggtccaggtggagccatgcatgtcagacatggataaaaatctgaaaagatatcgcaaaaggccaatctgcagtagtggtggtacccaaaggaatggttggcagtctgtgtctacacctcattagaatcaggttcctcttctcccccagcttgatgaacttttttggttttttgtggtttttttttgttttttgagatggagtctcactctgtcgcccaggctggagtgcagtggcacgatctcggctcactgcaacctccacctcctaggttcaagtgattctcctgcctcagcctcctgagtcgctgggattacaggcatgcaccaccacacccaactaatttttgtatttttagtagagacggggtttcaccatgttggccaggctggtctcgaactcctgacctcgtgatcctctcacctcagcctcccagagtgctgggattaccggcatgagccaccgtgcccagccttgatgaactttcattcactttacaaaagcagttgcgtttggggcaaggcctgttatccttttaactatagcctaaatgtctctcaaagttagctctgcccaatagcccaggaataattaagggaaaggcaagatggggtggtatgttagctcagatctctttcactgccataattttctcactgaaataatttttgcaaaggcagtttcaatgtttccaggggtcccacatccaattccccacggatactgagggacagctctatgtgtttctccttgtaaatcacagtatgacatcctccctaacaactagcaatcactatctctttcttattactattattttgagaatgttctgtaaatggagttgttaccagacgggtcccgatccagaccccaagagaaggttcttggatctcacgcaagaaggacttcaggacgagtccgtagagtaaaatgaaagcaagtttattaggaaagtaaaggaataaagcatggctactccatagagcagccccgagggctactggttgcccatttttatggttatttcttgatgatctgctaaacaaggggtggattattcatgcctcccctttttagaccacataggggaacttcctgacgttgtcatggcgtttgtaagctgtcacggtgggagtggagcagtgaggacgaccagaggtcactctcgtggccatcttgggtttggtggggtttggctggcttctttactgtaacctgttttatcagcaaggtctttacgacctgtatcttgtgctgaccttgtgtctcatcytgtgacttagaatgccttaaccatctgggaatgcctgccgcccagcaggtttcagccttattttactcagctcctattcaagatgcagttgctctggttcaaacgtctctgacggaatcatacagtatgtgaccttctggaaatggcttttctcattcagcatttttgcccytgagatccatctaagttgttgcccatatcatttatttctttattgctgagtagtattctctagtatagttgtaccacagtttatttaaacattcaccygggaaaggatattttggttgtttctagtttgggactattacaaataaagctgctatgaacattcatgaacacgtttttatatgaacataaatgtccatacctctgggataaatgcccaggaatgtgatttctggggcaaatggtagaccccatatagtttggtcaaattttttatccaggccaggcacagtggctcacgcctgtaatgccagcactttgggaggccaaggcagatggatcacttgaggccaggagttcaaaaccagcctggccaacatggtgaaacctcatctctactaaaaatacaaaaattagccgggcgtggtggcacatacctatagtcccagctactcaggaggctgaggcaggagaattgcttgaacccatgagacgtaggttgcagtgagccaagatcataccactgcactccagcctgggcaacagagcaagactctgtctcaaaaaagaaaaataaaattatccactttgcctatatctgtcttctaattagtatatttagaagatttacatgttatataattactgatatgttgagatttaaacctgctattgtatgtctagtgttctgtttgttatttttgctttctttttcttgccttcctatgggttgtttgagcattttttagaatttcattttgttttagctgtagtatttttgagtgtatctctttatatagattttttagctatttgctctagatattatgctgtacatggataaacacatgtaacttatcacagtctaaaaatgttaacattttaccatttaagcagaccctagagaccttacctttctttacggtccctttaccctcccctgctgatcatataattgtcttaaatatttccactatgtgcattgagaaccacttcagacaatgttaccattttgctttaactggcaaacataatttggaaaattcaagaggagaaggaaagtctattatatttaccaattttttctcctttctttattctttcttccttcccaatgttccaagattcctttctggctgagcctggtggctcaagcatgtaatcccagcactttgggaggccgagacaggtggatcacctgaagtcaggagttcgagaccagcctggccaacatggtgaaacgccgtccctactaaaaatacaaaaattagctgggcgtggtggcgggcgcctgtaatcccagctgctcaggaagctgaggcaggagaatcacttgaacctgggaggcggaggttgcagtgagtagagatcgtgtcactgcactccagcctaggcgacaagggtgaaactcatctccaaaaaaaaaaaaaatcgttttttttggtgggggtggggacaaggtattaattttactctgacacccagactggagtgcagtggcacaatcagagctttgcagccttgacttcctaggctcaagtgatcctcccacctcagcctccygagtaaagctggaactgcaggtgagcaccaccacacccagctaattttttattgttttgtagagacagggtctccctgtgttgcccatggtcgtctcaaactcatgggctcaagcacttctcttaccttggcctccaaagtgctgagattacaggcatgagccacctcacccagccaagaacttcttttagccattcttttaggttaggcctgctggcaacaaattstttccatttgcccttatctgtgttatggactgaatgtttatgtccccctcaaaatttaagtgttgaagccctaatctggctgtgtttggagatggggcctccaaggaagtaattaaaattaagtgaggtcataaggatggagtcctgaaccaataggattagtgtccttataggagacaccagagagcttgcccactctcatgggcacaagaagaggtcatggagcagtgagcacacagggagatagtaaccacctacaagccaagagaggaagcctcaaggctgggcacggtggctcacgcctgtaatcccaacactttgggaggccgaggtgggtggatcacttgaggtcaggagtttgagaccagcctgaccaacatggtgaaaacctgtctctactaaaaatataaaaattagccgggtatggtggcgcacctgtaatcccagctactcaggaagctgaggcacaagaatcacttcaacccaggaggcagatgttgcagtgagccgagatcacaccacggcactccagcctgggcgacggagtgaaactgtgtctaaaaaaaagaaaaagcagcagcctcagaatgaaacctacccctttttggcaccttcctaatacaatctgagagtatcttggtttctccttcattcctgaaggatatttgcggaataaagaattctgaatttatagttcttttcttcagcacttgaaaaatgctgttcttcttccttctggcctccgtggtttctggtgacaaattctttgtcattaaaactggtttctcccctataggtaaggtgtcatttctctcttgctactttcaatgtttttttgtctttagtttgcggtggtttggttatgatgtgtcttagtgtgaatgtctttgtgtttagtcctatttagggcttgctcaccttcttaaattggtagatttatgctttttgccaaatacaaggaattttcaggcattatttttttgaatacttctcattcccacccattttctcctcccatctaggagtctratgacttgaatgttagctcttttgttatggtcccrctggttggctgggctctgttcattttggttttttccaggccctgttctgttgttcagactgagtgatttcttagtccagtaattcttctgtcttgtctgttctgctgttaagcccatccattgagatttcttattttgattattatatttttcagctctaacttccatttggtttttctttacatcttatatttctttgctgaaactttataatttttttagttatttcaagttcattgaagcatttttatgatgcttttttttttttttttaaagggacagggtcttagtctgtcacccaggctggagtacggtggtgtgatcacagcttactgcaacctcaaacccctggctcaagtgatcctcttgcctcagcctcccaagtagctaggcctttgggtgtgtgctactatgcccagctaatttttttttaagagakggggtcttgctgtgttgtccaggttggtcttgaactaggcctcaagagatcctcttgcctcagcctcccaaagtgctgggattacaaagcacaggtatgagccaccatgcctggccaatggctgctttaaaattcctgtcaggtaattccaacatctgtgtcatcttggtattgtcatctgttaattctttttccttaggttgagatgttcttggttcttcatatgatgagtgactttctgttgtattctagacattttgcatattatgttttaagactttggatattatttatataaatcttttatcaggtcttctctaacctgcgctgatcagtgtaaagggatgccttrttattgccagatggaaaagatgtgagcttctttggcagaagaaagtagatgtctaagccacacacctggatttgattccttgctctttacccagaagacatttgatattgggaaagttgcttttctggtttccccacctgttaaactggcatgtaatcagggcagcaaacacttactgtttgcctacacatgctagacattattctaagtgtttaatatgcaatacctacctcattgatggttgtaaggattaaatgggttgatgttcttacycattttacacatgaagaaacaagcacaaagagattgagaagcatagctagatttgtaggcattatctgggcagagaaatatagagaaagggtgctagtggtaaaaacaacagcatgtgcaaaggcacagagacacgtgggctcctagtatacagtagccctccgttatctatgggggatgtgtttcaaacccccagtgagtgcctgaaaccaccaatggtactcaaccttatatcggctggtttttttttcatacatacatatgataaagtttaatatattaattagccgcagtaagaaattaataacaataactgataataaaagagaacaattataacagtatgccagcatcactactcttgtgcttcgagaccattattaagtaaaataagggtttcttgaacacaagcactgagaggtgctactgcagctgatctgcttggtattcgagacggctgctaagtgactaacaggcaggtaacctatacagtgtggatatgctggagaaagggaggaatcacgtccctctgaaggacagagtgggatgatgctagaagtgtttatttctggaattttccatttaataatttggggccatggttgactgaggataactgaaacctcagaagcaaggctgtggataaggggactactatcttcagggaaaccttatttcagtaaaatatagccaaggaaagaaaatgaagctggaaaagcaggtcaaaggccaggttaggaagggctttgtacttttttattttgtaggtcatggagtgccaagtcagatttcttttatttttttttttgaaacggagtctcactctgtcacccttggctcatggcaacctccgcctcccgggttcaagtgattctcctgcctcagcctcccaagtagctgggattacaggcacgcaccaccacgcctggctagtttttatatttttagtagagacagggtttcaccatgttggccaagctggtctcaaacttctgacctcgagtgatccgcctcggcctcccaaagtgctgggattacaggcgtgagccaccacacacagcctccaagtcaagatttctctcttttttttttgagatgaagtctcgctctgtcgcccaggctggagtgcagtggtgcaatctcggctcacggcaacctccgcctcccaagttcaagcaattttcctgcctcagcctcccgagtagctgtgactacaggtgcgggccaccatgcctggctaattttttggatttttagtagagacggggtttcacatgttagccaggatgatctcgatctcctgacctcatgatctgcccgcctcggcctcccaaagtgctggaattacaggcataagccgctgtgcccggccaagatttctctcttgaaaaaaaatgttcctctggcaatggaatagaggatggattaaagggggcaaattagaggaaaatctggagccatttctaaattctttttttttttttttttcattgatcattcttgggtgtttctcgcagagggggatttggcagggtcataggacaatagtggagggaaggtcagcagataaacaagtgaacaaaggtctctggttttcctaggcagaggaccctgcggccttccgcagtgtttgtgtccctgggtacttgagattagggagtggtgatgactcttaacgagcatgctgccttcgagcatttgtttaacaaagcacatcttgcaccgcccttaatccattcaaccctgagtggacacagcacatgtttcagagagcacagggttgggggtaaggtcacagatcaacaggatcccaaggcagaagaatttttcttagtacagaacaagatgaaaagtctcccatgtctacttccttctacacagacacggcaaccatccgacttctcaatcttttccccacctttcccccctttctattccacaaaaccgccattgtcatcatggcccgttctcaatgagctgttgggtacacctcccagacagggtggtggcggggcagaggggctcctcacttcccagtaggggcagccgggcagaggcgcccctcacctcccggatggggcggctggccgggcggggggctgacccccccacctccctcccggacggggcgtaaattcttaattcttgcttttcaacttctttttggttttaggttgtgggtctgtcttgaacacaaatggtgaggttgaaatggatgctagtatcatggatggaaaagacctgtctgcaggagcagtgtccgcagtccagtgtatagcaaatcccattaaacttgctcggcttgtcatggaaaaggtatatgtgactaaagcagccttttcctaatgaattgttaytgttatacwgcagtgataagggctccaactgtgcagaaatacttgagatcactgttctcctaaaaatayatacaaaacagatgcaatgtatttgagtttctcaaatcagccatgatttttgactaggaatcacttgaccagtgaatgattactttatcttcctgtattttcttcacaccacatacaaactgaccagaccagctatttaatagcatgtgttaaagatggattgagttctctaaatttaacgtatatgtaaatcgcatctctagtaatgtcccatcaattggggtcttttcttttttaatacaaaaactcagtcaggcttttttcagcatacagaaaagcaaaccactggaatttgtatttttgatcctttgcacccagagagaagtaattatttcaacacagttggaacagttaaaaagatttaaaattttcaaaaaaacaatcattttctcttttctttctggctcagacacctcattgctttctgactgaccaaggcgcagcgcagtttgcagcagctatgggggttccagagattcctggagaaaaactggtgacagagagaaacaaaaagcgcctggaaaaagagaagcatgaaaaaggtgctcagaaaacagattgtcaaaagtaagtcttacctgtggctcgcattatttgggagttattaaaatatgaaagtttggcaaatacctggttatctacagttcttttgttttgttttgttttgttttgttttgttttgttttgtttgacacggagtctctctctgttgcccagactggagtacagtggtgcgatctcggctcactgcagcctccgcctcccaggctcaagcggttctcctgcctcagcctcctgagtagctgggactacaggcacacaccactgcacccggctcatttttttttttttttttttttttttagtagaggcggggtttcgccgtgttggccaggctggtctcaaactcctgacgtcaggtgatccacctgcctcggcctcccaaagtgcagggattacaggcgtgagccaccgagcccagcctctgacatgatttagtagaagaatttcacgtattaatgtatcagttatctggattcttcttgatcagtttatcttaaatagactaaacaggttatctgtgatctagtgtaccttataaacttaagtactctttcatagtttagagaaatcagcacaactcttagaaattcaaattagtcattttctgaattacagttttctgttacagattttgaaatcctaaataaaggactgcttatttaaagcaaaatttgaaagtaaaatgtgaatatggcctgggagtttataatggaattaaatctattgactccgcatactttttagagtaatgatatttaatcagaggtataccttgtatcacctagggagctttttcaaaatatgcatgtttaggccaccccgccagaagaatcagatttaaatagatctgaggtggagaagccagacaggtatattataaaaagggttcccaggtaattctgatgtgttcctcaggttcagagtctgttttaaaagattggccttggccgggtgcggtggctcacacctgtaatcccagcactttgggaggccgaggcggacggattgcctcagctcaggagttcaagaccagcctaggcaacacggtgaaaccccgtctctactaaagatacaaaaaattagccaggcatgatggtgcgtgcctgtaatcccagctactcgggaggctgaggcaggagaatcgcttgaacccgggaggcagaggttgcggtgagccaagatcccaccattgcactctagcctgggcaacaaagcgagactccgtctcagaaaaaaaaaaaaaaaaaaaaagattgaccttatgttggcagctgttgacagcctgactgagtgtgcttttgtgtctgtgggctagagtcatagcagtggggttgccttatgcatgatttacgttcattttgaaagatgtcaccacattgctttccagaaatttattaacacctctccaccagccactgctgctttacacgtaagcaagaggggttcctgccatggtccctgcactttaaaggaccctcataccataaacacacaaaacaattgacttattccagaacacataggacccctttgtcactcaacattggcacagcttgaccagtaaccccaatcattgctcttgtgactaacaccactcagccatcaaggaaatctccacatccgttgctctatgtcttggaagcaaaaggcacctgagttcaaagtttgtgggtagtgccactgttgacatcagaaatggacattgctttggagtgtggggaagattcgaacagcagaaggacttaggtaagagaaaaagacaaattaattaactgatgaaatagattcttgcatcacaaagtattatttccctgtagtgctaggtatccattttcttgcctctctgcatgttggaatatttagttctgaagattgttacagrgagggttctgtggtgtaatggttagcactctggactctgaagattttcatgagttagtgtagtgtctgtagaagttgcacatggggactgttactcttcagtttgtgtatgggtaggtctagaacagcaccatccagtagaaatactgtgagagccacaaatgtaatttgacattttctagtggccacatccacagtggatcacatctgaggtcaggagttcaagaccagcctgactaacatggtgagccctgtctctactaaaaatacaaaaatcagccaggcatggtggtgggcacctgtaatcccagctactcagaagactgaggcaggagaatcgcttgaacccaggaggcagaggttgcagtgagccaagatcgcgccattgcactccagcctgggcaacaagagcgaaactttgtctcaaaaaaaaaaagtgaaattaataatatattttatttaaccaaatatatccaaaatatttcaacatgtaatgcatataagaaattataagatgtcttgctctttttttgtactaaatcttcaaaatctggtgtgttttacacttacagtacatctcactgaggacagccacatttagctagcagccactcagtagccacatggagctgcagcttctgtaagtgcacrgcacaggtctagacagaacctgtgtgagaaaaactgataacagagaaaaacaaaaagctcctgtagttgctaactctccgtgttagcaactacatggatgttgactgttagaattatgaatggttttattttgatgaaaatatttaaaagatgcagttaatttcaaaaatacagtggtaaaatttttagctttcatgtaattttagcctttatgtattgtatttactaattataattcatattttaactttaacattaataaaaattttgtatattttacaattacttttgtaactttttggaaattatatctgcaaattacttcttttttttgttttttgcttttcttttttttttttttggttttgtttgtttttgagacagagtcacactgtgttgcccaggctggagtgcagtggcacgatctcggctyactgcaacctctgcctcccaggttctagcagttctcctcagcctcctgagtagctggtattacaggtgtgcgccaccacgcctgggtaatttttgtatttttagtagagagagggtttcaccatgttggccagactggtctcgaactcctgacctcaggtgatccgcccacctcggcctcccaaagtgctaggattataggtatgagccaccatgcccggccaactttttttttttttaatttttttagattagctctttatttttttatgaaaatacattctcatttttttatactttggatataattatatttcacttttaatcccttagattattgaaaatgagtataagtcaagattttggtagaaaaagaatgctataaagtggagctcacaaaagaaaaaatgaaaaagaaagtaaaaatcttcaaagaagcaggctgcttgcattttccaacactggaagcagtaaaagcaagcagtcttcttccagggtgacccacataaaattcacaaacaagacattacaaaggttttgttcaattaagatctacttattaatcaaaacaattaaaattagtaagaaaattattctcaccaaatccacagtttgaacaagtcagatgaaatcatggcaacctccttctttactaacggaagatttaattgctaatcatgaagaatcacacacaataaaacacacaccctgttacaggaattgagggaaagaggccgaataaacaattgattttaccggaaacagaaaacaatataaaatactgatgtaatgttcttgaaagaataatacaatgtatccaatatttagccaagcctaatcattcttttcatgacaccgtcagtacagtgtgtgcaaaaaacaatggaaattttctaggtttcagtaaaagagatttcaaaatttggtaaaatgccaaacatataattaagacaaaaataatgaaagtaatgatcattacctaggatagagaattccaacagattatgagtttaatggagaataaagtgagacatgaaatcatttgtaaaaatttttttgtcaataaattttttggttttgtggggttttgtttttttgtttttttgagacaaggtcttactttgtcacccaggctcgagtgcagtgttacagtcgtagctcactgcagcctcaatctcccaggctcaagtgatcctcccatctcagcctcccaagtaggtgggactacaggcatgcaccatgcctggctaattttatttttagtagagacggggtcttgccatgttgcccaggctcgtcttaagctcctgagctcaagggatcttccctcctgcttggccttccaaagtgctttggtgagccaccaaacctggccaatttttttttttttttttttttttttgagacagaatcttgttctgtcaacaggctggagtgcagtggtacaatctcggctcactgcaacctccgcctcccaggttcaagagattcttctgcctcagcctcccgagtagctgggactacaggcgcatgccaccatgcccggctaatttttgtatttttagtagagagggggtttcaccatgttggccaggctggtctcaaactcctgacctcgtgatctgcctgcctcagccccctaaagtactgggattacaggcgtgagccactgtgcccagcccaaagttttttaataaaatagttactcagttcaactagagtgtaccgtggtactcatagtaccatgagtggaccattactgcttgaagaaaaacaagcctaaatcattccatgtttcattggctttatatctcctccttaaagtgtgatttttgaattaagtgaagaattgaaagaaaactttctgttttagacactaatttcaaggattgttgaaggcaagcctgtgataatggagcaaatgtggttggtaaatgagagatgtacaagcaagaagcttggctaagaatccagaagcatactatgtgacatatacagcccatcatttgaaatttgtttctaggatgcatgacctccactgtgccactaatggtrgtgctttggaacaatagagggaataaatgcagtgtcttctagatatgcccaaagatggaatatcttgactaaacttatatttcaccctataacaagtctcaggtgcacgatgagaataccaacgaaatgctgttgaagtaattaaattgaatttagataagaagaattcagcaaaaccataaaaagtcttcaaagagcaaatcatggactttaacaaaaagtgaaattaattttgaacttgtattatttagtataaatctgatttctattaataaatttaacaaaacygtaaccaaaaatatatatatattatataaaatatatataatatatattatataaaatatatawaatatatattatataaaatatataacatatattatttatataatatatattatataaaatatatataatatatattatataaaatatataacatatattatataaaatatataatatatattatataatatatattatatattatataaaatatatataatatatawtatatattatataaaatatataatatatattatataaaatatatattatatattatataaaatatattatatgttatatataaaatataatatatattatatatataaatttatatatataaatttaaattttttttcctgggagtatctacttgcttatttgacatacacacacacacacacacacacacacacatccatataaatatatatatgtggctacttcacctttaaaggatttaattttttttttttttttttttttttttttttttttttttgagacagagtcttgctgtgtcacccaggctggagtgcagtagcacaatctcggcttactgcaagctccgcctccagggttcacgccattctcctgcatgccattctcctgcctcagcctcccgagtagctgggactacaggcgcccgccaccacgcccggctaattttttgtatttttagtagagacggggtttcaccatgttagccaggatggtctcaatctcctgacctgatgatctgcccacctcagcctcccaaagtgctgggattacaggcgtgaaccaccatgcctggccgatttaaattttttttaagtttatagaaacaaaatcaaaactgcatgtgagatatacaacaaaaatgatgttccaacaaaatccagggaaattgaaacaagggaacaaaaatatttacctagcttgaagaaaattcatagagagataatccctaaaccagtttctatagaaactatttttcagttcagtataaatcagagcatagtatcatctgaagagagatttgaacaaaattgaataacattctcctgtttttgattttcttcagaatataccagcatcaaaacctaaaagaatttatctgcatagacctagatactgtttaaaagattataaaaagactataagtgattgtgatttatatgatcaagttaaaaattttaatgcactctgcaatcacaatttatatataaatccatatagtatttgagtgtgatcatgtaaaaatcagtattcatttctaaatctaagtactgctttgagaattttgttggtaattccagttgctgctgcttcagcagaaggaagcttctctaaattaaaattaattaaaaacttgctaaaaactatgttgactcaagaaagattgtcttttttgccattttgtcaatagaagtcacgttaagtataagaacatcatcaggccgggcttagtggttcacgcctgtaatccyagcactttgggaggccgaggtgggtggattgcctgagctcaggagttcacaaccagcctgggcaacatggtgaaaccacgtctctactaaaaaatacaaaaaatcagccaggcgtggcagtgtgcacctgtagtcccagcttctcgggaggctgaggcaggagaattgctagaacccaggaggcggaggttgcagtgagctgagatcacaccactgcactccagcctgggtgacagggtaagagtccgtctcaaaaaaaaaaaaaaaaaaaaatcagtactccctggaatgaagccaagaaaaaatatttttatggaataaatacataatttattaaatgtgtctgtgtgtgtgcgcgtgcatgtgtgcgtgtatrtgtgtgtgtttgccattcatctgccatcaccagccgattaacaaatgaccctggtatacacaataataactaagttaagtcgtcactggtagtttgtcaactttcagtcatgtgaaaaccatagctttttaatatttttctagataaaatagtatggaggttcctaaagaaattaaaaatagaactaccttataacccagcaatcccacttctaggcatatacccaaaggaaatgaaatcaccatttagtaaagatatctgcacttccatgttcattgcagcattattcaaaatagccaggatattgaaacaactacagtgtctgtccatcaatgaagaatggataaagtataatgtatatatacagtggaatataattccttggtaggaaaaggaggagatcctgccatttgcagcaacttgatactaagtgaaataagccagtcacagaaagatactacatgatctcacttaaatatggaatctaaaacaaaaagaaacattgaggctgggagtggtggtggctcacgcctgtaatctcagcactttgggaggctgaggcgggcagatcacctgaggtcaggagttcaagaccagcctggccaacatggcgaaaccccgtatctactaaaaatataaaaattagctgggcgtggtggtgggtgcctgtaatcccagctacttggaaggctgaggcagtggaatcgcttgaacctaggaggcagaggttgcagtgagccgagaccacgctgttgcactgcagcctgggtgacgagcaaaactccatctcaaaaaaaaaaaaaaagaaagaaacattgaatacatagaaacaatgaatggaatggtagttaccaggagtgggagaaatgggaaggtgtaagccagagggtacaaaattactgttatgtagcatgcgtatgtctggagaagtataatattaggactatagctaataatattgtgtactggaaatttgctaagaggagattttagaggccagatgcagtggctcatgcctctaatcccagcactttgggaggccaaggtgggcagatcacctgagatcaggagtttgaaaccagcctggccaacatggtgaaaccccacttctactaaatatacaaaaattagctgggcatggtggtgggcgcctgtaatcccagctactcgtgaggctgaggcaggggaatcacttgaacctgggaggcagaggttgcagtgagccaagatcacgccactgcactccagcctgggcaacagtgcaagactccgtctcaaaaacaaaaaaaaggctgggtgcggtggctcacacctgtaatcccagcactttgggaggccaagacaggcggatcacgaggtcaggagttcaagaccagcctggccaagatggtgaaacttcatctctactaaaaatacagaaaaattagctgggtgtggtggcacgcacctgtaatctcagctatttgagaggctgaagcagagaattccttaaacccaggaggcagaggctgctgtgagctgagatggcaccactgcatttcagcttgggcgaaagagcaagactccatctcaaaaaaatttaaaaagtagattttaggtactcttaccacaaaaaataaagaaaggtaattgtgagatgataggtatgttattctagttgactgtaatcataatttcactatgtatatcaaaacattcatggctgggtgtggtggcttatgcctgtaatcctagaactttgggaggccaagacaggcagactgcccgagctcaggagttgaagaccaccctggggccaacatggtgaaaccccgtctctactgaaagacaaaaaattagccgggagtggtggtgcatgcccataatcccagctactcaggaggctgaggcaggagaatcacttgaacctgggagatggaagttgcagtgagccgagatcacacgactgcactccagcctgcgccacagagcaagactgtctcaaaaaaaaaaaaaaaagttcaccttatatacagtgaaacatatatacaagaaaaataccgatttttcaagatacatttaccacagtaacaggatagaacatacttataacttcccaatattaaatatatggtatgtgggcctccagttgtatttgtattgttgccatggccccttgcaaatgttagaggtgggcctgccaccagcagggactgggagaaccctccttccttatctaacaggtaaagggtaacactgttactttaatttgctcttccctgacagtgagtttgagcattttacatttgtttatgggtttttcctttttacaaatttgcctagttttgtcctacactcattttttcctttgaattattttttccctttcttatcagtctcattgttttttcttttacttttttaacattctttatagatagatgggatttctctatgttgctcaggctggccttgagctcctgagctcaagtggtcctcctacctcatcctcttgagtagcaggaactacaggtacaagccactgtacctggctctttcttatgagccttaaggttatgttctgctgtaaataaaatttaaaaacccaaatctgctgtttttattttgcttttgctatggtatttttgccgtataaaagattttagggccaggcacggtgcctcacgcctgtaatcccagcagcttgggaggctgaggcgggtggatcacttgagcccaggagtttgagaccagtctgaccaacatggtgaaaccccgtctctactaaaaatacaaaattagtcgggcatggtggcgcatgcctgtaatcccaactacttgggaggctgaggcgggtggattacgaggtcaggagatcaagaccatcctggctaacacggtgaaaccgcatctctactaaaaatgcaaaaaattagccgggcatggtggtaggtacctgtagtcccagctgctcgggaggctgaggcaggagaatggcatgaacccgggaggaggagcttgcagtgagccgagatcacgccactgcactccagcctgggcgacagagtgaaactctgtctcaaaaaaaaaaaagagagagattttagggctaggcgcagtggttcacacctgtaatcccagcagtttgggaggctgaggtgggtggattacttgaggtcaggagtttgagaccagttgaccaacatggtgaaaccctgtctctactaaaaatacaaaatgagttgggcgtggtggcgcatgcctgtaattccagctacttgggaggctgaggcaggagaatcacttgcacccaggaggtggaggttgcggtgagctgagatcacaccattgcactccagcctgggcaacaagagcaaaactccatctcaaaagtgaaataaaataggccaggtgcagtggctcacacctgtaattccagcactttgggaggccgaggtgggtggatcacaaggtcaggagttcgagaccagcctggccaacatagtaaaatcccatctctactaaaaatacaaaaactagctgggcatggtggcacacgcctttagtcccagctacttgggaggctgaggcaggagaatagcttgaacccacgaggcagaggttgcagtgagccgagatcatgccactgcactccagcctgggcaacagagcgagactccgtctcaaaaataaacaaataaaaataaatttaaaaatttttaattttttttttctggcaggtggattacttgaggtcaggagtttgagactgtaaccagtttagggttacagtagctccccctatctgcggtttcactttctgtgctttcagttacccacactcaaccgcggtctgatgttttgagaaagagaccacattcacataacttttactacagtatattgttttaattgtattattttattattgttaatctcttactgtgcctaatttatcaattaaaccttatcataggtatgtacatacagtataggcgaaaacagtgttgaggtcagtgctagctgaggtttcaggcatccactgagggtcttggagcgtatccccttcaaataaggggggactactgttttacacctactgctgctgtgaacacttgtgtatgcttttttggtgaacacctgtccacatttctgatggacagatacacaggtgtataattgctgagtcatggaatgtgcatatgatcagttccagtagatactgtgaaatgattgaaggggtggcctgcccctccacacctgtgggtgtttctcgtcaggtgggacgagagacagagaaaagaaagagacacagagacaaagtatagaagaaaagtgggcccaggggaccggcgctcagcgtacggaggacccactctggcactggtctctgagttccctcagtatttattgatcattatctctgccatctcggagagggggatgtggcaggacaatagggtaatagtggggagagggtcagcaggaaaacgtgagcaaaggtctctgtgtcataaacaaggttaagaaaaggtgctgtgccttgatgtgcacgtatacaaacatcttggtgcattaaagagcagtattgccactagcacatctcagctctagccctaaggctgttttctcctatctcagtaaatagaacatacaatcgggttttacacccgagacattccattgcccagggatgagcaggagacagatgccttcctcttattacaactgcaaagaggccttcctcttttactaatcctcctcagcacagaccctttacgggtgtcaggctgggggacggtcaggtctttcccttcccacgaggccatatctcaggctatcacatggggagaaaccctggacaatatctggctttgctaggcagaggtccctgtggctttccgcagtgtattgtgtccctgggtagttgagattagagaatggtgatgacttttaacaagcatactgccttcaagcacttttttttaacaaagtacatcctgtatagccataaatccattaaaccttgagtcaacacagcacatgtctctgcgacacagggttggggctagggttacagattaacagcatctcaaggcagaagaatatttcttagtacagaacaaaatggagtctcttatgtctacttctttctacatagacacagtaacagtctgatctctcttttccccacataacccttttctttttgacaaaactgccatcatcatcatggctcgttcttgacggtcgctgtctcttcggagctgctgggtacacctgcagactagcaacagacagaacaggcaygcaaggattaatatgaaatttacaataatagtacttccgatggtcttaacccaagtgacagggttaagatttgtgagaccatcaggaactgctgattgcctcagttcctggtaccaaatttaaatgggcttttgatgctttgaacatttgctcttttaatttggaaatgtctaaagtgagattatcttctcttccctgtgggtggcgtctaaccatgtcccagtgatgctcagactcattataaactcggggtgtaatacaaaagtccgacgtattccagtcacactgtaactggaaacgatgttctaagctcatgagcctatcttccatccaaatgacagtttgtctaagatcattaatttgatttgccaattttttatcaataccagattgtgaattccacaatcttgtagaattattgtgccaatggttaacaaagtttactgtctgaacagaagagtacaatgcaactcctgccacagcggccgtagctgtgactgcaattaatcccatagtcactgcaattaaagtaaaattgaattttttggctctatttaagatggcttttagtacttcagtcaaaatatggatggatggtgaggcctcccacagtcggtccatggacacagggatccacacgccttctcttgctctcactagcagaatatggtgttgccaattaaaagtcgaatcaatgcaagtaaacaatctgcagttttcgcaggttatagtttgggagtctggtttaataactatatttcctaacactagcatataagagggctttacacaactttgcaaaggaactgttagactggaatttaggtcgatagtataaaatggcttacgatctcttgtttctgtagtttgatttccagaccaaattctaatgcagtatgaggccacagtaagcctccataattctggatgttcaggaccagaaacaggacttaatatttctggtcttggagtagagattcctttttctccccattcccaagggtagaaagactgtaattttatgtgcttctgtttgtctaaactttctgttaagtcactattaacagctggactcacttgtgcactgggacacaattgagtttgtcctgtgcaattgtggtagcattgacctcaaggtgcccaatctgtaatagttctgaattcatcattttgtaatatcaccgcactattggccacacattcttcccaaactaaaacttctgtgtcttttgatcctttgggaatttccttggggcaaggttttcctttaggcctaaattttaatgatctttgataaggaaagtcctgtaaataatttacctgtggcctgtgtgacattctgtttaccatgtgataagtaagtctactggtggtactgacagtaggtactgctaccaaccaattttggattgcagcattaaacatcctggcgcatttttaagtgtatctgagtgggctggagccctcgtctgggccaggaaaaaaaaaaaagccctccgatccgtcttttagttgcttctcttccttttttctctctggtttctcatcactccaaccagccgcaaccatgcccaggaagaaggcggcggtggcggcctgggaggagctgagctcgggcaacggcactgcccacgccagggcccaggaaacgtggcggccccgcagccggaagcgcgagcctcccgagcgctgcagtagcagcagtggtggcagcagcagcagcggcgacgaggacggcctggagctcgacggggcccccggcaggggcaagcgcgcggcgcagcctgtggcagcaggcaaggtgggcggtgcggctgtggtggtcgccgaacccgagcacaccaagaagcacgtcaaacttgagacgtgctgtgtttactcaaggtttaatggatttagggctgtgcaggctgtgctttgttaaaaaagcgcttgaaggcagtatgcttggtaaaagtcatcaccattctctaatctcaagtacccagggacacaatacactgcggaaggccacagggacttcctcacaaagtgcaaaggggagcttttgattttgggggcaaccaactgggacttgattggtcgaaaataagtgcctaaacaaggccaggagtggtggctcaggcttgtaatcccagcactttgggaggccgaggcgggcagatcacaaggtcaggagatccagaccatcctggctaacacggtgaaaccccgtctctactaaaaatacaaaaaaaattagccgggcgtggtggcgggctcctgtagtcccagctaatcaggaggctgaggcaggagaatggcgtgaacccgggaggcggagcttgcagtgggccgagatcgcgccactgcactctagcctgggcaacagagcaagactccgtctcaaaaaaaaaaaaaaaaaaaaaagttcctaaacaggaagctgcgtacggcaatatccgtcagaatttgtggggaccccataggtatgggtgcctggcgggggtccgggtgcggacagtggtctctggctcctgtgctgcacacagcctcctcatcaccacagaaggaaagctgtggagctggggtcgaaatgagaaggcgcagctgggacatggtgacaccaagagagtagaagcccccagactcaccgagggtctcagccacgaagtgattgtgtgcagcgtgtgcgcggaaccacaccttggccttgacggaaacgggctccgtgtttgcgtttggggaaaacaagatggggcagctgggccttggcaactagacagacgctgtccccagccctgtgcagataatgtacaacagcctgccaattaccaaaatggcctgtgaggctgaaaatcagtatgataatggactgcaaaggaaacctctattcctttgggtgccctgaatatggtcagctgggacacaactcagatgggaagttcattgcccgggcacagcagatagagtatgactgcaaactagttccccagcgagtggccatcttcattgagaagacaaaagacagattctgcctgtaccaaatatggttatgcgagacgtggcctgtggcgctaaccacatgctggtcctggactcccagaagtgagtcttctcctggggcttcagtggctatggctggctgggctacacagagcagaaggatgagatggtcccccgcctggtgaagctatttgacttccctgggcatggggcttcccagatctatgctggttacacctgctcctttgccgtcagtgaagtgggtggtctgtttttctggggggccaccaacacctcccatgaatctaccatgtacccaaaagcagtgcaggacctctgcagctggagaatctggagcctggcttgtgggaagagcagcatcattgtggcagccgatgagagcaccatcagctggggcccatcaccgacctttggggaactgggctacagggatcacaagcccaagtcttccactgcagcccaggaggtgaagactctgcatggcattttctcagagccggtcgccatgggctactcacactccttggtgatagcaagagatgaaagtgaaactgagaaagaaaagatcaagaaactgccagaatacagcccccaaaccctctgatgctcccagagactcctccgactccacacctctcatggcagctgtcatttccatgtgcactgggacgggaagtcaaacaaggaatttaaaaaagcaaaagtggaccgaaggtgcatttttatttagactccctgaggttccgttttacaagtgatccaacgttaactacctttttttctgtttgctttccaaagacccttttttcctcttaatgtcgaattaaaatacttgctcgtagttgacttaccattcctacaaagaggcagaaactttgagcaatctaggtgttttttttttctttcttcctctcctgaatacactccccaaaacactcctttccagttataattagcatcgtgatctaagtggatgctacatggaagaggaatcgccatttactcagaaaaaatgtcccttacaggaaccggcagcagctaggcgaagtcgccggcccacctccatccaaaatcatgctcgcgtgcttcggaagcatccgggtcactcctttcccgctttttcttgcagatcggcctaggccggtgtcagttctgtttctcctcttggctgcctgtacacccacagccttctggctgcaacattatagaatcagctgtgtcccccctggtgggggattggggatctgtgtttagccacttatatctactttagctgttaaagaagtccaaatgaaaatcaggtgattatggaaccatggggacttgggggtggagcaaaggtgggaacatttgtatcagttgagtcagcttcatggctccctgcggagccagggctgagccttgtcacacgcactcgccaattagagattgatcagccagcagtcaaatgcattctccagtccttgcaagaaggatcagccctttctgtaccagcctcgatcgccttgtactttggtctccttttctcccctgcctggatcctgcctcgtgcgggccatcctgttgctgagactcggggtaccgttctgctgacccagctccctttagtcacgtttgcttggctctagtaccaaatagttgggattaccaaagagtccccttcctcacatgtcagcacggatgccgtgactgccacccgtgtccccgtcaagtgcccgtgcccaagctagccgctgtgtgcactgcactgagtgagttatgaggtgcctttcccggaaccctcctcttgcctggacccaagagaggcaacagctggggctggggctcttggtttccagagggtctggactggtttgggtgctttaaaatagatatttagttcagtggtgcttatgggggagatgggactagaaacttaagtgtgagatttgggtggatgggaaagttaaatattggtctcttcaagttttttctttagctattgttaccacttgtcactgtctccatgttaaaatgccaaaaatgatctagttgttgttacttttttccctattttccaccccagtcgctccttaccatgactcctgcccttggagggcatgtagcagtgtctgtccagccagtcccaaggccctgtgggaagagactggcctgcatctctctaagacttagtctgacgccacgcgcatctcttgatctgtgttcagtcagtagtccagggaagaagcttctgccacttcagagtttgctaaactaacctaatttgtccaaatcaccccaaaaccaccatctctgactcaagcttccatgcgacagcctgatccatttccctggacaggtctctcctggaacgcagcccaggcacctgtrctcctggaacccttgaggtctctcctttgagtcgtggtcaccgagagggttgaggacgcagcacctgaggtcccagcctttgcaggagccgccctgggcagagctggacttagatcttcggtggcctcatgtaaacccggcagccagcctcttctagaaccctagcccagggactggagcaggaaagggatcttcaaagtgaagactgccttgtcccgcacctccttctggcttagattgaaaaatgggcttcctaatgggttaaatcctttaaaacaaagagttgtgggggaagggtgccgtgcactcctagagaaaggtacacagttgcccggctgggaacgtgcttggcacatccctgcgagcatctgactggtcttctagctcaggaaaaagaatttgaaagaggcttagtgtgaaggggaatcaaagaggaggttgtgatttggttgaaggtgcctggtttagtgctgtaattgtcttactttatatatatatatatatatatatatatatatatatatatatatatatatatatattatcttggagtaaacattttaaataaacgacatcattatctactgaaaaaataaaaataaaaaataaacatcctggtgctctccctaggcaagtaggaggataacgatacccagtggaaatatttgtcatcattccttcttcctcaggtttggcagggcaacgatcatctgtggggccaggtacccatacactattattaacatatatttcagtaggattatccatccatgtgactgcccaaattaagggcgggaaagccacataggcccagtggtataattagctgcagctgctcctgcaggcatggggagacttaccaccattgatacaatcatcaaagctgcaagcggccaggcatggtggctcatgcctgtaatcccagcactttgggaggccgaggcgggtggatcacgagatcaagaccagcctgaccaacatggtgaaaccccgtctctactaaaaatagaaaaattagctgggcgtggtggcacgcgcctgtaatcccagctactcaggaggctgagacaggagaattgcttgaacctgggaagtggaggttgccatgagctgagatcgcaccactgcactccagcctggtgacggagcaagactccatctcaaaaaaaaaaaaaaaaaaaaaaaaagctgcaagcagcctactctctggagtttgtgtcacctttgtgttctcaaggcttttttttttttttagctaactgtgccagcttctttaattgtgcccaagtcagtggctccgctttcttggtggatggcaacttcgtctgttcttctgacatcaccattctgttcatcatatgagttgatggtgctcgattgcagtgtttctgtctccgcggaggcgcttttttttgcatctccgatgggttcattgcagaactttaaatgtctagtgggtatccaaacaggaagctgattttctcctagtgaaacaagcaaaacctttcccccacgttaccaccttccctatttcccatgtcttatttttgttgtctttccaccaaatcagttttccttcatgtgggctgttctttttaccagtaagatgttctgcagaagtagtagtctgatttctataaatgtttaaaaaatttaaagtatagagtgctagattaagttgcatctgaggagtggtacactccttactgtctcccccttcgttttgtttaactaattgagttttgagtgttctattagttctttcaactatggcctgtccttgggaattatagggaattcctgttgtatgtgtaattttccactgatttaagaatttttggaaagctttactacaatatcctggtccattgtcagttttgattttttctggaactcccattacagcaaaacaagacaataaatgttttttaacatgggaagtactttctcctgtttggcaagctgcccatatgaaatgtgaataagtatcaactgttacatgaacatatgataatcttccaaatgaaggtacatgcgtgacatccatttgccataacacattaggacatagacctctgggattaactcctgcctcttgagtgggcaggtgtaggacttgacactgggtgcaatgttgtacaatattttttgcctgtttccatgtgacgtcaaatttgttttttaatcctgctgcatttatatgagtcaaagcatgaagttcttgtgcttttatgaatgcagatggtaccagtaagtcagcttgttcatttgctttagttaaaggccctggtaaattagtgtgtgcccgaatatgagtaatgtaaaatgggaaatttctgtttcttacagtttgttgtaataaattgaacagctggtttaactgatcatccatgctatatttaattagagctgtctcaacatcccttgtagcctgtactacatatgcagaatctgatacaatattaataggttgattaaaatcttgtaacactgtaaagactgcaaccaactcagctctttgagccgattgataatgagttttgattacttgctcttttggccctatgtaagctgcctttccattgctggaaccatcagtaaacaccgtcagagcattttctaaaggttcatgtctcgtaattttaggtaaaatccaagtagtcaattttaagaactggacgatttttgttttggggtaatgattatcagtaattcccacaaaatcagtaagaccaatctgccatgcaccagaattgataaaggcttgtctaactcgttccttgtttaaaggaacaactattttgtctgggtcatttccacacaattttattattcgtaattttgcctgaccaattaatgtaactatttgatccaagtacaatgtaaaagtcttaattgtactgtgaggaaggaatgaccactccacaagatcagtattttgaacattgatgcctgctggagaatgtgcagtagcaaaaatcaaaagttggagtggggctaagggatctattctatttatttgtgctggttgaattttttcttccactaatttaattttttttgttgcctctggagtgaatattcttttactatttaaatctgggtctcctcttaagatagagaacaaatttgacgtgacataagtaggaatgcctagagttggccgaatccaattaatatctcctagcaatttttgaaagtcatttaatgtttttaatgtgtcttttcttatttctattttttgtagcttaatttttctatattctatttgcatccctaagtaatgaaaaggagtagaggtttgaatcttatcagatgctattgccagtccagcattggcaacctctgcttgcagaaatgtataacagttaattaatttgtctctcatttctgcagcacataaaatatcatcaacatagtgaatgatataacagtctgaaaacttgtctctaactggttgaagagcttgacaaatagttggactattaagcattccctgaggtaacactttccactgaaatctggtggctggttctttattatttatggctggtatagtaaaggcaaatttttcataatcctgctccgccagagggatggtaaaaaagcagtccttcagatcaattataattaaaggccagtcttttgggatcatggccagagagggcaacccgggttggagaggccccatgggttgaattacggcatttacggctcttaagtcagttaacttatgccatctgccggattttttttgaattacaaacacaggagaattccaaggcgagaaygaaggctcaatatgtcccttttctaattgttcctttgctaataaatgtaaagcctccagtttttgttttggtagcggccactgatttacccataccggtttttctgttttccaagttaatggaatgggtttaggaggctctacagtggccacccctaaaaaggataccctattccttttctttcttgatttctctcagtctcaagtggaactttaatgccattttcattttttcctagtccctttcctggtatatatcccatattagtcatgattttttgactcctgaggctgtataatggagcaggcatagtgatttccgcaccccattgttgtaataaatctcaaccccacagatgaagtaatcattggttgaagtaatcattgaagtaatcattggttgaacagtactttcttgattatccggccctaaacaatgtaatagtactttgatacacttctgaggagtgcctacgccgacaagtcctgtaacagcctttcatttaggccaattttttggccactggtttaaagcaatgatagagacatctgctccagtgtctaccaacccttcaaactgttttccttgaataatggccttacacacaggtctgctctctgagaactgacttgcccaatatgcagcctttcctgccggatcagtgcttccaaaccctcctttctatttatctcactgtttccaaccttaatataaggcaggagtaacaactgagcaatcctgtctcctggactggcactgcaaggaattgaggagctaataaccaattgaatttcacctttgtagtctgaatcaaccacaccagtatgaatttgaactccctttagatttagacttgatcttcctaagattagtcctacagtcccctcaggcagggggccatatacccctgtgggaattttttgtgggggctcccctgaaagcagagagactgcttgtatagtacataaatctactgctacactgccgcttgtggcaggggacaattgttgtattgtggtaactggctcattccctgaggcacttgtgacagtgggggttgttgtccctgaaaaccctgaggaacaaagggctgaactgggaatgccccagtttgttgcagggcctgaggctggcccctttgctgtttcctgacaatagttgcccatttctatcaaatttagaatttgatagaattctaatagtgtttttcttttttacatcttggacataagtcaggtggctctttatctgttgttgttgtagtagcttgaatagttatattttgtttttttgaggctgggcaattcttttttagatgaccaatttgaccacaattataacattttcccccaaatgttctaacttgtcctcctaaagcaactcccattattgcttgagccataagcatagttttatgcatagctcctccaattccatcataggcttttacgtactctgagattacatctgatcctgtgggaaccttcccttttaatggcttagtggctgattgacactcaggattggcgtttccatatgccatcaactccactatgaccttacgggcattttcatcggtaattgacttttgagcagcatctcggagccttgccacaaaatcagggtagggctttttagagccttgtcttattgtattgaatgaggggcaggtggttcctgggtcttggatttttttcccaggccctaaggcagatagctctaacttgctcaatggcctcattttgcattattgcttgttgattagtagtgctccaattttgaccttttcctaatagttgatctgcatctatgttaactggaggattggcagccctattwcttcagacctgttcttgtgccccatcaatccaccaactcttaaattgtaaaaattgagacagtgagagtgatgatttggccaaaatctcccaatcataaggaatgagtctatgtccatgagcagtggaacctaataatgttctcatataaggggagttgggtccatactgttttactccctctttcatatcttttaacatttttatagaaaaggactcatatctggccccaactagggtaggcgctccttcttgggccccttctccaggtggcatcggtactgggaattgccacgcctcaatatctccttgtttccttgccttatcaataattttatgtaatgcactaccttgtccactaggtggtgctgtaggataaagtcttatagtgggcggctgaggctatagcgccctgccctgtggtgctggaaacactcctggctgtccatactgattttctgggggcggccgatactgaagttcggctggcggccagtattgataggctactggcggttgggtcttattttctaccggctgatattgtggatactgtatttggattggcgttgccatgacagagactctctatttgatattctcttggggtttgtacttgtctaacctgcatttgaggttgtaatgttacaggcatctgaaccgctggaagaggagttggccatcatggtttagactctgatggccccgctaattctggacctttttcttctaattctaatgcttcaggatatattacctcctgtaattgattgtagtcaacattttgcattgaccgagccattacagactctgctacatatttacaatgtgaacttttgaactttccattcctttctgggattctatccctgcctattcttcacaatctattacacagctttcaggggcatcagcaactgaaacgctatcttctcctgtttgaaacagttctaaattagctgctttaataatggcccaatcattccatacggtaagtgggatgattttacccttcctacttgcttgttttaattctttgccaattttttcccaatcttttagatctaaagttccctgttctagaaaccatgggcagaattgttctattgtttgaaatagcgtgattagatttttttgtagagactctaactcccccctttttaaaagaattttaataaagctgagataagaggcatatttactttcagtttgccccattgttaccctaggttcttccgagggcacaagcttaccacaagactgactgtagacgtactcgggaatctctcatcaacttgttctcaatgaccacgctctagctcaccttcaccctagagaaaagcacccacgttgggcaccagatgaaggggtggccagcccctctacacctgtgggcgtttctcatcaggtgggacgagagactgagaaaagaaataagaggctgggtgcggtgggtcacgcctgtaatccccgcactttgggaggccgaggccggtggatcacgaggtcaggagatcgagaccatcctggctaacagggtgaaaccccatctctactaaaaatacaaaaaattagccgggcccagtggcgggtgcctgtagtcccagctactcaggaggctgaggcaggagagacagagacaacgtatagagaaaaaaaagtgggcccaggggaccggtgctcagcatacggaggacccccaccggcaacagtctctgagttccctcagtatttactgatcattatctctaccatctggagagggggatgtggcaggacaataagttaatagagaggagagggtcagcaggaaaacatgtgaacaaatgtctctgtgtcataaataaggaaaggtgctatgccttgatgtgcatgtatacaaacattaaagagcagtattgtcgctagcacctctcacctccagccctaaggctgttttctcctatctcagtaaatagaacatacaatcgggttttaaacccagacattctattgcccagggacaagcaggagacagatgccttcctcttatcacaactgcaaagaggccttcctcttttactaatgctcctcagcacagaccctttacgggtggggtgtcgggctgggggacagtgtcgggctgggggacggtcaggtctttcccttcccacaaggccatatctcaggctatcacatggggagaaaccttggacaatacctggctttcctaggcagaggtccctgcagccttccgcagtgtattgtgtccctgggtacttgaaattagagaatggtaatgacttttaacaagcatactgccttcaagcacttttttaacaaagcacagcctgcatagccctaaatccattaaaccttgagtcaacacagcacgtctctgcgacacagggttggggtagggttacagattaacagcatctcaaggcagaagaatttttcttagtacagaacaaaatagagtctcttatgtctacttctttctacatagacacagtaacagcctgatctctttcgtttccccacaaatccatatagtatttgagtgtgataatgtaaaaatcagtattcatttctaaatctaagtactgctttgagaattttgttggtaattccagttgctgctgcttcagcagaaggaagcttctccaaattaaaataaattaaaaacttgctaaaaactatgttgactcaagaaagcttgtcttttgccattttgtcaatagaagtcacgttaagtataagaacatcatcaggggccgggcgcggtggctcacgcatgtaatcccagcactttgggaggccgaggcgggcggatcacgaggtcaggagatcgagaccatcccggctaaaacggtgaaaccccgtctctactaacaatacaaaaaattagccgggcgtagtggcgggcgcctgtagtcccagctactcgggaggctgaggcaggagaatggcgtgaacccaggaggcggagcttgcagtgagccgagatcccgccactgcactccagcctgggcgacagagcgagactcctactcaaaaaaaaaaaaaaaaaaaaaaaaaagaacatcatcaggccaggcttggtggctcacgcctgtaatcccagcactttgggaggccaaggtgggtggactgcctgagctcaggagttcatgaccagcctgggcaacatggtgaaaccccatctctactaaaaaatacaaaaaattagccaggcgtggcagtgtgcacctgtagtcccagcttctcaggaggctgaggcaggagaactgctagaacccrgttgcagtgagccgaaatcacaccactgcactccagcctgggcgacagggcaagagtyggtctcaaaaaaaaaaaaaaaaaatcagtactccctggaatgaagccaagaaaaaatattttaatggaataaatacataacttattaaatgcatctgtgtgtgtgcatgtgtgtgtgtgcacgtgtgtgcgtgtgtgtgtgtgtgtgtttgccattcatctgccatcaccagccgattaacaaatgaccctggtatgcacaataataactaagttaagtcatcattggtagtttgtcagcttgcagtgagccaagatcacacccctgcactccagcctgggcaacagtgcaagactccgtctcaaaaacaaaaaaaagtccgggcgcagtggctcacacctttaatcccagcactttgggaggccaaggcaggcagatcatgaggtcaggagttcaagaccagcctggccaagatggtgaaacttcatctctactaagaatacagaaaaattagctgggtgtggtggtacacgcctgtaatctcagctgtttgggaggctgaagcagagaattccttaaacccgggaggcagaggctgctgtgagctgagatggcgccactgcatttcagcttgggcaaaagagcaagactccatctcaaaaaaatttaaaaagtagattttaggtactcttaccacaaaaaaataaagaaaggtaattgtgagatgataggtatgttattctagttgactgtaatcataatttcactatgtatatcaaaacattcatggctgggtgtggtggcttatgcctgtaatcctagaactttgggaggccaagacaggcagactgcccgagctcaggagttgaagaccaccctggggccaacatggtgaaaccccgtctctactgaaagacaaaaaattagccgggagtggtggtgcatgcccataatcccagctactcaggaggctgaggcaggagaatcacttgaacctgggagatggaagttgcagtgagccgagatcacacgactgcactccagcctgcgccacagagcaagactgtctcaaaaaaaaaaaaaaagttcaccttatatacagtgaaacatatatacaagaaaaataccgatttttcaagatacatttaccacagtaacaggatagaacatacttataacttcccaatattaaatatatggtatgtgggcctccagttgtatttgtattgttgccatggccccttgcaaatgttagaggtgggcctgccaccagcagggactgggagaaccctccttccttatctaacaggtaaagggtaacactgttactttaatttgctcttccctttccctgacagtgagtttgagcattttacatttgtttatgggtttttcctttttacaaatttgcctagttttgtcctacactcattttttcctttgaattattttttccctttcttatcagtctcattgttttttcttttacwtttttaacrttctttatagatagatgggatttctctatgttgctcaggctggccttgagctcctgggctcaagtgatcctcctacctcttcctcttgagtagcaggaactacaggcacaagccactgtacctggctcttatgagccttaaggttatgttctgctgtaaataaaattttaaaaaatcccaaatctgctgtttttattttgcttttgctatggtatttttgccacataaaagattttagggccaggcgtggtgcctcackcctgtaatcccagcagcttgggtggctgaggcgggtggatcacttgagcccaggagtttgagaccagcctgaccaacatggtgaaaccccgtctctactaaaaatacaaaattagtcgggcatggtggtgcatgcctgtaatcccagctacttgggagtctgaggcaggagaatcacttgtacccagtaggtggagattgcagtgagccaagatcacgccattgcactccagcatgggcaacaagagcaaaactccatctcaaaaatgaaataaaataggccgggtgcagtggcttacgcctgtaattcctgcactttgggaggctgaggtgggtggatcacaaggtcaggagttcgagaccagcctggccaacatagtgaaaccccatctctactaaaaatacaaaaattagctgggcatggtgacacacgcctgtagtcccaggtactcgggaggcttaggcaggagaatagcttgaacccatgaggcagaggttgcagtgagccaatatcacgccactgccctccaacctgggcaacagagtgagactccatctcaaaaataaataaaagtaaaataaaaaaagattttaaattttttctggcaggtggattacttgaggtcaggagtttgagactgtaaccagtttagggttacagtagctccccttatctgcggtttcactttctgtgctttcagttacccacactcaactgcggtctgatgttttgagaaagagaccacattcacataacttttactatagtatattgttataattgtattattttattattgttaatctcttactgtgcctaatttatcaattaaactttatcatagatatgtacatatcatacatatcatagatatgtacatatatatgtacatatatagatatgtatagggggaaagatagtgtttatagaggtcagcgctagctgaggtttcaggcatccactgagggtcttggaacgtatcccctgcaaataaggggggactactgttttacacctactgctgctgtgaacacttgagaatgcgcttatggtaaacacctgtccatatttctgatggacagatacacaggtgtataattgctgagtcatggaatgtgcatatcatcagtttcagtagatactgtgaaatgcttttccaaagatgttggtacaattgacactaacagcagtactgaatgagagttccacttcctgcacatccttgccaggtttgatgtgcctcttcattttagccattctactggagggcaggtggagtggaaagaatgatttttttttttttttctgagatggagtctcactctgtcacccaggctggagtgcaatggcacaatctcagctcactgcagcctccacctcctgggttcaagcgattcttctgcctcagcctcccaaatagctgggattacagacacacgccaccacacttagctaattttttttttttttgtatttttagtagagacagagtttcaccatgttgaccaggctagtctcaaactgctgacctcaggtgatcagcctgcctcggcctcccaaagtgctggaattacaggtgtgagccacmgcgcctggccaagaatgattatttttaagattgaactcaggttgtrtcacttcctaactcaaactgcccagcgtcctcccatttaactcagaataaaagcctttgcaatggcctaaaggtaggatgattatattctttagtgtttaaactgaaacttaattttgagagtaaaagtggtactattaataattaagccatgacagcaggcatacatttgaactggcctgggtaactagtgtgtatggtcaccccacttgtcaagagatatcgtgatctggacttggctgtccctctgatcattctcctaccacgctctccctcattttattctctccagccacactggcctccttcaaattccatgcacatggcaggcatgtttgtgcatcaggaacgctcctccccagcagctgggatggcatgattgcccctctgtcctgcagagacwctctgtgtaaaacagcacctccccaccatcactcttccctggtgcttctttgtttttttgtttgggttttttgtttttttgttttgtttttgtcacctgacatattattgccctgttactaccaccctctaccccaaatgcaggctccatgggagaaaggactttgtttagctttaccactgtgtcccagcacttaaaacartgcctcaaatataattcattatagaaccttgctggtgggtatgctggggtgttcgtgtacaatttgttcaactgtgttacagtcacgcgtctcatgacaggacaagaaatgcatcctgagaaatgcatagttgggcaatttcatggccatgcaaacatcataggggtgcactcacacaaacccagataggagagactaatacacatctaggctatgtggtccggcctgttgctgctacgctacacacctgtgcagcatgtgactgtcctgaatcctctaggcagttgtcacacaatggtaagtacttgtgtatctaaacatagaagtacagtaaaaatagaggattataatctcatgggaccaccatcctatatgcagtctgttgatcaaaacatcataggtggcacatgactgtattcgagaattcataataaaatgttaggggaaaattaacggatttgatctttacgacaaccccatgcacagggtccataggcaggcagcatcagcgacacccgggaggttgtcagaaaygcaggatcagccaggcacagtggctcacgcctgtaaccccagcactttgggagtccaaggcaggcgkatcacctgagctcagaggtttgagaccagcctggccaagatgatgatgaaaccctgtctctactaaaaatataaaaattacccaggtgtggtggtgcatgcctgtagtcccagctacttgggaggctgaggcaggagaatcacttgaacccgggaggcagaggttgccgtgagccaagattgtgccactgcactgcagcctgggcgacaaagtgagacttcatctcaaaaaaaaaaaaaaaaaaaaagcaggattttgggtcccagcctgtatctaccaagtcactttttcctttcctttctcctcttggtggcagcttcagagtctctgtgggcccaagcaccccaggaattcttatacacactaaagtttgagaagcactcttacttttatccccattttatgatggggacaaagagacacaaaataaaacttagcatcacagctagaaaacggtggtgttgggattggatgtactcttaaagctgaggtgtggaggagtgtccagcaatccacctgtaacttacacgtagaatgagaagcagcaggttctttctagaatgttggaattaaatgggtgccccatcaacatataacatgaaactttaagtggttttaaggtacattgttggttatggtgttcattctcattttcarcctgtcactttttttctgtttatttttggcagaaacttgggaaccgtgggtgctgttgccttggactgcaaagggaatgtagcctacgcaacctccacaggcggtatcgttaataaaatggtcggccgcgttggggactcaccgtgtctaggtaggaccaagggatgcctcctgccccttcccctcttctcccgccctcaggctttcctcactctctattccctgcccctctccgtttcttgctgcgttccctttctgcttttggtgcagctccaggatgtctgggagtgacaatggggttggaaggggttgttcggggtgctgccttgagagggtgtttgtatctggcgccactgtttttactagattgcatgcctttttggaacaacttggggagagaagtggagacagggatgctaacgttgcccccagtctaccctgtcgtgattctgtcttctctttagccacagtttcaggatctgcagacttacttgagtaagacttactcccgagacatgggctctgattagcaatctgagaaatctgagactgcagttgttagatctgagcagcatgaaagtgacatacttctacagacacattatagattgagatgttgtttacattaacggggaagcacgccatctcattcccaggagtgggtgagaggcagggctggggggctgtatgtttcactccgtgcagactttcacacttgtcatgcaggaatcctcatgaacccccacaggtgactgaagttttgagaagcagctaaattgttccatctgccctaaagagcagcttattcttttagaggaaaactagccctaccttccctttttaatrtgttgctctagtctttagtaataatctacactctcgacaattcttgataccctytttctgtcatgaactcagagacactggaagcttccttaaaaagagtagaggcttggtaactcctcttctccttggtatatcacccaagagatgtgaagtagtctacctttctttctccttggcaaaaatcccaccaaactgtgcctggtcagtagtgcagcttgcttcagctgcgttcagaccaggccacagggccactccaggttagatcctagaaattaattttaagcttgagttacagtggtaaatcttgacaagaaaaggcataagctaaattctcagaactctctgtccagctgtgagcaccaggtgtgctctgcctggccttctgaggagcctccccaaggagcactgccactggccaggcccctgcctggacagtcatgggggacggtactaggctcagcagtggtcacctcaggcaatgcacttgtcctgagaagtgcatgtggcggggaggacagcttcacacgcccgatgcctgtgccaggaccacccttggagacacctggccttctgtggtcctagagtaactgaaaagtaagcaaagacttggctgcttccaaatattagggcacwttgacaccatggaaccyggtcagttaattccccagcagaagcttataagaaaaagtaaaggcgcctcctcccactgcagcagttcattggctgyccagtgtcagctccctccagaaccagagccagggattatctgcctttgagaacctctggggccttgtgacaatccaatgcagcatctcaactcstgagtccttgccccatgtccagcatcaataagtaaggcaaatgtcaatcttctgtgcttctgtatcaactgtgggagggtaaaggcgaatccttccaaggctaaaggactctgaggctggtagctgtgtgtgaacagatacaagaatgactcagagaaggctgtaaggttgcttaatccaagcccaaaataaggaagaaatcttatcaaagtagctttcactccagacccccacttaagtggatagcccagaatagttccctcaggtccaattatgcccaccctcaacaaatataactgccctccattagacagtgtgcatggatgttaggttgtgggtatcattttccccaaatcactggaacatgatggccttgctagagatccatataatgcagtcatgctgtttcttcctccatagtrtgtggggcatgaggaggagacagggagagggtggcttcattgagcaaaaaggaatggctgtgctttggggccaaggagatgctgtcctgctgtagctgctctgtgaaaggtcaggcctgcccctctgaggctccctttatcctcctaaattctggggcatctacatgacgctttctagtccacctttgcctccgcagatcatggctactaacctgacctttgtckgtacttgagcacccttcgcgatttaactttcatgtagygtccgacttctaatatggatttgaatttcttgaytgttactgctcagaacaatcaccctttttgagcaggagctggaggttatgccgacaatgacatcggagccgtctcaaccacagggcatggggaaagcatcctgaaggtgaacctggctagactcaccctgttccacatagaacaaggtacacagaccacaggacaagtaaaataatttgtgaagataagtgcatagaaggtatttgataagtaagcgcatggagaagtgtaggaaaccctttcctgttggctacagatgttgctttcaggccgttaacaccttgttttgactctccgccttcccttaggtctggaatggkagagcattgagtactgttatcttccacatctcaggagaagggggcagtagagagacattgagcctggatgtgggagggaagacccctctgctcaggctgatgctagggcgctgtctcagggcaaggaggtgaggaccctccttttaagcattcaggcgttcatttaccaaaaatccttgctagctcactttggcatttcaaatggcaagtgattttcccatgagattcctttcagtaatgtgtgttgtttctcaacccttccttgttttcaggaaagacggtagaagaggctgcggacctatcgttgggttatatgaagtcaagggttaaaggtttaggtggcctcatcgtggttagcaaaacaggagactgggtggcaaagtggacctccacctccatgccctgggcagccgccaaggacggcaagctgcacttcggaattgatcctgacgatactactatcaccgaccttccctaagccgctggaagattgtattccagatgctagcttagaggtcaagtacagtctcctcatgagacatagcctaatcaattagatctagaattggaaaaattgtcccgtctgtcacttgttttgttgccttaataagcatctgaatgtttggttgtggggcgggttctgaagcaatgagagaaatgcccgtattaggaggattacttgagcccwggaggtcaaagctgaggtgagccatgattactccactgcactccagcctgggcaacagagccaggccctgtatcaaaaaaaaaagaaaagggaaaaaagaaagaaagcagcagcatgatcctgacatgacagatgtgggagacccacagcctgcagacactgtgggctggaaggtgggaagggaggggccggtggaggtggagctgtttgaaagtgacacagcagcagtagaagcagtggtgggcgaagcccaggtgaccctcagaacgttgcacaagaacatcagggaaaagaaccagaatcctttaaggaaaatgttcttcatgtatgagagactaaagtgatttttctaagaaagttcagcccttctctgacttacctggacatttctagatacttccaaaggaccctctgggaatccatagcttcctaatctggagatgggaggtcataagggagacgctgtggggttccttgaagtttcttgggttcacagaggagccccctcacttggtgttctcccgtgagccagcctccacctgccaaagacactctggtcctcgtatagtgagtaatggggctcagggcctctccaacaacagagaggagctgatgctgtagggctgaccccgtgacttcctgagtcctcaccctgtccagtgctttgagattcttcccacctccccatcctcaccagccggatcgggcgctgtgcagtgtggtcagcatggtgaagaaagtcatttcctygktggrcagtattcctctttatctctcattacactggaaatgttatttctgctgtatcatccgtgctcaacgttttagtctgtcaggctcaccttctctctggaaagaatttgcttaacttgacattccatgtgccgctaataaaatatattttgaaagaataagggtgtggttgggagtcactgttgacaaagaccagaatgtacacgagctccccccttggtctcaggtgtactacagagacctcgagatgaggatggtgtggagggtgatatgtgccaccttgtggagtactcgtgagtttttcagaagaactgaactttttctgagtgggtcaaggaagaagccaaaccatgatagggtttatggcgcagtcttcctgcagtttgccagcattcaccccagacagaggtgcacagtaaaaacctcaacatgcaacaactccccctttagaaacaagtattttattaggaggtgtattagttgaagattgccacaacacgattccacagactaagtgacttaaccaacagaaatttattaatattttctcagctctggaggctaaaagtccaagatcaaggtgtcggccacgttggtttctcccgaggcctctctccatggcttgtgtaatagctggccatcttctcactgtgtcctcacatggtctttcctctgtacgtgcacagccctgccatctgtctctatatgtcctaatcccctcttcttatgaggacaccatattagatataatttatatattataatatataaattatataatatataagttacaatatatctaatatggtatatttattatatattataatttatacaatatataatatatattataatttacatatatattatatataataaaatatataacatttatataatacatatatattatatatcatataaatatatatactattatatataatatatgatatataatattatatattttatgtattatatataatttgttatatattatatactatatattatatatcatatattgtatatattatatattatataaaaatatatgatatataatttataatttataatatatattatatataatatgtaaattataatattagattaaggtccaccctaatgacctcatttaaccttaatcacctcttcaaaggccctgtctccaaatacactcacatgctgaggtactgggggttagggcttcagcatgtgaatttgggagaggacagaattcagcccataacaggaggcaaaacagaatcatgttggggtttggaaaggggagaccctttggagaagacaacaatcgctaaggagatagaaaaaaggaaggagggagctgggggatagggaggccagttgaaagatctggttttgagcttgtcttaccaattctccagttcacaaggaaatttactctagttattaaagattaccgtaggctcagcttgtggccacttgacctctttagctgggcagcccaggtgctagggtacgtatggggtcgtcagcccctttgtgcaaagccaaagtgtgtatttttgccctcagacctgagttgtaccaaaagccacctccaccagcctgggagttctgtaaatggagaccacgtacagttcttgcttttgccccacagcttgtccatggctcactgtcaaacagagaaatgagcctgacagcatctgaaaggggaagacaatctttttatcacttctgtgccacaagagggcagcaaactataaactatccatggcttcagccgcccaaagggaaggtactctatctggatcagagcagtctatttagaaaatttggaaccaaaagaacattcctcttcctgaccttcattttcgtccaaatactacaatttattttagagcagaattgtccaaaacacaaacgctagcaaatggcccgaagaacccacccagatcaacagtggaagctcgctctgccctgggcgctgccagatgccggatgccagatcccacggtgaacaagctctggcagcccggccccgcccccacttgctccttccagccaggaagacagatacatcgtcatgtggctcacccaccaaaatggtgggataataaggagcacaagacgggccctgagccaaggccaagtgtccccaagcaggagatgctgcagtcaggactcagccccactgctgggctgcagagaagagtcctgggtaaggaagggccttgatctcgtagctgttgcataatacacatttttctcaaataatattcctagacttcttcctctctagcttgagggattgtaaactctgagaccaaaggaaggagtggggcacacgttagtccccttcagtgtcctgttgtcagaggtgatggtgtgtggggaaggctgggaagggacactcgttcttcccgccccccacctgctcctctgaagtcctcccatcagccttcatctttgcacaaaaccatcactgcatttggattttgtagctgtttcttttttttttttttttttttttttttttttgagatagagtcttgctctgtcacccaggctggagtgcagtggcacgatctcagctcactgcaacctccacctcccagattcaagcaattctcctgcctcagcctcccgagtagctgggattacaggcgcccgccaccatgcctgcctaatttttttgtacttttagtagagacagggtttcatcatgttggacaggctggtctcgaactcctgaacacaagtgatccacccacctcggccccccaaagtgctgggattacagcaccaccgcacccggcctttgtagctgtttcatgggaacaaggaagtggccccatcaaccttgtctggctaaaaaaaatgcaggtgtcctctcccttttgcataggtgtaggcgtgacccagagaggaatggggatgggcagaaggacagaggcagaaccaggcctaggaatgggggtgggagtatgggcctggaacacagtggaggttgggggaggtggtgggggtgcccattagtggctgcatccagaatgtaaatgccattaaacaaaaccagcctttccacctcaccccaccccacatccacacccccacaaagagctgagccacagccgtccatagcacatctcttctgagaagttaaaaatatgtaggaggaggcataggaattattctacccttttggaagatgagaaaataaggcctagaaaaattggagtttccccggtctcttgtccctctcaggttaaagtgaagtttaactcagccttccctattttcaaatcctccggctctcacccctaagctgctgctcctagatctagaggcagccccaagagggccccaggcgaaaagcaagaaagaccagcacacatggacagctctagctttcaaaattctgggatttttacaaaccactatttaaatgaagttggattttcagtgacagaggtaggggccagccatggactctgctgataggggaaaccagcctggggtgattttttttttttaatcactgatcatctcaagagttaacttttttgctatgcaattatcagcactttctggatcatgtgcagaactcagataagtgttagagttcttatccacagcaggcagccaaggagaaaagaggttgagtcttcctgtcctatctctgtaatactgaggctcctctcagcagccaccggcctcatgcctgcccgccttggccctggattgtcaccttgcagggcagcagtttgttattaaacttttttgtttgttttttttgagacggagtctcactctgttacccaggctggagtgcagtggcgcgatcttggctcactgcaacctccgtctcctgggttcaagcgattctcctgcctcagcctcccgagtggctgggaccacaggcacacgccaccacgcccagctaatttttgtatttttagtagagatggagtttcaccatgttgatcaggatagtcttgatttcttgacctcgtgatcctcccacctcggcctcccaaagtgctgggattacaggcgtgagccaccgtgcccggccaagaataatgaaaaatgtaaagcacatgtgagaaaaaaacaacaaaaaatgggggacgctgggcatggtggctcatgcttgtaatcccagcactttgggaggctgaagcgggcagatcacctgaggtcagggttcgagaccagtctgaccaacatggagaaaccccgtctctactaaaaatacaaaattagccgggcatggtgatgcatgcctgtaatcgcagctactggagaggctgaggcaggagaatcacttgaacccggaaggtggagactgtggtgagccaagatcacgccattgcactccagcctggacaacaagaatcaaactccgtctcaaaaaaaaaaaaaaaaaccacgggaaaaatttcctatcagccagtgaatatcactattaaaatcttactgtatattcttgcagatctttttctgggtgtgtatatgcataattattttttcaaaagtgagaccatgccatgtatgtttcagttaacactctccaccattgcttgccaagaaatgttcaccttacctaatatttggtcaatattcaaatttccccagttttctcaaaaattgtctttttagcagaattgttcaaatccagcacctttcttactggcactgcttgctgggtagttagggccccgggcccctcggcgtcgcatcttctgcttgtcaggctgcccctcgttgagtgagggaagcacctggctgaacaccaccacaggcgctgggggccaggccgaccatttcaaacagaaatgtcgacaccctgccaccgcaggagccatgcagcgctggcctgtgggctggggagggtttggaaagggaaatatgggttgtgccaaagcacaaggccccacccagaagtttggcaaagggtgacttggagtgagaagagcaggtggggagcaagtccaccctgcgccaccaccaggaaaggacctgcccccacccttcctcagcggcctcttcccaggtcacttcccctcatacaaaaagcgtgtgtgctcccttcccagctcccctcacctcagcctttcccacacagctaggagccagagctaccccacgtgcttgttggccaaagggccactttcagaagtgtttacaaattaccccaggtggaggccactcacaccaaatccaggaacatttacctcgggcatagaaccacattccctggctacccagtgaagatccccgggggctcgaacccccaaattctcccaactttctttgcagacaccaagtatttcatcttttttaaaagtaagaaacaccaaggccagttcccctcctcctcccatctgctccccgcccctcccctgggcccactcccgctagcggcggcggctcattgcaggccggcatgtctccccggtgacctcaccccagatctggcctttctctgtcaggcctcacaatcttccgggccatctttgttgtcttatctctggctttggcacaaatatcacaccctggatgcctcatgactaaaagtccatcactttccccaagctctttccctgtcttccctagaaattccaatatatggccaggcgcagtgactcatgcctgtaatctcagttctttgggaggccaagacaggcagatgacctgaggttaggagttgaagaccaacctggccaacatggtgaaaccccgtgtctactaaaaatacagaattagctggacgtggtggtgcaaaaccccgtgtctactaaaatacaaaattaactgggcgtggtggcacatgcctgtagtcccagctactcaggagactgaggcaggagaattgcttgaacccgggaggcagaggttgaagtgagccaggatcatgccactgcactccagcctgggcgacaagaacaaaactccaactcaaaaaaaaagaacttccaacatatttgtccactgctctcaagcacaaagggtcaggactcagggcaaggcaccctgcagaactgagaattctccccacactcgcctccttagcattcccagcccagagttctcacttggactcgtgtagagaacaggcagccagttcgtgtgattgcagatcttctgctgttgttctgccg

SEQ ID NO: 93682 - DNA, 46818 bp, Homo sapiens
  misc_feature (1)...(46818): n = A,T,C or G
gcaaaaagaacaaagctggaggcatcacactatctgacttcaacatctactacaaagcagccagatgtggtggctcatgcctgtaattccagcacttcgggaggctgaggcaggaggatcacttgagcccaggagtttgagaccagcctacacaacatagctagactccatctctacattttttttttaaatattggccaggcatggtggcagatgcctatagtcccagctatgcagaagactaaggtgggaggatcacttgagccactgggaggttgaggctgcagtgagccgtgatcatatcactgaattccagccagagaacagagcaaaaccctgtctctaaagcaaagcaaaacaaaacaaaatgaatctactatatagctatagtaatcaaaacaacatggtgctggcataataacagacatattgaacagaatagagagcccaggaataaatccacagatttacagccagttgatttttcacaaaagtgctgagaatacgtgatggggaaaggacagtctcttcaataaatgatgttgggaaaattggatatccacatgtggaagaatgaaattagacccttatctcacaccatatataaaaatcaactcaaaatggattaaaaacgtaaacttaagaaatgaaactgtaaaactagaagaaaatgggaaaagctccatgtcattggtctgggcaatgattttttggatatgaacccaaaagcacaggcaacaaaagcaaatacagacagatgcgattatatcaggctaaaaagcttctgtatagccaaggaaacaatcgacaagaaaaaacctaggaagtgggagaaaacatttgcaaaccacacatctgatatggaattagaatctaaaataaataatgaagtcaaacaactcaatagcaagaaaacaagtaacctaattcttaaaaaatgagtaatggatatgaatagacatttcccaaaagacataaaaatggccaacaggtatgtgaaaaaatgctcaacatcattatcagaaaaatgcaaaataaaaccacgatgagatatcatctcacacctgttagaatggctattatcaaaaaaacaaaagacagcaagtattgcagaggctgtggaaaacagggaacccttgtactttgttggtgggaatgtaaattagtaccgccattatggacaacataggggttcctcaaaaaattaaaactagcgccaccatataattcagcaatccctctgctgagtatatatccaaaggatatgaaatcagtatgtcatagagatacctgcacctccatgttcattgtagcattattcacaatagccaagatatgaaatcaaactgagtgtccatcagcagatgaatggataaacaaaaggtttgtatacacaatggaatactattcagccataaaaagaaatcctgtcatttatgacaacatggatgaagctggaagacattatattaaatgaaataagccagatgcagaacaacaaatactgcatgatctcacttacatgtggaatcccagaaaaagttgaagtcagaagtagaatagaatgatggttaccagggggtaagggctgggaggttggggagatattggttaaagcccacaaaatttcagataggaggaataagttcaagagatctattggaaaatatgctgactataattaataaccgtattttttttttttttagtccaactgagtcttgctctgttgcccaggctggagtgcggtggcgcaatctcagctcactgcaacctccacctcccgggttcaagtgattctcctgcctcagcctcccgagtagctgggactacaggcacgtgccaccacacccagctaatctttgtatttttagtagagagggggtttcaccgtgttagcaaggatggtctcgatctcctgactttgtgatccacccgccttggcctcccaaagtgctgggattacaggcgtgagccaccacgcctggccttattatattcttgaaaattgccaagagagtagatttcaaatgttctcaggacaaaaaaaatgaaaagtgaggtaatgtttatgttaagtagctcaacttagccattgtgcaatgtgtacctatttcagaatgacatgttttacatgataaatatgtataatttttatttgtcagctaaaaaagtaaaaaagaattctccaggtgttgtcccagacagccgctgagatgtggaacacatctgacaacaacaatcagaatcctggtgaggagggagggcaggacagaatgctctcacacaggatgttcttagacagagtcaatctacttctcatgttgcatgttatacttttatgtacattagtgatggggaggtaaggaagaggaaaacaggattgctgacatttattgagaactttctgtgtgtcccacaatatgctgagagtttttgcaggggttttcttatttgatcttctaaacaaccttacaaggcaggtatcgtttttattatttcatttttccaatgcatgaaattaagatttggtgaggtacagtaacctaaacccaaactcaatatgaacgttctagaaagagatttcaaatctttcttatttgaaaccttaacatatatattcttacagctgggtgcaggggctcacgcctgtaatcccagcaacttgggaggctgaggtgggcagatcacgaggtcaggagttcaagacgagcctgaccaacatggtgaaaccccatctctaccaaaaatacaaaaattagccaggtgtggtggtgtgagcctgtaatcccagctagttgggaggctgaggcaggagaatcacttgaacctgggaggtggaggttgccgtgaaccgagatcgtgctactgcactccagcctgggcaacagagcgagactttgtctcaaaacaaaacaaaacaaaacataacaaaacataacaaaaaccaaaccaacaacaacaacaacagacatatatattctgttaccacatactgtttccttttgttcaacatctagggaaagggccacaaggaaaaatcatgcctaaccaactttagtgtgtgtgtgtgtgtgtgtgtgtgtgtgtgtgtgtgtacagagagagagagagagagagagaaagagagagcgaaagagagacagggaaattttagtgtggatttattgttgacaaactaaacaatgtttgcagagagaggcactgagaatgatctattcagctgtgccaaacaggttgaatacagaggttgtaacttatgtgtcaacattcctctgtatttctgggagcagagtgggatccacagctatagctcaaaaaggcaccgaacatttggatgggaaaaaagggataattcagatgggaaaactattgaatatgtatttagttataagaaaacaaaacaaaattagaagtattttgttgaaataacagtgagggagagtctaaaaagtggctcctgctttgataatggtaacagagaactcattatatggtacacattattaagtcagatggcaatgacatgttctttatttaaggtgctgcttgttatttgtgagtcttgcaaatccagcttaaatccaaaatggatttgaggtagtattccatcagaacatagacacaatagtacctgaaacagactaaagacagaattaaagagggcaggaagaagaaaatttatattgcagaaaacctagccctggttgagctggttcacctaggacttcatccaatccccttctccccaccctacaacatgcacttgcacttgaattacttacgttcagttccaagatcctctaaattttgaactcctttgagaggacagaatgtcatgtatatttgcacatgacatatattcttgatactaaaatgtactggacacatgccaaacccatgatgcccactacaaaatgtgtaccataaacatcactgagctcagacctgaaaaagagaggacacttactttgctaaagtgcttggcctttgacatagtttcctctttttcttgacgaccatgcagcagtgctgaatgttgcaaaaaaggccaccccatcctgcttcccagtgcaggcagcgtccacaccttgcttatctgaatggcaactgccagcttctcagagccgttgcaagacattagtgtcctggatctggaaagttctctctcagctctcttgtaaaggagtgagggacatgctttgtgtgaatgagggctgcagtgcagtgtgttgctttttagcatcagagggaggcattaaatatggtgctacagagacccaaaccagccttcattgctggagatgctgaaactcactgcgagtcctgaaagtgttcatactctttgagtcaggaatcttccttagataattgtcaaggaaaaggaaaacattctgtgcatgcacctcttcattgaaccgttattattaccatctaaaacattgcgacttccttagctaatgacaatgatcataataaagcctattgggcctcaaggaaaaatattcaagagaataaggtagggaaagactgaaaaattgcatctatgtaaagtttataaggatggaaaagccatgtgcatacaaatggaatgaaaaaaaaacatgaaaatgagaagactacattggtgggattatgggcaatctctttgttttaaaattctttttaaataattgttgtgatatacgtggccaacacattctcttccaaaaaatgagaaagaaaaaatatagtatacttgcaagttatttcaaatgctgttttccaaatagagaacagctttggcgttttcagacactgtgtataattagtgggttggttaagtctattttaaaactatgaaatcttactccctctttagccatctcatccccacaccctttcctacacatacatctgccccatgtcctttccctaaaatactttggttttctttctccaagggttttatcatttaggcttttgttaacttgtatgtattcagtagaagctcctggcctagcatcccccacacaacacatgctccataaaaacaggaattaaagatgtgagttgctggtgtatccccatggcctggcatagggcatgggcttattagttattgcttcatttccttttggtcaacagttttatattaatgacatgtatttatggagaacctattctgtgccaggtgttttgctgggtattgacagagttgcacatggaataagaaagctcgtggttttaatgggaaggggcagggcaactacagaacgtggaaataattcattgcgttgcagctgaggactagcttgaattaggcaggtatcaagtgctccctggaatgcctctttataaggccaccaagttgggatactctcctcttcttttcctctttcaggaacctaccagaacaaatcagaccaccttcattccctccccagggctgacttaaaagaactgaagccagtccttggcagagccactcagggcaggagatgagagccaagaggctgtgcccagattacactccttactgggtgatgatcactggtcacgcctggtggacaggcaccagagtgatctcaggggctaggaaggggggctcaacagcgggccctgcttgccgtactcgctcctctcaagccgtctggtttcaagcccacttagctcacattatcctgccatcttccagcctcttctccctaagctgaaatgcggagcagcctccctaactcagcagtcactgtgtcacattcctcaaggatcttcagggaacccttgcccagactatcgtctacttttctagatttcagccggcatcctggctgtttaaaagggtacctgaatcattcacaccaacaataacacaacgacacactctccggtgtgttccaagtgtcctggctgtggcatggtctcaaaaaactgcagctgactgcacatgagtgattagataacaccttgaacccaccctaagatagtctgcctttcccttctttcctgtcttccttcttttctttctccctctctctcttctcctatttctcttttatctttcctttcctttatccccctcccctcctttcctctttttccctcccttctctctctttccacacacacataacctgtatatgccaggcactattctaggtgcttcacaaatattaattcattccattcttatatcaactttgtgaagtaggaactattatcatcaacattatacagagaaggaagctgaggtagagaaagtttaagtaacttgtccaaggttgagcatcttgtcaacgtcattttactactggcatgtgaaacaggtgagttatattttttagaatattaattctcattaattgaagccttccaaacaggcctaactgtccccttctctgacatacaagtggaagtgtcatagctggacggagcatcatggtatgaaggcagaaaggacgcgactgggtgttcttctgaagctcagggagcagctcttggggagaaagtgtttccaggaagcggacaagagttctgttgagctgaagagcagggcagcagccgggrcgagcgaggctggagtcatgcagggcagagccttaaatgctaagctggggtttgctctcggtaggaccagctagctgccccgagcgggggctggaaccagatctyccccacgtggactcgcggacagggcggggatcaggacgggggcggggccaggggaggggcggggctcggggagtgaggcaagactggaggrcctgggactctcgggtacccgggccaggggaggggcggggctcagggagggagggagagactggatgacctggggcttgcaaggcggggcgaggggaggggcggggcgaggggaggggcggggctcagggagggagggtgagactgtggaggacctggggctcgcggggtcggggcaaggggaggggcggggctcagggagggaggagagactggaggaccctgaggcccacgggggcggggccaggggcggggcggggctctggaaggcgggcgagactgtggaggacctggagctggcagaggtcatggtaagggggaggggcacggcttggggtttcggggcgggttnnnnnnnnnnnnnnnnnnnnacttggaaatttcaatttggcccggagaacaaagtttccatctcaagaaaaggaaagggaaagcggggtggctaaattccccagcattaagagagtctttttttttggggtccatgtcttcgcgtgatttctgtaagggtggactatactgtggagcctctgcacctggtgtgggtcagggtaggcggtaggggcagggctcggggttcggggcgggggtgttcacggtgagaccaaaagtcaggtaggagcctccggggtccctgctgtgtcacccggacaggccgtgggggcgggcaggggggcggggccgggcctgtcctcagcggccgagttcagtcctgctctccgcacgccaccttaggcccgcagccgtgccgggtgctcttcagcatgtccttcatcccggtggccgaggattccgacttccccatccacaacctgccctacggcgtcttctcgaccagaggcgacgtgagcagtggggctttggcgtccgggcgcggggagggagtggagtggagtggagtggagtggagtggagtggagtggaatggagtggaatgaggggcgggatggaggcttgtgccatttttctcttaagattcgttccgtgagagtgcctatgggctcgagtcccgcctcgtaactttctagctgtgcacgttgtttaacttttcagcctcattgtccgcaggtttgctgagaattaaatgcaaaatgaaatgaatcgtgtcactctcccagacaagcagagcaagcaggattctgttaccggaagctgcagcacacaggcatgctgcctactccgwggtggttgcggtgtgtttctctcgcccaagaggccaggtcagggytggtggttcatctcgctggatagcccctaaccctagaacccgggaaatgataacccggtatgcgtagcaggtcagaggggcacgcgcgtttcttggcttagagttgtgagatctaagatggcaagtgtctctgcctatagctgaaattctttcagctcctggtgtgggctccctggcattcccctactgatcagaagaaagagggcagggaaacaaactttgactaagtcagtgtagtctgattggtagaaagaagtatttgaaaactgggggtttatcagcaaatagataataagaggttccctaggttggaaaagcagattcccttggatttgttgatgatatttttggcttagatttctgctcccaactttaaaggtaaactcctgattcatctctgtaagccatagaaccccagaatcaggaaatgtttgctaaacgaggggcctggcagttggcttcttcttggaaagtggggttccctccttcccccatggcttgtcattggatgcaagtggctggccttttgtgggcctgtctgcggtaagtgctttggtctagaagagtcaacttgtggtttcacatctggccgggctgaccagatgttgcaaggatacagaaagtggacactcaatcccctggaggacacaatctgaggcacattaaatcttaacttgtgatggccaacaacctttctgcagacagagccctccctctgccctcctcaaacactttgccctcggcagatgtgtcctccctcacctttcctgggagcacaaatccattagacagaaacatttgtgagaggcaggcacaccccagtagggagctctgacttgctttctcaggggaatcgaattaatatccgttagagtgtggctaggtgttttcagacaccatgtcccgctgtttcaacatcagaatgtgcagggcagccactacagatgtctggaagagagagccccattccgctgtcctctgatacagtgctgggggtggagagttggccctttggccttccagctgaacaagcctcttctgaagctttctctgcaggcattggacattccaaccgtgatggctgccttgccaggcaagactagttgccaaggcaaaacctcccttcccccatgtcagcagtcagcctttcctaatttgagtggaataacaatgaatcctgccatcactttattcatttttttttattcagcgaatgcttatgaaccccarctctggtccagattttgcctgggctccgagttggcatcaaagacacaggagacgccttccttccatttctggttgatggactagtaaggtgtacaggggtgctctctgtgaaggtaggggtggtggcctctgagaacggggttgtagtagtgtggagctggttttgccgggtgccttgttaaagtccccgtggtctggctgtgctgctgcctcctggcctctgctttctccagccacattggctgcctttgagtctctgagatgtgctaagagcagcttcctgccttcaggccttagcacatgttgttccttctgcctggaatactcgtccttctgctctctatatgcttggccccttctcactctttgggactcagcttaaatgtcacctcctaagcaccctctctgaatgagctccccgctgcggcccagccttggttatctctcaccacaccctgtgtttccttttgcttctggagagaaggaaccacgtcactgttcccagggcctcagcagcctttgtgtaatgctggtactgagaagatgctctctaaatctttgtggcatgaatagcgtctaccctgtgtctgttcttgtggtgagagatttacagatattaattaaattctcacaataaacctactgtgaagttattgtccccattctacagatgaggaaactgaggtccagagaggcaaagcatcatgctccagatctcacagccagtaagaggcagatatggggttgatccccacatctgtcagcctcccaatctgtaaggtccagccctacggggcttagcgggttttctccctgtgtgcggaaacgagagattgtaagaaataaagacacaagacaaagagataaagagagaacagctgggcccggggcactgctaccactgagacacagagaccggtagtggccccgaatggctgggcacactgatatttattgcacacaagacaaggggggcagggtagggagggtgagtcatccaagtgattgataaggtcaagcaagtcatgtgatcatgggacgggggctcttccctctaaggtagccgaagcagagagggaaggcagcataagtcagcattttcttctatgcacttataagaaagatcaaagactttaagactttcgctatttcttctaccgctatctactacaaacttcaaagaggaaccaggagtacaggaggaacatgaaagtggacaaggagcgtgaccattgaagcacagcaccacagggaggggtttaggcctccagatgactgcgggcaggcctggataatatccagcctcctacaggaagctggtggagcagagtgttccctgactcctccaaggaaagggagactcccttttgcggtctgctaagtaaygggtgccttcccaggcactggcgttaccgcttgaccaaggagcgctcaagcggcccttatgcgggygtgacagggctcacctcttsccttctaggtcacttctcagaatgtcccttcagtacctgaccctatacccaccggttattcctrggttatattgtactacaataaagagtaatattaaaaactaatgattaataatgtttatactaataatcgataattgtccatgatcatctgtatatctaatttgtattacaactgtatagcagtatagctacagtttatgccttcagtctcttgcctcggcacctgggtaatccttcgcccacaccaatcccatgcttccccctctatgtcaggctgggagttgggtaatgctttcctttggacaactttatatcagatatgaccaactattttaaaacaaaggcaatgcacattcattctcttgaagttagacaaatgcggtctccctccttagtttgtttccctcaagttgcagatgggaaactgaggcccagagacttgtccaaggtgataagatggtgaatgagggagcagacttggagcccaggaatcctggatctgacctgtgagccccctctagttttgtgctgaagaaaataactcccaaggttgaaagtagagggactcactctctcagactttttctgggtcctcaggtcatagtttgaagcacaagtttgaagcttctaggctttgtttgcatttgaggcagcaggcagctgcacttgtgaccccattttggaagttgcttactggtggtgactccttcttgccttcagctggggtgtggggaccagggtcagagatgtggtccaagggtctgccctgcacattccctgaatggaaagccacttggattcaggtggttcagctctttgcctaaagcagatttgccattttcaggaggggaagactgaggcccagggagttggcagtggggctgagaatgagtaactaagctctccaggcagcctcttctagggtaggctctgctgggacctcagatgaggagtatggctctggtctaccccgattccaagagctgacatgcgtggagaaatggtcatcttttctcagcccaccccagtgagcagccaatggagataaggccagccaataatcccaccactaagctcgctggcactgaaatggccaagctggtggttcaggagagctggaagcctggctcaggacagagccctgggaagttgagtctgcaaacatgccctcgggttcttgttgacgagcaaagctcagggttgtggggacaaagaccaggacttaacaaatatttaagacatctttgttgatgctgggattttgtggtacagaaaggaacttgccttgcatgttctgagcagtctggcttcctgcagctcccttacaacccgagctctcctccatttgagctacaacagagctcattaatccaagccacctggccctcagcactgtgtgttgggcactcatgctccaccgcacaactgaactaccctagtcaaggcctagaaacctggaaaataatccaacatcctggtaaggtggtaagctcctcatcactggaggcatttatgtaatgcctagggaactttgcaggggtctttgcccaggttaagtggctaggaccaggctgactgctcttcccccagtccaagggatatttgatttctttcccattcagggaacacagattatttttccttttagttctggaagcagagatggcacaagggagctggggcaggatgctgagaacatggttcttcagtccgctctgcatacagggccacctaaagggggacctgtggactcttcaatagayaggctttctgagtaaatgagccaagcccagccaggggctttttctggtgctgacggtgtcrtcttcctcctagccaagaccgaggataggtgtggccattggcgaccagatcctggacctcagcatcatcragcacctctttactggtcctgtcctytccaaacaccaggatgtctkcaatcakgtaggacattgtgaaacgacttgtccctgacctcagtggcacttactgtggatgccaacaagagaatgctccttgcgttccatttccgatagaggtaatgccatcgaargtctcagaggttatacttggataaggctggggttgttttgagacagacaaactggtaggaggtggccttgggacaattcagggtggcttctcacctcagggcgagttcctaggtgaaaaaagtgtcagtgtctgcagtcctgggtcgttcctagttgtctatgagatgaagctcttcaggaactctggttacttttcttgtcaagctgtttgagcctctgcctgtccaagggctgtgtgggcccccaagggagggagctacgagcccagccctccagttctgtggaagcagctacggaggagtcagcctgaagtacatgttcacatgggatggacatgaatttgcttccctgtaaatggtcatctactttgatatagcatcttctcattgcatgggtcaggaaggagggtgggatttatgggtacctcttgtgtgccaggagcttcgcacacatcctctccttcaatcctcctgaccaccctctggcataggaattggaattcctatgggggcctgagcatctagatggggacctgaacttctggaatgagacatggttttcccaagctgcacagctagaagtatcagagctgggactggaactctgactcttagaacctacaagggctttttctgctatgcttcactggctataaaacctcttccttttttaaattaaaaaacctctcggctcacgcctgtaaccccagcactttgggaggccgatgtgggcagatcacttgaggtcaggagttcgagaccagcctggccaacatggtgaaaccccctctctactaaaaatacaaaaattagctgggtgtggcagtgcacgcctgtaatcccagctactcgggaggctgaggcaggagaactgcttgaacctgggaagcagaggttgcagtgagccgagatcacatcagtgcactccagcctgggtgacagaatgggaaaaaaaaaaacaactttttttttttaatagagatgaagtctcactatattgcccaggctgatcttgaactcctgggctcaagtgatcctccacctcggcctcccaatgtgctgggattacaggcatgagccatcacacctggcccaaaacctcttcttaactgatgtgaaaggaattagtttaggctgtgatcactctgcagactggagtgtgcctctactggaagaacatggccaccttcaactgtgggccgggccaagcttagcacagttgctgtgccaggtagcaactcctgggcttggacaattgtgtgcaggtgcacgagggcctgaggcaacgtcaagagaggatatgcttttctccaggttgatgaataaatgacaaaactaagagcagaggtcctgagagtttgagttagcgggagagaagtggcaagggctggyaggctggctggccttccattggaaggagggatactccctgggttttcctgtacgtgatcttytttctccctgttttggtcttagcctacactcaacagcttcatgggcctgggtcaggctgcctggaaggaggcragagtgttcttgcagaacttgctstctgtgagccaagccaggctcagagatgacaccgaacttcggaagtggtgagaagcacgtggtcataggggggatgaggggatgcagcaggggagrtgaaggctgtgtggttatcagtgccattctgagtcacggcttggcagccttagtgtggccaagtcagacctgccctcatccagcccctgcctgagctgcctattgatgggagggctttgggaggactgggattgccttggcgcctggaatggagctgcccaagctaggccaggcsaggcccattggccctctctcttactcaggctgtcctcattagcatcatctgtgacctcatctggtttctagagtaggaaagagtttccacttgtctagtcccatttcctagggtagaatatagaaacrgcttcagtgggtggatgtcctctcagctgtgaaaggttcagcatagctctggccccaggccagccagaaggtgcccactggagattgtggataatcttggggatggtctgggctgagcccgtgggtgggaccgcgctttgctgcctacttgactttgaagcccctggttctgtgtttcagtgcattcatctcccaggcttctgccacgatgcaccttccagccaccataggtgagtgcagtctcttcaccaagataagaacggagcagcttcgtgggccaagagggctggccaggtgctttggttctgcatctgkgtggagggtccctgctggtggggggagatggaggaggggctctggggctgttaccckctcctcatcactgacctttcccagcatccaggcccggcattcactcaggctattatcttgcctcaggtagtgagttgcagactgctcaagttcatgactagccgcatggctccctgcacagcaaattgctttccttcccccaaaggctatgggacaaattctctgagctcagtctgtgagtcagcagttttgaggatagaggccagagggctatgaagggccccagtttgagcacgtggcaggatgtctggttggagtgtcattcaggaagttggagctgttgaaactctcaacctgaagcagagagagaggctggctcagcctgcggcccaaagcacagccctcttccttgtgcacaggtctcctctgctgggctacctgggcacctgtgagctgaggggccagttgaccctgcccctggggtacactgcctctctggaacagctcctgctgtccggggagagtcctttgctgctgggctgcttgggctaagctgactggaggatggggttggggacaggggccgagtcacctgcctcctcccagcccctctcactccccactctcatacactcatgggactgtgctatgttttggcaaaccagctgttgtgcaaaccatatgtctttcagggatatcatgtctggttgactgatggtgccctttcttgtttttttttttttttgttatggatttattcttttgaaaaatctctcagctattacttctgtgcaatgggactgaagatgggaagcagcagctaaggctccacctgccctgtggacttttcttcctctcctcacccttcaccatgactgttgctagtctaggctgttggtattgatgaatatccagcattttttttttttgaggagacatttaggaagataaaacaggcagactgtcccaactggtttttctttcagatttttaattctccgaatggtagatatgcctacagcttgctggctagcccattcagttcatcataatcaacaagcactgatatgcatctgcagtgtgcaagcccttgtccttggcactcgggcagagtccaagaaaatgaggactgggctggggctgtcctggaatgtccacagtctagcaaagatgtgcacacacataactggagcaccagtgggaagcgaagcctgccccagaaggattcaggggaggggatttggagggggaagagatcctgctagagagagcagggagggcttcagggaggagcgggcctcaaagagttgccaggatttgaatacacagggacaagggagaagtcaatcagtataggcgtggtgagggagcctgtgggaactcgggaatggcagttgtgtgtgggaaaagtggggagcctgagaagggaggtggtatcagccacttggtgttcacattccactgtcagtttcagaaagtctggactcctgatttcttatttgtttctcagctgagggctctaaaaacaaatcttcagtgaggatattttatattgcatttggtgctgccattgctggctgcaggctgagctctggatgtgtaaacagtattgtgtgcacactcgtggctccagtgcttggaacagtccattcttcctgaggcatgtgggttgctgatgggatctgttgggtctttcctctgcaggagactacacagacttctattcctctcggcagcatgctaccaacgtcggaatcatgttcagggacaaggagaatgcgttgatgccaaattggtatgaactgggccaaatgtctgcataarttcaaagtctttcttttcatttccagcagcatatttgyctcaggagctgccaagttcttcttaaagtaaactggggaggaaaagcagttatgatgttgcaacctctggaagcagtggtctcarcttctggtctcctgctcagcttggcttaggacttgctgtgggatcgaagggcaagtcccttaaacttccttggacagcaggggttggaattagattcccttaatccctatgctccttctggagtctttcatttataagctgtgtattattgtactatgggcaagtcttagactctagcatgctccatacttacattttctgatgaatgagaatcctcaaatgtgcccagtgctgtatattcctcaacatgtgatcggtttcattcatttgtttgatcctcgtagtagttctctgatgtcacaaggccatgattgtaagccccattttacagacaggaaaatgggctcagagaaggatcaacttgcctgagcacaacagggccacagcctgtctcccagcccccrgatcaggccattgaccaagctgaggatgcagagctgggatccttgccctttgttctgtgttgtcccctggatgtgatggttccttggaactgaagagggcctggactcagtggcaggcatacactccaggccccagtgccatcagtcacacacaggagctgggttagggacggggctttactctctctcgagtgagtgtctccagtaggctatgccatgaggggagggtctgttagaaccaagatgaggaagaaagaaagggagagagagcagttccaagccagagwtgttgaacaacaaggccaaggttgcagaatgaggcaggggtgaatctgagaccagaacccaggctccaggttccaggcttccacgtgagatgcgcaaatatttgagaatcttgcactgtacaggctccaggctgtatttgtccccagccagcttcaacttgtctatctgatgggctgagtgtctatatgagtgtccttggcagtgatgacccagtggactgcccagccccagaagagctggctgtcacctgtgtgccaggatcccagtggccaaagggcaggggcaccaggaagtgagaggagagycgggacctgggaaatgagtgttgactgtgtctgaaaccgagtgtgggggccgcagccatccttgccccatgtccttctgcagaataagagtaaacaggccttctctagccatgtttgatgcaagatggcccacagctgtgactttttagctttatgtacatagtctttattataaaggtaacatatatttactggaattaacccaaacactacagaaaatatgtaaacatttacaattaaaaatgtgtctactctttgacctgcaatgctcactttcatgcatctatcctacagaaataaaagcaccagtgggttgtatccaagagcaaggatgttaattagcagagtttctagtggcccagaactggaagtaatctgaatgcttatcggtggaggaatggttgaaaaattggtctattcacaatatgaaatgttttgcagctagtgaaagatttagatcaagaaagatgtgcactgatctgtgttaagtgaaataggtaaactataggcaattaggtaaagtgtgtctcacttttataaaaaaagcacaaaaaatatatatgtacatacacactgtattagttttctgttgctgctgtaacaaattaccacaaacttggtggcttaaaacacaaatatattctcttctagttccggaggccagaagtcaaaaatcagtctcactggctaaagtcaaggtgtcagcagggctggttccttctggaggctctaggagagaacccatttctttgacttttcagctttagaggttgcctgtatcccttgccttttgaccccttcctcatatcactccaaccacttgcttctgctgttacatttcctacttcctcctttgaccttgcctctgtctataaggacccttgtgattacatttagggttcactcaaataaccagggacagtatccctatctcaagatccctaacttaatcacacctgcaaaactctttttgccatgtaataatatccacaggctccagggattaggatctggatatcttttggagggctatttttcagcttaacacacacacacacacacgcatgtacacatgcacacacacacacttatgcatacattagttccataggccggtatgagcatagagaaaggcaaaaaatattagactccagattaacattgctttcctcaggggagtggccgggtggggagagattactaactcctttttttcatctgaattgtttgaattattacatgccatgtaattgcatgcaatggaattttataatttaatccaataaaggaaccaaggtgggtaaaaaagggagctcttcctcagccactcaccagaggcaactactttgaacaagttggatgtgccgcttcctgtactttgctccaggttacacatgcatgaccacacgtatgcacgcatacatatgcattttatttctttagttaacaaaacgagggcatgctgaaatttgctttttttacttcatcattgacatatctccatgtagataagtttaaatctatctcagtcttttacaaaataagttttttggggtaggtaatacaagacaattacacagtaaaatatcatttttataaaaagatacaaaaatacagtacagtagggctgggcgcggtggctcacatctgtaatcccagcactttgggaggctgaggtgggtggatcacaaggtcaggagtttgagaccagcctggccaatatggtgaaaccctgtctctactaaaaatacaaaaattagcagccrggcgtggtggctcacgcctgtaatcccasaactttgggaggccgagacgggcggatcacctgaggtcaggagtttgagaccagcctggccaacatggtgaaaccctatctctacaaaagtacaaaaatttgctggtcatgatggcgggtgcctgtaatttcagctacttgggaggctgaggcagaagaatcacttgaacctgggaggcggaggttgcagtgagctgaggttgtgccgttgcactccagcctgggtgagagagcgagactccatctcaaaaaaaaaaaaaaaaaattagctgggtgtggtggcgggcgcctgtagtcccggctacttgggaggctgaggcaggagaatcacttgaacctcggaggtggaggttgcagtgagctgagatcacaccactgcactccagcctgggcgacagagcgagactctgtctcaaaccccaccccccaccaaaaaaaaaaaaaggtacagtaataaaagtgtatagaaatatagggaaatgaggaccatgctggtttcctctagggtgaggggcaggaagggagggaaggagagtgagaccagggagggatcccaaggatgcattggactggataagtgaactgttatttctttagctccttggtggtgcatggtgacttgtgttattacatgtttttgtatatcataaatattacaaaataatttatcaaacatttaaaaaattaaaagcaacaaaaacagtcaatatatatatacatggttgagaattcaaaaggtacttaagggtaaacaatgaaaaaaacagaactcaaccacctatgggccaccatccagttcccttctccagagacaaaactgttaatcggtgtcatacatatattttctttttcttttttttttgagactgggtcttacttggtcacccaggctggagtgcagtggcatgaccttggctcactgcagmcttgacctcccaggtgaagccatcctcctgcctcagccccctaagtagctgggattaaaggtgcacaccaccatgcctggctaatttttgtattttttgtagagatgggttttcgccatgttgatcaggctggtcgcaaactcctggactcaagtgatcagcccaccttggcctgccttagccccacaaagtgctggggttataggcatgagccaccgtgcccggccttcttatatattttttcacagatgtttttgcatactctgccagtttatatatacagtcatttctctattattagtttacaagagtgttttataagtgatagaaattaaccctttgttgcaatgcattgcaaatattttctcccagtatgttatcttttttctttgtttgccagtctttctagatacagagttttgcattttcttttyttttttttttttttgagacagagtcttgctctgtcgccatggctagagtgcagtggcaccatctcggctcactgcaagcttcgcctcccaggttcacgccattctcctgcctcagcctcccgagtagctgggaccacaggtgcctgccaccactcccgcctaattttttgtatttttagtagagacagggtttcacctgttagccaggatggtctcgatctcctgaccttgtgatccacccgcctcggcctcccaaagtgctgggattacaggcstgagccaccgtgcccggcctagagttttgcattttcataaagtcaggcatgccaatcattttccttatggcatttacttttgtgtaatgtttagaaaggctttctccaccccaagaatttggaagttttttgtgtttttgtgttttttttttctagtgcctgtaatagcctttgtttgtacatttagatcttgaatccatctggatttccttttatgtgtgaggtgtggtatgggtctgtatccatttcctggggctgctgtaagaaaaagccacaacaacaggaatttatcccctcagttctggaggccataaatctgcaatcaaggtgtcagtaaggccatctcctcctgaagcttctaggaccgtccttgtccttgctgcttccagcttctgggggctgcaggcgttccttgtggctgcatcactccagtctctgcctctgtcttcacgtggccttctcctcctttctacatcttctcttctcttctgtctcttataaggacatttctaattggatttagggcccacctggataattcaggatgatcgtgtctcaaaattcttaacttgattacatgtataaagactctgggagttaggacatggctgtatctttttttttttttttttttgagatggagtcttgctctgttgcctaggctggagtgcagtggtgcgatctcagttcactgcaacctccacctctcaggttcaagcgattcttctgcctcagcctcccgagtagctgggactacaggcgtgcaccactatgcctggctaatttttgtatttttagtaaagacggggtttcaccatgttacccaggctgttctcgaactcctggcctcatgtgatctgcccacctcagcctcccaaagtgctgggattacaggcgcgagccactgcacccagcccagaattttcttcctttttgaggctgaataatattccactgtatgtatgtaccacagtttgtttatccattcatctgtggatggaaacttgtaagcacctgttgatttttgagccatgtgtatgtggcgactctttgtttctagtttttgaagtttttaaagttaattgacaacatataacagctctgatgccctgcattctcttgccttcctttctcaggctgcacttaccagtgggctaccatggccgtgcctcctctgkcgtggtgtctggcaccccaatccgaaggcccatgggacagatgaaacctgatgactgtgagtgaccgcagcgtccaggccttgctggtrcccagctctctgttcccacacagagagttctgtggcctcactcacagcaccgttttttttttttttctggtgttattccagctaagcctcccgtatatggtgcctgcaagctcttggacatggagctggaaatggtaagtgagcttgatgttttattgccatgggatctatagacacccggcaggagagccctttgggatggctccccgcaccatgagccgcccactcccctcctcttcagccacatcggcagccgctctgtgtccccacctggccatcagaaggacagttgatccttattacttgcagattctgtatttgagaattcacaactacttgctaatatttatttgtaagtccagaattaatattcacagagcttttgtgggcatgtgtggacatgcgcagggcagtgaaacatttgagctgcctggtgagcatgttcctaggtgaggctggacaaggtgttactctgccttcttgtctcagcttatgctgtaaacatgtgtcctttgtagtctattcggtgccatgttttttgcagatctgtgcttttttggctgtttcattgtttttttataatgaccccaagtgctgtgctaaagtgccgtctagtgtccctagcacaggaagactgtgacgtgccttatggagagaatatgcgtgttagtaagctttgttcaggcaagttacagtgctgctgcctcagctcaatgttcatgaatcaacaaaatatattacataaagcatttttaagcagaaacacacataaaacaggctatatagttaggttttgattagttgataaaaattttctgaccaaaggcttgaaggaacctaatcctgtgtttcctctaggaagtcattctatatttgctaattctgtgttcatggtgactttataaaaaataattacctggccgggtgtggtggctcacacctgtaatcccagcactttgggaggctgaggtggatggatcacctgaggtcaggagttcaataccagcctggccaacatggtgaaaccccgtctctactaaaaatacaaaaattagctggggatggtggtgggtgcctgtaatcccagctacttgggaggctggggcaggagaatcgcttgaactgaggaggcggaggttgcagtgagctgagatcgcgccaccacactccagcctgggtgacagagcgagactctgtctcaaaacaaaaaacaaaaaacaaaaacccaaaaataataattaccacgagtgacaagagtcaagtgtatcagccccatggctgggcccatacaacctcagaactgtggtcactttaggctgcatacttttttatttgttttttgttttgttttgttttgttttgtttttctgagatggagtctcactctgtcacccaggctggagtgcagtggcactatctcggctcactgcaagctccgcctcctgggttcacaccattctcctgcctcagcctcccgaatagctgggaccacaggcaccttccaccatgcctggctaattttttgtatttttagtagagacagggtttcaccatgttagccaggatggtctcgatctcctgacctcgtgatccacctgcctcggcctcccaaagtgcttggattacaggcatgagccaccgcgctcggccagggctgcacacttttttaaattaaactttttattttgaggtcattgtagactcacatgcagttgtgagaaatagtacagagatcccaatacccttcacacagtctcccccagtggcaacatccttcgtaaccatggtgctctatcacaacctggatgttgatgttgrtacagtcggtcccaccacctgaggatccctcatgctgcccatttttcagaggggacactgaaatctgggcagcccccaaggtgaggggaccagggaagtgatggaaaggaggagctgacctgggggaggcagcgctccggggacctggcagggtcttcagcatctgctgggttgtctgatgcccaaggttggagtcagtctccgtgtgggaaatgcagacaggcagatggagggggctttcccatagtcagcacctacagttttaggcgttgcctcaggaagctctgagtgcctcatcactgatggtgtagaagaagctgtcatggggccaccgagtcaggctgagacagtgggaagccctggttggtrgaggcaggctgaaaggcccgtctgcttttctggagctccctgtctctcctgggcttccctgtgatttctctggattcagtccagaggagggaaatgagtgggcactgccgaatagcccgtggatagcagggcattccctgccagccctctgcctcctcctgccttagcaagggtactatgtgagactgcgggaggaggacccccagctgagattcatcagagcagggcatctgagccctggtttggggccatggtcttctctctgggagaactaaggactctgcaggcagacacttcacctgttgagagggagagagaaaagacagagagtcagcatgtggagaaatggttggggcagagagcccaggtcacctggactagtgcttttgggttctttttttcatcttgatgaaaaatttgcaatgtttaactattgtcacagaacaaataaaatggtgactaagttttgcaaatgtcatggctgagtctatgtttttcaaagagattttcccaaatttttctttctaatgatgcctggctagtctgctggttcatggacatcacgttggtgctgtttttctttagaggtagtgggatgacagataggggttagaggccgtggggtgtgctctctctggtactatttgctgcatgaaggaggcagtcttttggtttttcatttttcattaaaaaaatttattttttattttttatttttatttttaaattttattattattatactttaagttttagggtacatgtgcacaacgtgcaggtttgttacatatgtatacatgtgccatgttggcgtgctgcacccattaagtcgtcatttagcattaggtatatctcctaatgctatccctccctcttccccccaccccacaacagactggattaagaaaatgtggcacatatacaccatggaatactatgcagccataaaaaatgatgagttcatgtcctttgtagggacatggatgaaactggaaaccatcattctcagcaaactattgcaaggacaaaaaaccaaacactgcatgttctcactcataggtgggaattgagcaatgaaaatttttatttattttatttttttattttttgagacagggtcttgctctgtcacccaggctggagtgccgtggcgtgatctcggcctgctgcagccttgacctccctggctcaagcaatcttcccacataagcctcccaagtagctgggactgcggacatgtgccaccatgcctggctaattttgtttattttttgtagaggtggggtctcactatgttgctcaggcttgtctcaaactccgaggctcaagtgatccttccacctcagcctcccaaagtgctgagattatagacgtgagccacagtgcctggcctggtttttcatgacatgaatacaaaccctgatagtttcagttttacaagcctcatgtggctgtcaagtcttgaaaggcaaaggctgtatgggatgaagaggaaagagcagagtggcctgggatgcactgaagggaggggaggctgctttggagctcaggggagtggaaggaaggccgatggcgggggcagggcacaccactgcactctgctytcctgaggcgtccatctgacctctgacttagaaacacagtggattcatgccaggcccctgtggcagtcctggtccatggctggagtttggaaatacctgacctttgctctctaggtgacaagtgacctgggcggcagatcagctccagattctaatgaactctcccccatgtaaggctttttttgtagrccctggaaacagattgggagagccgatccccatttccaaggcccatgagcacatttttggaatggtccttatgaacgwckggagtggtaattactggagctctgctcctgtagagatgacggggaggaggctggggacttggggcartttcatagaagctgaagrtctggtgcaggtcaaaagtggcaggtgatgcagtgactgagagtgggggtctgggtatcaaacagactttcagctctaagaactcgggccactcacttaactcctctgagctccarttttctcgagtggctagggacacggctgacatcataactaatatttactgagcacttatgtgtcaggccctgtgcttaacacccttcgtatattctcccgctgatccctacacggtatgtgcaatattatcttcccattttacagatgaggaactgaggcacagggagatttcagttagttgctgaactaagatttgaagcaaaacagtccagcttctgagcctgagctctcaaccctttgccatacgtgggaggaagatggcaccataagccccagaaagtgtctctctcatagtttgagaatgagcttccagccccttcctgggagatatcctgaccaccgtttggtcatccttctctttgctgtaacctggcacagtgccctcaaaggacctctgtccttggcattgaatgctcttgcccctttgtcctggggcagcctgactggggctgatctttgtggagatggcagtgctaggtgtctctgctccttggtcaagggcaggagggggtcrttgggagatgccctgatcagcctttgtaagtcctggctgtgcccttcttctgcagcaygagacattcagaagtgggagtatgtccctctcgggccattccttgggaagagttttgggaccactgtctctcygtgrgtggtgcccatggatgctctcatgccctttgctgtgcccaacccgaagcaggtaagcacattctctgcaggaagctcccaaacccagccctgctgcctctgaggctgcttgcccactgagtggacatgccaggcatgcagaccatcaggagggaagctctgtgcccacggcatgcccacagcagagtgcctgggagttcctggccacgattacttccaggcagccagggcatcattctcccttgtggtttccctggccctggcacagttcttggagaaaacacagaattttgtaaccttaagaatcttgcaagacccgggggatctggccagttggcaggaggagtccctgcaggtaccaacattgcacaacctcccaggtggccatcaaatcttgttctgtgcaaatggcgccacctggaccccaactcatagaatgcagcttggagcccagcaacagggagtccctgcagcctctggttcccrgcaccgcttggtctaccactgggtctaggccttgacccctggttccagtcctcccttctcagcctgttgcaatctgccccactccatcactggcaacacctggccagagtcacctgtgacccgatagtcagtgtcatgaccttgtgtccccttcagcatggacttcctgtggcccctcactcttgttggcattccctcaccccttggtttctggcatgtgacctgtcctcgttctccagtgtctctgagtcctcacgatgcccctctccaattctgacctccctgtggggatccaggctgagctcccagccatttgcacatcctcgcttgagcatctcaccacgcatttgctgggggcctctaccaacacccggtgctggtcctgcacccacactgctctcccrtgctcctctgcctctggggtcatctcatgtttgctgtgctacaaacaaccctgaggtctttccttgcaagccagttctagtgaagtcctgtggggctttcaccctcatcccttgctctctcctcgctgctccctaccacagcaccccctgcccaccctggtcattttcagtcgccaggacttgactttctctctagctggcagcggccttgtctagtctccctagggctgcaaggccacagcctctctttgcttgtcctccagtcatctgccttcttccgggtcggtcatcacagggttttgcctgccttcctctgtgccagcccttccccaayaccatttaggtacaacactactattccccctctgaactattatttacttaatgttttccttcagagtggctcccagtttaaacttaatatattaagaagggaactttatattcctactggcatcactagctacactgtttcataaccattagtatcaccaaaaacgatctcatgtcccgtgggtgactcatgtaccatgctttggaaaacactgcttttggccggagtgcaggcgttctggcccagccatccaagctgcctccctagctggctccagcaccagccagggctgtctacttctgttgtgacccctctgccttccaggggccctgcaatgcgctttcaggcccagcctttcctcacaggccaggctttgttctccatctcggcctgtctgctgcccaycttccctttctctcccctcctgtggctttcaggaacatctctggtttggctcctgtgacctttgacctgctgatgccccttccttggctgcatttcctrgagacccacagtatgatcccccctactgctatccagggacacagtgctgggtccctggagagggaatgctcctgctgtctcagaccctctgcctaggggagcaggtgctgctgggggcctggctggtatgggggcccagccgggtgagctcagcccacctgccagtgacctctgtgctgtgctttgccctctcaggaccccaggcccctgccgtatctgtgccatgacgagccctacacatttgacatcaacctctctgttaacctgaaaggtatgttgtagggggactgacatggccaggagctctgaggcaatgtgtgcctgtgtgccttgtcctgaaggctcctgagctttggcaagggtgagggcacgtgctacagccctggagatgtgtgtggctcgtctaaaggaaagaggaggggagggsaggggacaccctggtgctcactgggaacctaactggkcccatagggcattaaccctgtcactgagctctcagtggtagggctgaaaggatggagtccgggacttccatcttctgcttgaatcccctccccagcctctccaggggctgcctggctcctgctcacatatcgccactgaccctcacttccgtggtgggtggcacatttcattgagtgcctgtttgaaagcatgtccttgtgggtctgttcgcttggctgagcccctggggccacacagagccagcgcatcaagaccccagattcccaccatgggccagccctgagtgtcttgcagacagacccgagatccccaccctgggccagccctgacatagacrgggcccacatctccctgtggctgctcagcccgcctccgcgaacaggcccaatggggcgttggtaataaagagactggctctgcaggccatgactctgctgctcagctgtgggactttgggcaagttgccaaacctggccatgtcctcatttgtcatctatgaaatgggataatagcggcgttgacctcatggtgtgttgtgaggaccaaacatgtcaattcatgcaaaggtctgggacagggtctgtacctagaaagagtcaggtgtcattttccaatcccaacgggggccctcggatggggagggtttgcctggtggccacacacagacctcctagccacactctggccaaatctcctttttagctccattccattcctttttcttttcttttcttctttttttttcccccgagatggagtttcactcttcttgcccaggctggagtgcaatggtgcgatcttggctcaccacaacctctgcycctgggttcaagcgagtcttctgcctcagcctcctgtgtagctgggattacaggcatgcgccaccatgcctggctaattttgtatttttagtagagatggggtttcttcatgttggtcaggatggtcttgaactcctraccttaggtggtctacccacctaggycttccaaagtgctgggattacaggcgtgagccaccatgcccggccagctccatttctttcttctgtctgctctgtctgtacackccaggctttgccatgtctgtctcactgtcagttccagggtctcggcccttcatgaggtggttcctgtcaggaggcgcagtacactgcaggagctgtcrccatgggagcaggatgctccatggagaaagagctgtcacagagagcctcctggctgcccagggccctctgggaagctgtgctgggcccgctctttcaggttccaggtcaggaagctgaggctcagagaggaaaaggattcacccygagccacctacctggctaatggcagggctgggactcaatccaagtgtgtcacaagttctaggttggcctcctgccacccacaatgygtgcttggwgtatactttctatctggttttgtcctcagtattcctggctgcctagaggtgaacctgcccgcccgggggaggccactggtagaaaagggacaagattatccagaaagcacagtgtccagagatgtagtcctgcatttgcagttctgatgttctgagttgggatctgggcgaaagggtctggggaggagcagccttggcagacccagacctcgcatggctgaagagcacacctgttctgtgccacctcagaggggaagttaggaccaagggaggaagccaggttttgagggagcagaggagctttctacttattagtgctgttcagaagtggaacggcaacagcccggtaccttgcatgtagtagatgtttagtaaatattgtttagtacgttgtgaagtagcacactgcccatcactggaggagctcggcaggggacagatgacccagctatccagaggactcctgaggggacagcaggttatccttgatcaaaggtcacaagtagctttcaaatggcacactatctttagtggatttgcgggtgccaggatcactgtgttaagaaggattctgaggctacatatggactcagagcaaacatgtgctgtgatcaattaatgctgcctgctgtaggcgtgggaggaggaagtgatgacttgtgtgcatgtattggccaaccctggacctcccagctctgatgtcctaggagctaattgtttcacagactctaagtgaaatcatgttggacaatgggaagcttcagccacagaacaattctttttttatyttcctccctgatgcatggaattaagttttcatcaatattgcttttctttccaacaggagaaggaatgagccaggcggctaccatatgcaagtccaattttaaggtaagctttgacgctgatcagactgctttttagaattgagggaaagagagacttttcttcctggcaggaacaggaggagagcattccttttgggatatgatgatgggtcagcctrtgggcctggagcttccatggcctgtctcttttaggagtggccatggggtcacagagttctctcgagatagaggctgcataaatgtggccagtgattttcttgggggaaaataggtgttcctgtaaaggtctagttcctggtttatcctgtcctgccaggggctgtattgatgagagtgacttattttttaagtgaacttttaattgaagcataatatacatagataaaaatgcacacattactgtaatcccagcactttgggaggccaaagtgggaggatcgcttaagcctaggagtttgagaccagcctgggcaacataatgagaccttgtctctgcaaaaagtaaaaaaattagccgggcgtggtagcatgcacctgtggtcccggctacttgggaggctaaggcaggaggatcgcttgagcccaggaggtcgaggctgcagtgagccatgatcacaccactgcattccagcatgcgtgacagagcaagaccctatttcaaaaaataaaaattaaaaaaagtgcatattatacatgtacagcttgaagaattttcctaaaatgaacatccctgtgcaaccagcacccagatcagaaatggraaatttccagcacctcagcagccccgtggggccctccaggtcacttcatcactccctccagcaaaggtcactcctctcctgacctctgctaccatgtattattttttttctgtttttcagttttatagaaatggcatcataaagtagcatgtattcttttgtagctggcatctttgttttagtgttagatytgtgagattcaaccctgttgctctttgcagtgacagctcatttttctcattgccttatagtgttgcactgtataaatattccacaactgacttaatttttttttttttttgagatggagtctcgctcgttgcccaggctggagtgcagtggcgcgatctcggctcactgcaaactccgcctcctgggttcatgccattctcctgcctcagcctcccgggtagctgggactacaggtgcccgccaccacgcccggctaatttttttttttgtatttttagtggagatggggtttcaccatgttagccaggatggtctcgatctcctgaccttgtgatccgcccgcctcagcctcccaaagtgctgggattacaggcatgagccactgcgcccggccaactgacttattttgtaagtcacatcaattccacaatcgatggacatttggttgtttccgttgtttttggctatcacagagttactgtgaacattttagtacacaccttttggtgcacatatgtgcacatttctattgagtgtatatccagtaataggcttgctgggtcatagagtacacatagactcagcctaggggtacttccaaacagttttttgaagtggttataccagtatatactcccactagcagcatgtaagcrttttgcctgctccayatcctcgtcagctctggtggtgtttgccttttcgttcaaaccgtgcctgggattgtgacttcagtttgcatttccctaatgactaatgcagctgggcatgttagtcatatgtttatggttcatttgtttcttggccttttgaatatcctctgaatcattgaactatttctagtttccctaatttcccttctaatttaatattattctgggctccttagggctagtaagaagaaattaaggggcctccttgcaggggctcgtgggcaagaatccatcttttgggtttcctatgccgggatgtgtggctgtaggaatggcaatgtgagaagctgtggcctgggacaggcatgggcgtgcattgcatctgagcgtctcggtgggcacgtggtgccttggccccctctgcccacagcctgaccgcccacagctctccctcgctccttggcctgccctgacatcgtgtttgaatcgttcagctccattgcccagtgtccatcccaaggcccggcatgggagaatgggagcgagggctttgctcacgagaagcctctgctgtggtgtggacttagattctcccaatacgggactggagggtgttcccagggcagagtggagtgttgtacacaagggcatgttgcaggctgagggactgagcagtaaggtcagcccttaggggatgctgcttggagaaggtggtcagtgtgggcttgaggtagcagaggagctgaggttggagyttgtgaaggagatggaagagcttgggggaggtctctgggcagctccccaggaggacaatgtgtccttactataagggactggagagagctggctgggggagctggggaccggggaaaggccagggaaggcggtcgtgagcagggcaggctgtgcccagctgcctccgggatgctaggctaagcctgcmgctgctcattccacctcgcgtccattgcctgcagtacatgtactggacgatgctgcagcagctcactcaccactctgtcaacrgctgcaacctgyggccgggggacctcctggcttctgggaccatcagygggccggtgagtatctggctgcactgagggctgcccacgcagagcatccctgctccccacacagccccaagggccctcagctcagcctcgagaagagatttcaggcccgaggtgggtgtatctcacaactctgtcttcctcgtagcctttctctctgggtgcaggagggacttctcatccaaattcaaacctaaagagactggtgtgagaacggaagcctgggtctctgcctctgtaggggagcagcgcagtgacacgtggggaggagtcaggagacagtgatagtgtcttggttgtcaccatctcacactacaccctcccaggatgaggtggccatgctgctgtgccccttcccacccgcttgtccccctgtaagcctgcgggagtcacagaaccttcagagatgatgaccttggggtggtgcatgtgtcactcacttcctgcagggggctggccgagccctcttgttccttgagctgtcgacaggagggtgttaagcatcacgatatctgggcaaactgcagcctccagagcagggaggggatgctgcagggggcactgggcactctggtcagggattcactgattcctaaacaagcgatgtccttagtggaaccattgctgtccccacaggaagaaggggcagagttccatgtctcaaaggcatctctgcagtgatcccaccaaggccgaggcagggtctctgaggggcatgagggccccctgccacttctcgggactcccaggtcttgctgagcatggtccatgccagagccaaggcataaattcatgttattctttcttccctttcctgtgatgaaggagccakaaaacttcggctccatgttggaactgtcrtggaaggkaacgaagcccatagacctggggaatggtcagaccrggaagtttctgctggacggggatgaagtcatcataacaggtgrgggctgccaaacccagcagctcgtcttcctccttgcccgccatgcactgttctagctgcggggcgctcctacctggccatgaagccatctgttctcacgcatcctgacyctgcctcccagagtctctgcctgcttgttctgtccttccccacagctrtggctacccgggacttcaagtgtgagtctccctaggccagaaagactgtagacattctgcttggtctcccttctccctgagcatagttataaaatactggcaggttcctcaaggtctagactttgcagcaaacgccctgtgcagacacttggtgacctatgactaggatcaaggaaggttcagctgagttagtgactgaggcttcgcagcagcctgttccaaggaggtgagggtgcctcttaattcttctgggggtgccattctgcctaccacattttactaatagagggaaagggcaccataatggttagcagcacactctttagagctggaaaggttcaagttgaactcccaggtcccccaccagctgtgtgaccttcattaagttatttagcctttctgagactcagtttacctcatctttaattattttttttgtttttgagtcggagtcttgctctctcatccaatctggagtgcagtggcacaatctcagctcactgcaacctccatctcccaggttcaagcgattctcctgtgccttagcctcccgagtagctgggattacaggygcgctaattgtgtatgtgtcagtttccgtgcttaactaaaagcttgtgttagtttcctgtggctgcagtaacatagtaccgcaaactttgtggcttaaaacaactgaaatgtattctctcacagctctataaggtacaagttcaaaatcctcgtgttggcagtgccatgttcctggaaactctggggagcgtctgtccctggcctcttccagcttctggtggaagcctctttgtcttgtggccacatcacactgatctctgcctccacggtcacattgtcgcctcgtcttctgtctcatctcctttacctctctcttataacacacatgtgatagcatttagagcccacctagacaatctcctcattctaagatcccaacttaatcacatctccagaaaatttactatataaggtaacattcacaggtcctagggatttggccgtaatttagtccactccagagctcttggagagcaaagtttagtccaagtagcagccacatagtgcatgcccagtgtggctgttggttagttctttgaataaagtggatttggtagagaagatgcaggcagagctcaaaacagcagatgatacccattattaatcaataaatacccattttgctcccatttctgcagcctaattatacctctctaatttgaatttgactatttactgaacatctgctaggagccaaccatattgcaggcatgtccaccttccttatttcattttctactcacaatagccctttgatgatataatatcattgcccccattttgcagagtcgaaaacttaggctgatagaaggcaggttacttgacaaaagtcccacaactggggaagccagtctgcaactgaggtcttctgattcccctgccaagtttgtttctagtctttctgcaatgcttgccagacctaccgcaggcctttggtcacggttctgtggattgagtgaaagcattttctgaagttttgatttggggaaaggaaggaaagagatggtggcagaagagaaaatgatggctttaactctctgttgtcagtgtgataagggcccctgactaagccatgctagaccaggcagctgtccagggcctgggagaaaggaggctggtatctagcagttggaatgcacatgtgttcttgacatttgagccagagaaggaaggagaaaggagccaagatgccatgagagtcatttccatgtttgtttgtgtatacaacgccttactccggaaggatttttggaggccagcagaggaattcagggaaaggcagttccttggatctgaagaagcacatgttggcaagtgaagagggaaatgggaacagatgggcaaaatcccctggaaccaagaaagaagaattataatttgctaagaggagaggcatacattatgtgttcataaaaagaaaaaagagaatttcatacagaaggggaccactgaaaaactcaaaagaatgcatattgctagaatttgggctaagcagggggtaagcagaggagcgggcaggtggaggtggtgtgtcagctgtgttaccttgtgcaaaggttccccgcattggcggacggctctgccctcaccttctacgacttcactggtcacgtggccctgctgagctgctttcttgcttgaaagccacacatggtttcttcagctcttcccggctttcctcctccttctctgcacctgctcagatgcctttatggctgcctctcatttccctgcttgctcttcacggatgctccttccccaaatcaatttctaaccattggaaacgcgatagaacattcagaagtgctggcatcagccaacgccgcagcacttactgcaggccagacactgtgccaagtgctttacctgcaatacattttctattccaaacaaggcagctactcttactgtctctatttttcagatgtggaaactgaggcccagaaagatgcatacttacccaggatcacacaggcgataaagggtagagccagggtttgaacacaggcagttgggctccaggagctgtgctctgaacccttgtgtcctgttgcctctttaaatggcgcgatgaaattctcatttctgagagagtccaaaaaccacaaaatgttcagcaagagaacaggtgaagtaaacaaaccaaaaatatcaacaaaaatctctgatcgtcttggtttaactcatccatcccctagtctcgctcacaaaccccatctggtgttgagcttgcaacttgcaaggatgtgttctcgcaggcatttgcacggatggctctgcactgctggacacatgcatttctcactctccttcagatctttgatttgttgatagttatgatttgttgtggattctttcttggtatctgacattatttggaaacaatatctgagcaaaagtctttcgtttcttgccctgcgtctctcagtggtggcgtctttcacctggtgttcctgtgtctctgtttattccagtttctctccccagcattattgcttgccttgcctggcacagaattcctgcgcaaggctgaccaggggtcccagggtgtagaagcggtgacccttctccttcaggaccatggttgggagagactctttaaaaatgctgcagttccgagttagttgttttgatagatgtttaataaatttctgctgggagccagttttactttaataggctttttttttcaccccagtggtgtggatatttctgagcattgaggtggaaaagagactgacagaaaataatgaaaatgagcaacagaataggtgaggtcgttgctctcgacaaagggcatccctgcatgttgtcagcatgtgggtcacggggcttcttagggccccccaaaggacagcctcactgaacagatgtgacaaatgcatctcgtgcctgagtgtctgagcctttgcacgtgttcttccctctgtctggaatggcattttcatgtgtcttccctaatgaactcctagctacccgtcaaggcccagctaagatatccccccttcctgctccctttccctccatgctgctcgctcagcaccttgtaagcatttctctgtatctctcgtctggacctcccactccctctaagtggacccctctcaagggcagagatgggcttctctctgcttttccatcatccttgttgaaatggaattaaatgaaggaaactaatatttattagtttctgagatgtgctgggaatttcactgaaatatttagtctaatccttacaaccttgagagataagcgttgtttttcttgtttgcagatgagggaggtgagttctgaagtcaaacagcttgttcccagccacccagctcataatggttgtaatgactgacacttacagggaatttcaaatagggactggaggctgttctcagagttttctatgcatttgctcccatcatccttgcagcagtcctgtgcggtgggcactatcataagatccattgcacagatgaagaaactgaggtctagagggacccaaggttacagagccaataagtagaggagccaggctttgacctcaggcattctggcttcaggctaattggcagagcgaggatttgaacccaaacccatgtggggagagttgaccactgtattagtctgttttcacactgctgataaagacattcctgagactgggtaattcataaagaaagagaggtttaatggactcacagttccacatggctggggaggcctcacaatcatagtggaaggcaaaaggcatgtcttacatggtggcaggcaagagagaatgagagccaagtgaaaggagaaaccgcttataaaaacatcagatctcatgagacttcttcactaccatgagaacagtatggaggaaaccgctccatgattcaattatctcccactgtgtacctcccacaacacatgggaattatgggagctataattcaaaatgaggtttggcgggggacagagccaaaccatattagccacaggaaagctgttgagccttgcagtgcctctgaggatccctggctgtggggtrggcccrggttctagtccaagggctcctgcgtgcaactctgcccagcttccgtggagggttattcttgtgtttaagatatgtgtgtgtgattctgatggcaccttcctgcctygggccagctgtgtgctgacgggcactgccgctgcctaggtgttggttccggtgagcccagcaactttgtgactgatccttgtcctcctctgttccagggtactgccagggggatggttaccgcatcggctttggccagtgtgctggaaaagtgctgcctgctctcctgccatcatragattttytctgctyttytggaaacaaagggctcaagcmcycctttcaaccctgtgactggggtcctccctcgggctgtaggcctggtccgccaytcagtgacaaataaagccattgtgctctgaggcctgcactgccgcagatgcagctgtgtccacttatgatcgtgatttgatccagtgggtcaaggtgtgtaaagcctccctgccagatattcattaatatgttttctcactcttattagtgaggtcaggggtctttgtgggattttcttattagacatcccaggcctcctggtattccatggaatttgaaaagagactggcacctgtagtagtcagggctctccagagaaatagaaccaaggagaaagagatcgatttattgattgattgattgattttaagcaaattggcttctgggattctggagggtggcaagcccaaaacctgctgggtgggttgctggctggagacccaaggaagagctgcagtttgagtctgaagcagtctgctgtcaaaatttcctcttcctctgggaagtgagtcattgtttggtgaaggccatcaactgattagatgaggcccagccacactgtgggggtcttctgctttactccactgatttaagttttatttcacctaaaaagtactttcttagaaacatgtagaatagcatttgagcaaatatttgggtaccttagtctagccaaattaatacagaaaactgcccatcacagcaccctgcatgtccagtgtttcttggggctaacggatgagcacatatgggttgtaggcttggttcatgggccccgtggctgcgtctccacactgtaagccttgggaagagcctccgagtcatgggtgagcacctgaactgtgatgatggcagaaaaggacctagcttttcacctcttgcaagcccaccagagtcaggagagtgagctctgccccatctcttctgtcccaacccattgcacacaggcagccctggttctaccctagttccttggtgatgacagcaggggagtatgccctgcgacctttcctgggcctgatgagccttataccggggcctagggggatagttgaggatgcagagcccatccgtcagatcgcaccattcattcattcactcaacaaatctttattgagcaccttctgtgtgttaagcactgttctaaggatgagaggcacagcagtaaacagaatagcccatttgaagcttacattcgagtggaaagagatagacaataaacagataaggaaaagacatgtggtatgacagatggtaataagttttatggacaattgggagatgtggatgctattgttaatgtggttagagaaggccttaatcccatagtacatttctgctagagagctgaaggagtgaggggagcaggccagatggatatctggggacagagtcctccaggcacaggaatcagcccgtgcaaagccctgaggatggaatatgcttatcatttctaaagaacatcaaggaggctggtatttcttccttacataaaagcaacctggggtcaggaaggctggagttagtgtggcagctgcacagtgtcattaaagatacctctgctctgccatcgtcggtatgtggtttttagtctcagggttacattatgatacaaaatggctgctggagctccaactagtacatctaagttccaggccagcagaaagagacaacaaagaggtgaggactgggaggatggaagggcagaagagccctccttcctcctgagttaggtcattttaagcagctttcctggtagtcccataccacacatgtcttagatttcattgatgagacacacctcattacaagaaagcctggaaatgtagtctttcatctaaacacattgcttgccctgtgaaaattagtttgattgccctaaaagaaggggagaatggatactgggggacaattagtagtctctgctacacacaggctgggaaatatcatgctctgaggctgaactgctccccgtggactttacttcctagagctatgctctagggccatattctccagtgctttgctgatttcagtggaaatgctgtatagggcagatgtcagcaggatctcccagatgctactttccagatcagtgatgcaaacacttctctgaatttggaagaccaaagccttccccaggatttttctgaattcctggggcttatgttcccagggctacatctgcttctgttgactcagctaaaacccctgctctctaggctgtgttctgagattgttcctaaacccttctctccttgttcctaaagccttctctcccggcatcaacccacaggagtgactcatctttttctcaaagccctcacctgcacatggataaaaggccctcgtgctctgcacagtagggctttactggagatctctgggtcacaggcaaaggtcacttaaaatcattgttaatccacttgttcccactggcaccagagaatgctggtgtcatcagtagagatcacacgcttatccccttgttgggcatttaatgcacttaaagggcttggtgatgttgggaaaacccaatggacctgccccagagtctgaaacacacacagggcagaaagagccagaaacgttcctggcatcagattcacttaagaaaccaaactcatggatgttaattctgggtccagcctgggctttacttggcaattacttttccttaatcttcagcgacaagagcctctttgttttactgtctccgactccagaaatgctcactgccagccccacatgacaagtgactttaatggtctttagttttggagatctactttattgaaacctatctgtgtgtaataatatgaaatagacaagaatgactttcagggtcaaatttcctctttttgacagtgatattttaaggactagaagcattttgaccagatgaatggagctttcagacgggatgatgagcatctcaaggcaggttggccatagttatcactatatcttccttattaatttgtattccatttatgcttcctgtttttaaccagtggtccattcggaatatgaatggatgactgtgaaactgagagtagagttcatttgaaactttacctgaccaggaggagtcagtccagaggtgtttctggcaagatggggcccactgctggttttattgtagggtggcaagggagctaggctcaggggcacgctactgcccggggccagggcaggcactaggggttccaggggctgggagcccctgtccctattgcagaggggactggaggaagagaagccttgttgcccccaccatgggacttctctgtcctgaggcctctcacacacattggtttacctttgaaacactgtacattgagagctctcctgagggtgagtgtagacttgaaccaagacaatgtttttgaggacaagggaactttaaggattttttctgtttttttgtttcgttttgttttttaattttgagaaagggtctcactctgtcacctaggctggagtgcagtggcacaatcttggctcactgcagccttgacttctctggctcaggtgatcttcccacctcagcctcccaagtagctgagactacaggtgcacaccaccatggccaggtgattttttgattttttatagagacgggatctcactatgttgcccaggctggtcttgaactcctgtgctcaagtgatcttcctgccttgccctcccaaagtcctgggattacaggcatgacacaccatgcctggcaattttggggtgtaaagtatcacaattaatattatctcaaagattcctgacaccaaaatggatctcaaaagtggttctattttcacattttctccctttctttagtttggaagcatattccctttaacacccccagaaaaagtaatttggcagggttgtatcctgaagtactaatttgttttctgtgtatcccctctctttctgtcctctcagcaagatttccagggctgtgggagtattttgctctccttcctcctgcagagaggcagaaagaaactcgtgggagagggaccaagactggatgcttgcttgcaagcctgtttttgttttttaaaattctgctcttgaaaactaaataaggctgaggccagtcttattttcagactgtttgccaacagcacaccaaaaagttggagtgacaatttctttcttggagagggaatggagtagcatggcacatctattcccaccaaggtcatgatcctggaaataaatagacctttgttgtctatgatgatttgatcaatatctgccttcattggattttcagctccttgaggatagtctgcttttgcttactgaaagttcatcagtacctagcacgtaagagccgctcgatgtatactcattcagtaagtgaatgaattctaggagagcactgggagcagattgtgtcttattgataggtctacttctagcatttgcagggcctaagctgagagtgctcatggagtctcagtatttaggaggtataaacaagctatacactgttaaataaaatactttctattctcctacctagatatgtttgctttcataattgcaaaacaaacatatttgcaaagtgatggcttttatgtgattgaaaattggtaaaatatacaactaaacttaattatcaccgcacttgaagaaagtcgatgggatggcaatgtttggatgagcattaaagacataaattcatgaattttatactttatacatttttaaaatcagactttaatttttacaattatttttctttctttaatttcattagaatcattaattatgctctcctgagcttttcatataatgtgtggtttattgatgatataaaagattaaaaagtacattgaattatacttcagtgtacaagaagtaaatatcttcatcaaaactctgtgttaaaaattgaaaaattaaatttttcatatgcattttcaaagttagttttctttgaaaatattcaaaattattaataataaaaagcgagatacaaataattaaagagctttaatatttaatctcaaaattctttaaatcaaaatgaaatgtctaaattcattttttgaaaatgtaataaaatctgtttttgttttgttttttgatatggggtctcactatgctgcccaggctggcctcaaactcctgggctcaagggatcatcctgcctcagccatctgagtagctggaattacaagcccgtgtcactgcacccagctcaaaaaaattaattaaatcttattaaatatattttataaaaacaaaactactttgcagtcttagtgttcactgtccacttagttgccaaagtaaagaattagtatcactctttgtttaggttatgagacccatgtgccaacgagggcacatgttgtgagtcccttcagaaccacagattggaaataaagtttggttttaaaaatttataaagtaggtatgtagttgatgaatttatgtctttaattctcatccaaatattgccatcccatcaactctcttcaagkgcaatgataattaagttcagttgcctattttaccaattttcaatcatataaaagccaaaaaagaaaaaaaaaaagcaagaaagtggatatttgatataaatgggaaatgtcatttgtttggggaagaatcagttacattctggctaggaggaagtgtgtaacaagttgaataatcattcctttctcttacctaagcgcttccactgacatgtccacctccagggttggacctgccacagtcctgcgtgacattcacacagtctcttttattctggggacacagggcagggatgtaaagaagaactcccctggcttggacagtattactcatatttgcagtacaggttgagctgcaccaacctgaggcccgagggatagaggtgcttgtatgaatttgaacaaattgatttgtatgtgcgtatctgttataagctgggccctctgtggcatgagttccaaggaagcccccactccataccttaccccagcctaagggcaatattgcttctttacctccatctttggaccccacacggtctctgatatttgttttgtaatagcagagacttgttcatttcacacaactagtgagtggcagagctgaaactggattctagagctt

SEQ ID NO: 93683 - DNA, 37642 bp, Homo sapiens
tctcaacaactgccaggagcccctgggccagaattcaagtctgattcatcttggtgtgcttggagcttggcatggggccaggcacagagaggtggctcaatgtataagccaattaactgcgagccaactgaagaagccaccctgttcaccctttcccacacccttcaagtgcaaatttctcccttttctcccaagccagcttgctgcttcttccctctacgtctgccctgaaatagaaatgtcagacatttaagtgcaagtgagtcctttataaagtctgagggtggctttttctttaaagatgtgtaggagataatcagcaagattgagaatatcaccacccatcctgcataagcgagagaagcatttcttaaagggtgaactagaaggaaaggtggtttctaggaaagcaggtgtacatgcagtctcaacacaggatactttgttaagtatcaggtattgaaaaggccttctgatacattgaaacctcaggctaggaagcgaagacagagaaagtgaccacgcctggccactgctggaagaaaatgccagaaggccatcttcccacagtcatggcagcctttaccccacaatgggagatgcgccaccaggagacacccccccttttgatcccaagctcagctttactgtacagtgtggcaggcattaggcagagaaagcagcaaagtgcgtcgccacttggttgccctttttacactagcccgggtccacaccctgccgccccagccagctccagggtagggttacaccactttcctttttcttcttatttttaaaagacgagggcgctacaaatatctttccagcaagagcccgatcctggcacgcgggcgggggcaggggggtgggggaactctcatttttcttccctgcggctggcaaattttccccgtcctctttcccctagggcccccctcaagtctcagcccttggtgcagaaaatggggccccaggttactgcggcctcgccctgcaaacaagtttccactggcttggccgcttgcagaattgccagggcaggcgctgagcgtggtcagagagcgtctctacatcccgggatcttgcaccccgaggcccctccgtgctcgccccggatcggtgtcccgggtagggggaccccacttaccccacaatggaaatcatcatggcagccaccaccaggtagttggtctggtaatagagcaggttgctcactacgcggttgttccatttggaaatgtccctgaagtccggccgggcaaagcgatcggaacccgggaagaaatcgtcccaggcgcggagtggggcgatattaacgtccatgttctcagctttgcsttcttcgcctccagaatctggcggcggcggcggcggcaaccgatcagctgagctgagttggagagttgacagcggctccgtctcggtcggctttgcggttggcagacagcagagcaaaggaaattgggagtgggcgggcgtgtttgctcctctttacttcttcattggctcttggttgggtacaggaaaacaggaacctccagacagaacaagggactgagtgcagaatagagacgaaatgacagaaagcaactagcggaaatcccctgtctgaagggaggtggcaatgccttctctagcagcagagaagctgcctccttcgaaataccttttttgaaggtttacctaggagtgtgttctctgacttagagaaaaattttggcagctgtgcagatgccaatctaagtgaaatgaaatggaaggcgactacagtgttaatggagaatgagctgcttttgaaaactaagtcttactaacctctacacatctgaatgcaattcccatgttttctctgtttcaccatgagtcactatgtgtgaaatcagattggcaaaacgggaaagaaggtcatgtagaacagaagggctggtctgtttttttcacttctcttctttgttctccacctctgttctctctaggctaaattgttggactgctatgccattctgataaagtaggcactctggccacttcagtcctgagctgggcatgttgcttacattttaaagcaaacagttgtctgcagtgaactagttgttctgcatccagcattttctgggcagaaatatgcattccacttcaaaagttttcttagttttattgcaatatttggtgacagctttcactgagggaccacaatatattcatagataacgtgatgttttgtatcccagcccaaagacctggcaaaagaagtattcgttgtcaattctcttctaagcttccaagggtcatcttttttcagttaaggggctgattggtacaatgcatgagaaaaaaagtagtttgtttaattgtataatgtaataggtagaattctaaggtgaagatttctaagataacagagtctctaagcccctaagtggcttagacaaggtgaattcactctactcagatcaccaatttttgaaaacttggaaagtaatgaaatatactaatgcaaagtctagaaaacataatttaattttccttattaattcagaagacagttaaggagcttacagcgactctaagaaattactactactactgttgtttaggaaaatttggtgattgcatggaattagtgctaagatatatcttatgtgctgctttttgaataaagtttaaaatgtgaaaatattcctgagtgctcatgttttcttgattctggaaaaatgggatggtgtgaagtcagagaaagcaaaattagagtcgcagctccttcctctctggcaggtgactttggagaaactacttaatctctcccagcctcggtgtcttcatgtgtaaagtggggataatggaacatctgccatatagacgaggctaagtgaaggaatgtataggaaatgcttagtgtataataaaggttcacagttatatgttactattattgttattagcaataggatagcccacgattcttgtttgctattaatagtgctttaatctgatttgttttctatgctttcattataaacatctactaacttttctctaccttgctccaactttattgttgtggatgtatctgggtagggggaaaaggttgagaatattcagtacaatgccagcaagtatttcgagttcttttgaggctctgtgaaagcactgtgggttttttttcttttcttttctttttttttttaaagaggagaaaaatgtaatcctgctctgccttcaaaacttctgcaatccagtggaaacactagttaaatatgagacagtaagaggagtgctaaatagagatgcactgagcctcagtgctcagttacaggaagtcagagggtgtggaggaattccccagggcttcagaatgtcaagaggcagcactgtgggcaagctgagtaaatcatcttggtcaagatgagagtgggaactccagtggggccccacactgttggtgagatttatgagtattagaagctgtaactaagaactttatcttccaactgctcagaactgcatgaccaaaagctgtcaagagtgtattagtaacaatatgattactccttgatcacaggcaattgatacccaagaaagaattaaacctctttagaggtttaaacataaataaataaattctgaaaagacagagaaagctgtttatagcatgattcccttctgtctccctcccaaaatgttaaccctgtctctctctttggggtatgggagattttttttttctctaaatatttctacctttgttaaattattttaaataaaaatgaacatgtaatgagtcattacttttttccagtaactgtttgaaatgctattagtagcagctctttgttagtgttcattccggggagggaggggtcagattcactgtagaggtctttctggagctttaatttattattatttttagagacagggtctcactatgttgcccaggctggttttaaactcctgggctcaaacagtcctcccacctcagcctcccaagtagccgggactacaggtgtgggaagccgagccctgcttgatggggcttttataatgggactggtgtgtctagataggaccattcagactatctgtctgtttaaaaaccatagcagatagtctaattgtttatgatatgttccatttgaagtaaaataaatctgttgaaggttttgcttgcatgtctctgttgctttcattcctggcaagggcagatggctatttctaatccgtcaatcaatctaagccagtgagagtgcctggtgtcgtttatcaaaataccaccatggtgagtcaggctgttagtctcaaagcaagcagatgcagggccagatacctttgcagacttcttcatcggctagctgtactctatccctaggcctcagtttcctcccctgtgaaatgggtgagactggactaggtggcctttaaggtgactgctgcttttcactatctgagagggttgcaatgctcactaccactaatcaaagggtatccagtattgttgggggttcaggctacaggagcccattttgataagcactgaggttaaatcctcagtgaaaccatctgtggagttgtctgggcaagaaaaagtagtttcatagttgacgctgagacatgtgatgcagaaggaggctggtatctcttgatagggactgtgaactctattcccacgctcactgcctggcattgactttcagctcagtgaatgctattgaactgaacctaattgggggaccataaaggacaagctttccttaaggttcactgaaaactaggacaagaggaggttaaatatcacagtgtagtaacagcagctacatttactgagtacccatcaggctttatgtactccatttcagtggccctcaaactttaccagtggagaatcaccccaggctttgcagaaggctgaagggtggggtggcgggggggcggtggggagcgtggtgggggcggtgaggggtgaaaatttgtgttaaaaaaaacttcccaagtgatgttgatcaggaactgtattttgagagccactctggattttacttaattatcagtcttacaaggtgaatagtgttatgcccactttataaatgaagaaatagaagtgtctaagggtttcgtagctcacaactgagaagaatttaaaatcagttacttttgattccaaatatcattcttgtcccactccatagaaggagatgtgtgtgtacgtgtatatacatacatttttgaacatgatcatttccctctatccagccatccagattcacagtgtatatttgtatttctgactctagaagaaaataattgaaacttttatcacaatttatctttaggtgataggattatgggtgttctcagttattctttgatttttgtgattgttttcctttatacttttttctttgtatctaaatatacacatttatctcaggaaaagttttaatcattttgtttccgctgaacttatctaacagaatgtgacatgaaaatattaatgctgatttgttcaaagaaaataataatctcccaccccaccaatgtaaacggatttagataaatttattattcaagtgagtacttataaaggcaaagactttggaaccatcctgaaaagcagaaagtgaaaatttccttgatctttgcccccagaggaaagctctggcatactgggagggttcttcacgaatttttcatagaatataccaatattttgtataattacgtattaacatatagtttgtgtaaacgcataatgtattgtctacattttcacgctgcagagcaacattatgcacggtataagattcacctaattaagcgtaggtaattaagattataattacagggcaagactttaaagcccatgggagcccagccgcagtcaacctcgcacctccctgccggttgtgtttctggcctcgcccctccccgcttcgccagccccgcccctccccgctttgccagtcccgctcctccccgccctgccgcgcgtgggcacctgggaagaggcggagaacaatatggcggatggcgaggagccgtaagtaccggggctctgcagacgcgccgggctgggctgggttgtgagagagcgcggcggtgggcggttgccgccgccacccggggtccccacaccccccgccccgtcccctcgcccccctcccctcgcggcgcccagtgtgtagcgcgatgctgacccttcttttattctctcttttagggagaagaaaagaaggagaatagaggagctgctggctgagaagttagtgctgccgggaggccggggccctctccggggacccccgcctccccccaccccaggcctaggggaccagccgcagcgggcccggggggctgggagggggacacccggagcgcaggccgcgctgcctcatcccctgatccccgccccgcagccccgggggcctggcgggccgctcccggtatctgcccggtgcgggcgtcggggccaggctgtactgccccagctcctgcaggggccctccggggtgcttgacgtaaaggtcttgaggaaggacccttgtgcactcctcttcctccatcccaaattgtcagagcagtgaccctgtgamaaggcaatctaccttaaacacacaggaaaaggacacaagaccgttttgtggccttttgcaaacactgagacagtagtactaattgcaaacttttaatgataactctacatgtcaggtattgtactaagcactccagtcattttggcagaataattggctcttaaaagatctggaaagaggttgttgacytcaaacagcctatttatcccttttactacacaccctatttcttatcagatgcttaattctrtgctggtgagacagatttaatcgaagtgttttctaacctggccagcgccacataatttactcccctccctgcctgggcagggaaaaaatactcttgcattggttatggtgagtttgtaaatttccgtgccgattcccagtagcagtgctttgatctttatgtgtgtccctcagttgaatttcagctgcaagaggaccgggatgacaaacttaatttcacattctttcctgccttttatttccctcccacttttacatgaaatcacaattaaacattgcttaccatatcccacgtactgtactgagtcttctgtgtgattatctatatcctcatggctgaaagaagtagctatgaacggcctgcagatgaggtttatgtctattaagtaatctgctcaaggtcacagtgctgttaattgtggaacccaacacaactctgacatcaaaacgtatggtttttattgctaggcaatacttcttggtcccttttgtaaaaattggatattactaatatatttgacggtagaaactgtggagttataggaaattagaaaattaaaaataatcacaaccaaacgtgaatcttaactaagtataaaatagatgaattttgtagaggagtcccaccttattctgttgtatgttctaaaaggtttgtagatgtctatctgtggcgtaattgtaatctgaaactttgtgtttagtggcaagaaaagccgtcccacagcattaagagattctttaaaaaattaagacctctgccaggttcggtggctcatgcctgtaatcccagcactttgggaggccgaggtggacggattacttgagctcaggagtttcagaccagcctgtgcaacatggcgaaacccgtctctactaaaaatacaaaaattrgctgggtatggtggcatgtacctgtaggcacagctacttgggaggctgaggcaggagaatcacttgagcccaggagggcaaggctgcagtgagctgcagtcacaccactgcactccagcctgggcaacacagtgagactctgtcacaaaaaaagaaaaagaaaaagaaaaaataaccttatttctgagaaaagtgtgtgaaaattcctctcatcaaagtgatttttagattacacctttggaaaggacacataaatattaaatttgcatcagacatataagcatcagaattctgaaagtgtgactttttttctctgttgtatctcatatttcctaatgcaagtgtgatgaaacaacagattgaggaagcttgcagtgttttttttgtaaataccaaatgtagagaagtcaatttctcacataatagaccaatatcctaagttgaaccttggattgctttaggaaaccaaaaacatgtagactgatttatttcatccattgggtgaaataaaaatagaaacgtgcagttcttaactttaaatgaattgtataataggcaagaaaaaatttcaaagcataaacataatcacattgaatattttcctttttatttgagcaggtctggtgtggttaccttttcatttggggataccatartagttgtaggtgtggtttttttcatactgatctttgcagctgaatttactgtgttctgtgcagaatggctgttgatggtgggtgtggggacactggagactgggaaggtcgctggaaccatgtaaagaagttcctcgagcgatctggacccttcacacaccctgatttcgaaccgagcactgaagtgagaaacgtttatttttaaataactgctctaatagttttatgtttcaaaactaatagaatgcttcttttttaatttgctcttacaatgaaaatactaataaaattgttttgtgaaactaaatttttcttaaaatatgagattgaatattcacaactgattttgtttgaatatttgagtcttaacatttctcatgtaatataagttgaaaatttttgtgagaaaaatctaacttcatgacctcatgtaaaaatttaaaatgctttctgaaacatactccccttttgtagtgctactgtgagaaattaattttgataggartataggtgtgcttacttaaattttgaaatttagttggaatgaacatcttagctttgagtataattaattgcatgttaagaattatgtaagtactaaataatagaggcgtagaattttggactgatagtgtctrtcttaaggcaagtgttcacttatatgtcacttttttttattacagggtagggaaaagtatagcacatctttatgtgcttttgtatttataaaaagatagtattttgaaatagaaatattgtgttactcccataaattaacgtgcaaactcttggtttggcccagtgtctcatgtgaataactttctcctttaatgctgggcagaactgaaagcattaaaaataaaaaaaaaaaaaagaaaaagaattgaaagtattaattctgtctttctttagataacacaccatattttcttgtgcttctaaatttttttttttgcctgataatttaagattgttacttctgttaaatgattgtatttctgctgataaggaattttctaagagttttatatgttttcgtgttatctcatgttttgtgagtttcgctcactttattcaaaaggagatgttggccaggtaaggtggctcacgcctgtaatcccagcactttgggaggtcaaggcgggaggatcacttgagcccaagagttccagaccaccctgggcaacatagagagaacccatctctaaaaaaaaaaagaaagaaaaaaagaaaagraaaaaaaattagctgkgcatgatgatacatgtctttggtttcagctactcaggaggttgaggtgggaggattgcttgactgcacctggaggtggaggctgcagggagctctgatcatgccactgcactccagcctgggtgacacagtgagaccctgtctcaaaaaggaaaaaaaaaagcagctgttactctttccccttccatctgccgcagatggagttttgcttttgttgcccaggctggaatgcaatggtgtgatcttggctcatggtaacctctgcctcccaggatcaagtgattctcctgcctcagcctcccaagtagctgggatgacaggcgcccaccaccacacctggctaattttttatatttttagtagagacagggtttcaccatgttggtcaggctggtctttcctgacctcaggtgatccacccacctcagcctcccaaagtgctgggattacaggtgtgagccacagtgcccagccctgttactctttttaccttattgttttactcctttaaacactttgggcagtgcttgatcctctgttttttaaatttttaaacttttatatttttaggaagtcagttaactgaatttgatgttctctatccctttgcaaaaattaaaaaacaaattagagatagttttccttgttaaaaataccctttaactttcatacaataaaaggcaatttaaaaacattaatggccggacgcggcacctcatgcctgtaatccaagaaactttgggaggctgaggcgggcggatcacttgaggtcaggagttcaaggccagtctggcccacatggtgaaaccctgtatctactaaaaataaaaaattagccaggtgtggtagtgcacacctataatcccagctactcgagaagctgaggcaggagaatcacctgaatctgggaggcggaggttgcagtgagccgagatcccatcagtcactccagcctgtgtgacaagagcgagactccgtctcaaaaaaaagaaaaaaaaaagaaaaattaacattgaaacttcctgaaatcattagagttttagaattcctggttcaatagaattcacaaatttcaaataattgagcaaatacaaagtctcctctttatcctagtggcattttttcctggaaacatcagaaactattttaaagtttgttgctttatttatagtctttgcggttatcacccagcttttaatatgcctttccattctttacagtctctccagttcttgttagatacatgtaaagttctagtcattggagctggcggcttaggatgtgagctcctgaaaaatctggtaatatatatacatatatatataaatatttttttcttctttgtgataagtaaaccttacttatctgtcatactagggaatttctcgtgattcttaaccttttctcttgagcctttgttagataagtttagcatgccaaattccaaacagtaattaaaatggtagaactttggaactttttaaattctaaagctctcagctataaagttattgataaaatttcatacttcagttttcttctctgatctttaacaaacaacttttggtgcttcctctggcaaaacgctcctaacttcaatgaagtaaataacaaaactggcaattcatattttaatgtatagtttcaaataatttattatttcttttgcttccccaaataacccagctaggtgggtaaggcattaccccattttatatagagggagacattgaggtttagagatgttgactgagttgctgaagtttttgtggattatagcgatttgcctggaattgaatccaggtcatcagttcttagttaagtgttctttttcagtgaaccattaggtcattttatgacctaataagacgattgtggacacctaaggtttgggaaagctaaacctttactgaacttatttgcatatatttagaaataaattaagtatataatttgatttaattaattggtttccttgactttttctaatcacaaagtcgctttctataaattttaatgagtttatgtaacaaatgagtagaggcagaattggtttagagttgtatgctaggcttctcactgctgtgtagaaaagtggaaatgctggaatagactctttagaaaataaagcaggtcacagccagatggaggacccaaataattggccaagggggttaaagtttaaatataaacatagccacattaattttgttaagaaacactaatgtcgcttgagtgaagttgtaaaaacttaaatatacttcactgtatttaatgtcttgctgggttctgtggggattatatgtcatcgtggtctctgtcttcaatcaatctgaagtttcattggggagataaatctcacatgaaataaatagcagtatgcatgatatactctgtggtggaatgccaaaatgacagtaccgtatcaaacataaatactctagcagtgtgagaaccaaagacttagagaaggaaagggtttatggaggatgggcattggtttttgttaggtattataaatgtacaagtttcctaaagcttattaaattttgaagccattatttgcaaatgtgacatttactaattttaagtgtaaaataattgaagattagmtctgaagattagtcaccaagcaactttaaggagtgacctcttctttattgcattatagtaatcttttacacaaaagaagaaaactaagggttttcaattttactccttgttttgcttatttaattcattgtaagccccctaaaggctcattctaacaaaaaagaatatgatactagactgggcatggtggctcacacctgtaatcccagcactttgggaggccgaggcaggcggatcacaaggtcaggagatcgagactatcctgactaacacagtgaaaccccgtctctactaaaaaatacagaaaacaaaaaattagccgggcrtggtggcaggtgcctgtagtcccagctactcgggaggctgaggcgagagagtggcgtgaacccgggaggcagagcttgcagtgagccgagatcacaccactgcactccagcctgggcaacagagcgagactccgtctcaaaaaaaaaaaaaaaaagatactaatattactgattgagcaaatatttattgagcctccatcccatatgccaagcaccattttagatgctgaagatacagcattgaacaaatacagaaaggtgtttgcattggtgggactcacattttagttgaatgaaaaagtaagtatatagtatgtcaaatggtgtgaagggaaaaggtttacaaaaaggtgctattgagtacaaaggtgagcaaatgagccatacagttatctgtaggaagaatattctagttagagagaataacaggtacaaagctgtgaagtggagcactcctgtttgttcaaggactgcaaggaggctatcatcgctagagcagaagtgggttgggggagcatttttggagaccatatcagacagataatgggagatggaggggcttggagtggatatcacaaaagactttggaggttactgtaagtgctstcgcttttactctgagtcatgaagtcattggagagatttatgcaatgagagacttgattggcttttcacctaggttactgaggctgatgcattgagaatagactaagggaagagcagagagggggaagaaacagagagactaattagattattatagtcctctagacaagagacaacgtgacttgaaacaggatggtagcattggatgtggtgacaggtggtcagattatggatatattttgaagatggaatcaacaggattagctgatggattggtggtgtgctgtgagagaaaggaatcgaggatgatacaacaaggtttttgctctaggggcgggcacctggaaagatggagttactgcaatgaggaagttactgcratgaggaagatctggaaaagaacagatttggttgttgtgagcaagggtgatcaagtttggttttggaaactgttaagtctgagatgtctgctagatggtctatatcttacaagrtggtctgagatcaccagaacaaagcacaaggctactccgaattctggccagtaaagtaggaagaaaactgaatgaactggaaaccaatttttaaaaagtgtttaaattctcatgagtgtggtgaccaactgaagaacatgttttagggtggaggaagtgacccacccagcctaatacctcagaaaggtaaggtcagatagaytgagaattggtcattggagttagcaacacggaggttattggtgaacttgacaagtacagtttctgtggagtttgagaacagtcaggactttgaaagcacaaatatggataagtcttgaagatctcttggtatatagggggacagaaaaatgaggaaattattgtcaagttatttgatcatcgaagtaaactgaccaagaccagaaaagttagttattgagacttatttttttcagttttttgcatctgctgctaaatttgaatgtggttgtactgttcagaatgcatggcattattatggaaacctaacaggttttttgttttttgcctttccctgctttttaaattgcatgctcttgattcaatatcttttaagatactccttttacaaatacagcctacccatgtgtgtgtttttataatatatgtcttataatagttaccatttctgaattgtggcatgcttaatattaagtaaactaaaataaagcttgtagaattgcttttaacaatattttgaaaaaataatagcaagcatagtaaaattaaagtatccatcaatagcagcaaagcaacaaattttacaaatgtgtttatggaattatatatatatgtaaaatagtttcaatccgtagaaattttgagttgttctcttttggttatagattatttgaaactgagtgattgtacacttttgacctgttcragaactctgaattttatataccttgcaagagtctttcagccattgaatacaaattacacagaatttattactgagaatttgtagacttaagactacattgaaaacaaatgttacgtttttaaatgtgaggaaacttctgcttaattggattgtttttattcccacaggccttgtctggttttagacagattcatgttatagatatggacactatagatgtttccaatctaaataggcagtttttatttaggtaagttttaatatcttagcggttttctttttttaagctctgataatcatttgaacttgtacattgcagtttaataatttttaaaaatgacttgagaggataatactaattttattttaaaaaacaaaaactaccattcccattgtaggtaaagttttgtaagaaaattttgggcatcttggtgatagtagttatgtaaacaaatacatgtttttgttttttcgaagaagtctccttccaaaggtttatgtgatttttgggaatatcctcaggttaactgtgctctgaagaaaggaaagaacggtagctcttcctccagttgatgtcagaagagaatactcgctggagtattaggccctagtgagagattggcagggatttgtgagccaaggtttgaatggtgactggagcaataaagttgggaaagagtttgagcttttcctacaaggggaaagaaaatggaaagtcgaggagagaaaaaccagaaccaattggaatggaacaaagagggatggttaccttaggcatatatggaatatagagaacatcaaggagtgatttgttaaagatgagtttaagaagagaagtagaggccaggcatggtggcttacrcctgtaatcccaacactgggaggctgaggtgagaagattgcttgagcccaggagatccagaccagcctgggcaacaaagggagatttcgtctctacaaaaaaattaaaaaattagccgggtgtgcacctgtggtccctgctgcatgggaagctgaggtaggaggatcgtttgagctcaggatctsgaggctgcagtgaactgtgttcatgccactgtactccagcctgggcaacagagcgagaccctgtctcaaaaacaaaaacaaaacaacccaaaaaacaaaaactgaagtagaccatgtatccagacatgaagaaatgttcattcatgaatttagtatgtaatattgaggggtttgagtagtttaggtaaaagtgtatatttgttagtcaaagatacacagagataaggactttttttttctctctctatttaggaagtttgcatctgttactgacagtgctcaaattgttctgggtatataggataaagttgagctagcaaaaaaggtaacattaagtttttggataggcataaaacctctacattatctttgtggaagatcttaatgggactgaagtatggattaaaataagttaatgaagtgttgtaattgcagtgtgacccttaatgtttaacttttaagctttattttttgtttattttttaacctttgaaatttcccttctctatagcaaagtttgtgggctctgtccagcttgtcaaattttgagttgtgaattctctgaaaaagataccactgaattgatttgttattgatacaggccataccctttaatttgtggctaaaatggttgaagatggtaataacgatatgtagcaagtacttctaaactatccatattattccatttaatctcagcaacctcagggtaggttcttgtgttcaaggttaaataatttgggcagagtgtcctgcaaggatgatgtgtgtgaaaggccattttattgaggtggagcaatctgattgtttcatcctggaatggtaaattaacaaacagttcccagaaaccatctaggagttcttttgtttgggccgtgccataaaagcacatagaatatattacttaaaataatcttagaagtctactttatcccttttacaaaccaaaagagctttctgtgtgtggagccattgaatgcaatactgaaattaagttctttgatttataacagggccttttttatgtaagttagtacaaagtgaagataaaacatttaccaaaagttttgaatcaaaaaagaacagtgctttattggagagaaaaaaaattggcctggcatggtggctcatgcctgtaatcacagcacattgggaggctaaggtgggcggatcacttgaggtcagaagttcgagaccagcccggccaacacggtgaaaccctgtgtctactaaaaatacaaaaattagccaggcgtagtgactcatgcccgtagtcccagcactctggaggctgagacaggagaattgtttgaatctgggaggcagaggttatagtgagccgagattgtgccactgcactccagcgtgggtgacagagcgagactctgtctcaaacaaacaaaaaaaaagaaaagaaaaattgacatgctaaagtgtttttctttgaaatttcagatttttttctaataagcacacgatttattattttcatttattttaaaagtatttactgtgtgctaggtaggaaggaatatgaagagagtaagaacatggtcactttcatccaaataatagtctagtgggtatgatagacgtgtatgtagcaaatatgttacgaaaaaagtaataatgttcttattatatacatggagtgatttctctgaggagaatatggaaatattaggaaagaaaataccatttgtatagaacttagaggaggaaattcatatcctttcctatctatatgtgtggttattgttttaagagtgaccttttgaggccttatatattcagcttctgtgatgtaatagtaacatttgcaattttagctgacacttttggtattattctttctttaaaaacttggtgccgggcatggtggctcatgcctgtaatcccagcattttgggaggctgaggcgggcagatcacctgaggtcaggagttcgagaccagcctgaccaacatggcaaaactaaaaatacaaaaactagctggttgtggtggcaggcacctgtaatctcacctmcctagagactgaggcatgagaattgcttgaacctgggaggcggaggttgcagtgagccgagatcgcaccactgcactccagcctgggtgacagagtgagtgagactccgtctcaaaaagaaaaaagaaaaaaacgtggttacagcctcttttttttttttttttccattttatatacggtccagtgaaattttttttttctttttttttctttttcatgcagcttcttaggggacacaaaatttgctgcttaatcagcacacacaggaagaaggggttaaatgaaggttcttgcatcccaaggatgaatcttattgtgtatatttcagccaagacctgtggagtaacaccataaggttctgagctctaagagtgggataattttttacagtggaaagtggccaggaatcatagcattattatgctttatctgggaggaagaacactgttcagattttctcttaattaaagcaatacttaattagacttatgttaatttggaccattagcaagggttgacatttaaggttaaatgaccgtttaccaaaagttattactgaaatcaaaatacttaggcaaaaatattccttctaaatttcctataagtaaacttactgtgaatttacttttatgtttgaaaataagttatgtagatcatatagatttataatatgaattataatttaaatatttttcctgtaggcctaaagatattggaagacctaaggctgaagttgctgcagaatttctaaatgacagagttcctaattgcaatgtagttccgtatccttttgacaaaaagaaaattacttaatttttaaaagcttttttcctttattataagagatatttaacagagaatacagataagcaagagggaaaaaaagtcagcagtagtaactttattactgagataactgctggtaacattttgctatctattcttccagtcttttctgtatggttatataaatattttttgggccctgatttttaacttaagtttataaagcctgtttcatcatctactttattttgcattattgcccttaatttcagtatcaattacatatctcctttactagagtgtaaattcctaggctggatccaattaatctttgtttctttatagtagcagacagagtagacagtcaatatagtattagccaaatggaaggtacatcacagtaaatttatttttacaagaaatatgtttttaaaaaggagtatttacactgtagtttgaatttagatctggagaacttttggcattttatagaaagtcagaagatgtgatttctatgtagaaagtcccacagaatacaaaatcaacataccggtgaacttgtgaaagttaatgtaaaatacaatgccatttacaactgcttagaaagaaaaataaatacttagatgtaaactacaagataagtaagagatttatatagtgaaaaactacaaaatgctgatgaaagaaaccaaagaaaatctaaataaatggagagatagtccatcttcaaagattggaagattaaatatagtaaagatgtcatttctccctaaatttgtatacatatataccatagtttctattaaaatcccagcaaaattgtcgatatagacgatcttctaaaattttatatagaaaagcaaaggaatacctactacaaatctgaaaaagaaagtgggaggaatcactatccaaattctagacttatatagctatagtaatccagactcagtggcgttaccagagggatatatagatgactagaacagaatagggaagccagaaatagccccatataagtatggccaatttgtttttgataaaggtgcaaaacagttccaatggaagaagcatagtcttcaacaaatcgtactggagcaatttcatatccatagttaaaagatgaattttgacctaaacatacaaaattaactcaaaatggattataggtgtaaatataaaatataaaatgagccaggcgtggtggctcatgcctgtaatcccagcactttgggaggccgaggtgggtggatcacttgaggtcaggagttcgagaccagcctggccaacatggtgaaaccccgtctctactaagaatacaaaaattagccgggcacagtggctcccagctactcaggaggctgaggtgggagaatcgcttgaccctaggaggctgaggttgcagtgagctgaaattgcgctactgcaccccagcctgggygacagagcaaggctccatctcaaaaaaacaaaaaaaaacacaaaaaaccataaaacgatagaactttagggtttggtggagagtgcttaggccacgtcaaaagcaagacctgtaaaaggtggggtatggtggtgcagatcactgaggaagcagtgagcttttatcataccactacasagtcctggctgcttgggaggctaaggtgggaggattgcttgagactaggagtttgaagctatagtaggctgtggtcatactgtgaatagccactgcattccagcctgggcaatgtagtgagacatcatctctaaaaaattaaaataattttttgtaaaagcatgagccataaaaggaaaaaattgatacactgaacttcatcaaaaktaaaaacttgctgtgtgaaagaccctcttaaacggatgaagaaaagccacagactggagaaaatacttgtaaagcatctgatggaggactcatatctagagtatataatgaactctaaaaactcaacagtaaaacaaaaaaaaattcaattagaaaatagacaaaagataggaagagatattttactaaaaaggatgacgaaaagcacatgaaaagatgtttcacatcaaactaagaccaccatgagcgatactgttacacaactattagactaaaaaaaaaaagccagtctcaaaaggtcatatactgcatgattctgtttatataatactcttgaaattacagaattatagagatggctgggtgtggtggttcaggcctgtaattccagcactttgggaggctgaggcgggaagatcacttgagcctggttgtttgagaacagcctaggcaacaaatgagaccctatttctgtaaaaactagaaaaattacccgggcatggtggcacatgcctgtagtcccagctatgtgggaggctgaggcaggaagatcagttaagcccaggatgtggaggctgcagagagatctttattgtggtcgaatagttatgtgtgttgcctggggtggtggttacacaaatctatgtgtgtttaaatgacagaattataaacacacattgtaccaatgttctgttcatggttttggtactgtactatagtaagatgtaactgggaaaggtgcatggtacctacctatactatctgtgcaacttactgcgaatctatattatttcaaaataaagagcttaaaaatgcaaatacaggcccctgtagggaaaaaggaagagttggtgggggtgggttggttagtggggggcaytcagtttgtctatccccattatgtgggtctgggaaactttgggtattttctagaaatccagattagatttcttagtctggctcttggttccctgattgccattcctccactgtttgctttgtttcttttttgacctctttctagctgtagcttcrttctcctgcttgcctagcattcaaagggaatagaggtctgaatgactgagggctagaattgaaattattgttcatagctttatttgtaggcaagaattaaaaatctagaggaagcatgtattgtcccttttttctatgtattgtcccttttttctctgtattgcttttaaaaaatttatagtggactatttatcttaactttagagaagytgcataatttataaattattaaacaattgctccattcattagaaaaattaaaacaagtttttgcacacatgtgctattaaaacattaagtgctatattgactcacccacaatcagttttgaatggagtttcctttttagcctccagggatgggaagactggtaataggatttggtagggtaacttgaaaactgagttaaatgagaaaggtagaaaaaattcgtactttttctcctccccacaaaaaataaaaacagtaaaatctttaccaactgaaaaagctgttgaaattttctgtatgttaaaaaaatgagctttgcagtaactcttaaaatcacctagcaaaataggaactataatgtgcatctttccttcactaaaacatttattgcatctcttcttgatgctgatgattgaggacacacattctgctttcctggggcttatggttttatataaaaaccaaagcaaagtagaaagtatacctcctaccaagggcataaatataatgatataggggttcaggaatgagaaaaagtaagtagttaggggaggaatggcagaaaagttttgtcagaaaggagagttgtgttcatttagtcagattccttgaattccactgatgtgaacattgattacttatttcttgttgtaaatatatgcagagtgtgttccttatggcattgtcaaattcattttagaaattaaaacttagctgcttaagttcctttacttgtattcagacatttcaacaagattcaagattttaacgacacyttctatcgacgtaagttttttacttgaaattaatgctcactagwttcttagaattttttagttggtagctattyaratattgctagctatttcaaggctatttcttcacttgctttcctctctcactgttggcttttcrgtaatgttgctgatagactgaaaagagaatgctagttttagctgacatgaccagctacaagtttctatgcttacctgaatgagagttcactcaaggaattggagctctgagaacgtatgtgggattacagtaaaaagtgcttgtggtttttttgttggtttcttagaacgtgcaaattgttttctgcaagtgctttttttttttaattagtaaactttattttttagggcagttttatgttcacaacaaaattgaacagaaaatttttgaaaacttgggttctcatagagcttcctgttcccacaaacacactaccttcctaatcaacatcttgcaccagagtggtacatttgttgcagttgatgaatctacattgaaagatcatcatgcaactacatatttaaaaactaaagttgcttttttttttttttgtagaatttcatattattgtatgtggactggactctatcatcgccagaagatggataaatggcatgctggtaaagactttagtattgttatagttctctgaagttcttgctgctgtgcttcacatccccaaaattagaattgatatatttttgaaaaatcagagtttaatttttaattaagtatatttacttcattgtttattgccagtcattggttttcaggtgaagacacaaattgttattataatcccttgatttgatacattggtattcartagcacaaccgactcataggattacttgaaagcatacttcttcttttgaattcttatccccttctcctttaaagcccttcaaattgtyttcctagatatctcttctaaattatgaagatggtgtcttagatccaagctccattgtccctttgatagatggggggacagaaggttttaaaggaaatgcccgggtgattctgcctggaatgactgcttgtatcgaatgcacgctggaactttatccaccacaggtaatcaaaaaagcacctgcatttcttttatagtatcttggcatggaattagggattaattattaagtctagttaatatttagrattgttaattagaagtggccgtattttaaaaattacactaagaagaaagataaaatatgaaattctgctctatttgaggaaagatatgaaccgagtacattgttttgatactattctgctttcataatttatttgtattttttatttggggagtaggtatcaagtagaattacaaagttgtatattgatgtcaagctgtaatctatgtggttttcacctgtatttatttcagggaaataaagataccagggataagaatgatctttccaaggatggggctttttggtttacatatccactttaaagaacacttgaaattttgaataataaatgtaaacaattttatgagtattcacttgggattcacttaactctgaacttgcttttgttttggtttgctttatacttaaatattaggtaaaaataacaaggtgttcatatttgagaaaatctgttcagtatttttcttctcatagtctaacaaagcttaaattttataccttgtaaatgtagggcaaacctgtctttacaggcagtgcagcctaagtgaagtgactcagwtaatctgtattatagtttgagaggcatttttaatggtatacaatattttgagttgaaacaaattgtatgaaattgttaagaactagatcataactggaagttgcattttaaaataattcgtttaaaattcactgaaaaggacaaactgtggttttaggttaattttcccatgtgcaccattgcatctatgcccaggctaccagaacactgtattgagtatgtaaggatgttgcagtggcctaaggagcagccttttggaggtaataaacctaatttaataatctagaattacataaaatacatattttttctatattattcctttggataatttcattaaaaacattgttttgtgattacgtattcctgtcttctctctctctctctctccctttttttttttaaacagaaggggttccattagatggagatgatcctgaacatatacaatggattttccaaaaatccctagagagagcatcacaatataatattaggggtgttacgtataggctcactcaaggtaagtcagcaaattgtcatgaattatgatgttgggatgacttagggctgggatgctttcaggagaataatcgataagtgagtttagacagtaccatccacttgaagttcagtaaaggtaccatgtaattcatactacttattagctagggggaatttaataaaattattgaatcttacttacttaggctataagtcatccaagtcaaactgtccattttatcttccactgaattcatcatctcttagagacagtctatttcacatttggacaggactgttagacaaatattctatatattgaacagaaattgtcttcaggtcagctgcggtggcttatacctgcaatcctagcacttcgggaggccgaggcaggcggatcacctgaggtcaggagttcgagagcagtctgaccaacatggcaacaccctgtctctactaaaaatacaaaattagctgggtgtggtggcacatgcctgtaatcccagctactcaggaagctgaggcaggagaatcacttgaacccaggaggctgaggttgcagtgagcctgagattgcgccactgctttccagcctgggcaacaagagcaaaacttcgtctcaaaatagaaatcgtcttcagtttggtctgactgttgtcccagtactgtatacagtctaattcccttttaagtaatagcttttaacatattgaggacagtgatcacatcctttgcaaatttttatcagtgccataaacctccctagttagttcctttaaccctgtattagttcattttgctttgctataaaggaatatctgaaactgggtaatttattcaggaaagaggtttatttggctcatggttctgcaggctgtgtgagcatggcaaaagcatctgcttggcttctggtgagacctcaggaagcttttactcgtgaaagctaagggggatggcaaggcatgtcatatgacgagagggagcaagagagagaggagggaataccaggcttcttttaataaccagctcttgcgtgaacttaatatcacagggagggcaccaagccatgcatgtgggatctgccctaacggtccaaacacctcccactaggcctcacctccaacactggggatcacatttcagtatgagatttggaggggacagatatccaaactatatccaaccctttgatatgttgtacagcttcaggttctcatgttgtttttctgtaaccatattccagctatccatattggttaactggaatatagttagagaaaacaacttttcctaattgttcaggccaacatgcagcattatgggactggtcttaactttagataatagacttctgataactgatgcagtcttaaaggagagcaggtatttatgttgttgtttttttgtttacattgatgctatactttggattctttgatgttactagccactgaaagctggatgttttgtccacatatgcaattgctaagccacatctgcctattataaacttggcagtttggggagtgtctttttttttttgtttttcttaatatccaagtataggtccttacaaatgtattcttaaaattcaacctgtttttctctctttatatgtattctgccaacttacctggtgtttctagcttcatttcacctgttttgataattatatcctttatttctttttcaaataattgatgaaaatttttaataagactgaactctctgagaacagacatctgaatcatacttctggccaggcccttttaggtttatctcattctgttcatcagaccttcttggtactttgtatttctttatcttgttcacaaggatgtcatgaaaaacctttccagatcctctactgaagcctaggtatgctatcttttgcattttcctgagttgctaagttagtcatagtagccaaatgaggctactccaacatgatttgtctagtaaccagtcatgctcaatcatagtgatcaatgtttccaatctagttatagtttccttttttagaattttgcccaagatcattaccaggttcaccagaatgagctttgtcttctttttgaaaatctgccatttctctcctgtgattatttccttacatttactgatctagtaatgtcattttaaaattccatttatacttactccttgttgccctctgcattctccctacacggacctgctttgtgttccttgaacacaccaagttcttctgtaccttagagctttaatactcccgagttcctacgccggggatggtgtttccttggatcccctcaggctggctcctcatctcttaggtgtctgcttaaccagttttcctaatcattcaacctaaaatgacttctgagccattcaccattctattttttttggtaattgctcagaactgattaatggtagcctcattctcctatgcaaagaatatttcacacttaaactatcttacatccttgccccaggaccaggaccattgccattgctgtttacaaacagctttttcttcaggtaattgcatggctggatctctctcatggcttaggtttcagctcaagttatcacctctccaaggaggccttccctgaccattctctctaatggactgcatccatcattctcagtctaacacatacctcattttcttcatagaacwcttcaatatctgaggtgttccaagtatttacttttgtgttatctcccctatcaaaatgaaatcactatacgagcagatactttttttcattgttactatgcacaacacctagaacagtgtctggagcatgtgttacacatatttgctaattgttagaattaacaaacgaattcagtgtgttctaaccagaaactgtaaactccccattttaatatgtagtctcatccatccttctttaccttttaccagggcttggtgtgtactttctaggctggtgaatgagggcctcaacaaggagtacagaaggagaattggaagtgaagttgcacaagccagtggttctatctattctatgatttttccccttgttctcagtataacagaaagttgcctttctgcccactctagctttttttggtcgaagggcaggggtatgggtggcaggggttggagaaagaggggagtcctcatcattttggcaatgttcttactgggcagtgtctcttacacgcttcactgtttgtgtctaccacttcctcctttcagtacatcctgctacatgtggttcagtggagagcttccagtttaaccatcatgcagtttatctctttttaaatttcctcttctccaaaactatagagaatcatatggtcacagtcaactttttaaaaaagctttccagccttcgtaactgtctttctttcatgtcttcttagctacttgctgtttttccttaagtttttgaaacctgactatacttggagtcttgggaacacatcttacagtgtttcctcacactgtgagataaaatggctactttttcttgaagtttttgtcttctaaaatgaacaattcaaatatagttataaaatggagtatttattttgtacttttaaaaaatggtttaaggtgaggctttgtttattcctaatatgtgaataatactgatgtgaaaaatgtgagtcccagcactttgggaggccagggcgggcggatcacgaggtcaggagatcgagaccatcgtggctaacacggtgaaaccccatctctactaaaaatacaaaaaattagccaggcgtggtggcgggcccctgtagtcccagctacttgggaggctgaggcaggagaatggcgtgaacccagaaggcggagcttgcagtgagccgagatcagatcacgacactgcactccagcctgggcgacagagcgagactctgtctcaaaaaaaaaaaaaaaaaaaaagaaaaatgtggggttgaagtagagaactgtatttaatattttgtgtagcctcggttgtagagtaaaagataataaagggcagcttttcttttttttgaatgtttgtgaatcaagtgactgaagctgttacaggaataattagataacacttattcttcatggtgtatcagttaatatctgtgttcatatgccaaccccacctcttgctaagtatatagctgtggataaattactaaatttctctcagtctcacttttcttatgtttaaaatcagagtaattaacatgaagatgttgtgaaaattaaataatatttagtctttacattgtgcctggaacataatactctaaattgttaactattatgatgttattgtttcacctttctatagcacttacttgagagagttttctttgctactgtagcttaagattctgaatttactacaaagtgatggggatgtgaaagattgtttcatggttaaatttattttctggcttgaaagtctgaaaaatcaagttttagaaaatggtatttaataatcatgccttctaatttaagagaactcttttattttaaagaaatgaccatattttaattgatatgttttttcaggggtagtaaaaagaatcattcctgcagtagcttccacaaatgcagtcattgcaggtgaggaagaaaaggccatcacttagtttattttgctttctttagtttttgacgttgctgcagcttttttgtgttgtaggaatttgatatcttcttggatgsrttgtgtaactaagctgtcgaaaaagaaccagttattagactttgcatattttttgtcttacattatgtcttaagttacctgcagtaaagagaygttttagttccatatgaagcaggycatttattaatctgataaacaagaaaaacatgtagtgttactctattacatgaatcacacaaaacaatgtaaaatttgttactgtctcagtttttaaaaattggaatatgtattttttaatgaagagccaatgtaaatttatctgttctgatttataactgacttttaacatgcctaatttccattgagttaaagcacctgtattttctcctcccttcagctgtgtgtgccactgaggtttttaaaatagccacaaggtaataggtttcatttttaatatgcatgtaaatttatgttttgacttggtttaattatataaagatgaacattttttcattacagtgcatacattcccttgaataattacttggtgtttaatgatgtagatgggctgtatacatacacatttgaagcagaaagaaaggttagtagtattaagaacacatttttgatcatgcatattttgatttttaaatattattggttagaaatttgaacaaagtcacccatacattttctaacttccagaactctacttattatatatcttttgctttatagcctgaaataactctatagcraagtaatttacaagaaatggtctattatgaaaagcaggctttaaagcataaaaatttttttataggaaatatgcatgattataaaacaacctgatttttattttattgttcataaaagagactaatattggtgcatgtgctgctgtaatttgttgtgtattatgtgtgtaggaaaactgcccagcttgtagccagcttcctcaaaatattcagttttctccatcagctaaactacaggaggttttggattatctaaccaatagtgcttctctgtaagtattgtagattttygttatgttgtaaaaatcatttttgtgatttttgwaaccttaaaaaaattatcttttgataaaaattatgtttgatacttctctctcatcataatctttaggcaaatgaaatctccagccatcacagccaccctagagggaaaaaatagaacactttacttacaggttatcaatgtgtattttaaatttttttcagaaaattrtatcaagttttattttactttaatgtgtcttacattaaagtaattttgttttctagtcggtaacctctattgaagaacgaacaaggccaaatctctccaaaacattgaaaggtattttacataagggtatttactaatcattttctttcttttctctctttttggtgaaagtaatcagtgcttgttctagatttcctcttaatgccttgtatatggtcaggtaataattacttacaactttagacatattaatagaattaattgctcttttagtagaatattttaaaatctctaagaaatcaaatattactttgattaaagaggattggattttgatgtttttctagaccgtaatactctrtagtttgtttacatgtgtattatcctttctgttgagttttttttgcttgtattaatwatattttttctgttttagaattggggcttgttgatggacaagaactggcggttgctgatgtcaccaccccacagactgtactattcaaacttcattttacttcttaaggaaaatctccacataatagaaaactcatggaaataatatactttgtggatgctaagaagttgaatcgatgtcatttttagcaatagtgttgccacgatttgtctttttttatataatgaaccactcttttttaactttgtaaccttcccttgaagacagaattttggtgttggtgcttgtaagcattttcattaataatatgagaaatgatacctggagagagagattatgagcaaatgtattgcttcttttagaggaggaagcatacaacctcttttgtgtgaattttgttattatggtcaaagaatgcattcctaagttttcatttgagtacccaaatacacaaaaggtgtccctttaaggaaaataaagaattaagttttaaataacattacattttacaatctgacatctggagtatattgaacataggctatttcttgatataacactcatttaattgtggccatccaaatgaatattattgcagaatttatcttgttcataatgatttgtaaatggtgttatagctgaatacctgtgcatgaaaatgggcaatattttcatctgtttacttgtagtgccatagaggccaatatgcacaatattaactaatgccaagacatggctgtttaaaaaatttaatgttcaaacagttatcactgatgcttttgcactatttattaataaaatcatatattgtgtacttctttcactgaagtttttaaaagtacattaagggtaatcagtagttccatggtaatataggaataatttttaaatgtgtagcagagttatatcaaatttttattgcacttaatacttttgctacagcaatttctatagtaaaaatttactggtttaatttaactttctgtatcaatataattttttttttttttttttttgcgacagagtttcgctcttgttgcccaggctggagtgcgatgatgcaacctcagctcactgcaacctctgcctccccggttcaggcaattctcctgcctcagcctccggagtaactgggattacaggcgcctgccaccatgcacggctaattttttgtatttttagtagggacggggtttcaccacgttggccaggctggtctcaaactcctgacctcaggtgatccacccccccccgcccccctcggcttcccaaagtgctgggattacaggcatgagccaccatgcctgaccatgtttttgtttcttttaagtgaataaaacttcaaacaaaattaagtacaaatactaaaaaagtaggtgctagtattttaatatgagaacatgtatgtgttctcattctttgtttttgacttagatatggcagttttctgttcaaatgttttttggttacttatgtgtcactgagttaagttttcagtaatctttctagctacatattgacaaataagttttattataaaaccatacggaataaatttataagctctacctgaaaagttacaggtgtagcttacaattttgaaagtgaaggaactaaaatttagcaccatataggtgctataataattctcaaagtagcattgtaagaaggtgactctatctgagagctgaataaatagttttagatggtttaggtaggtcatttcaccaaagctgtacaattagaagtcttggaactgtaactgtacagctaatttcaacccgaatctgccccaaatctcctctgcagactacttagctgtttgaaagtacttgagttacttggtactacttgtgtacatgactaaattgttagttttaacatgcaagtttttactgtagttagataaaattattggaagatgattataacttcttaaggggttcaatctgattttttaaaagaaaaataattcttttttgcagagttccttgcagtggggtaaaatattcaaatatgggaggcaggcatataaggtaaataatcacagcagggagggtgtaataggatgagtgataggggtctgtggcaaactggagtgagtgaaaattatttggtgaccactctggctgactattcccatgcttggtattcatatttttcaaaagcagctggaaatctagatttttgaatgaaatctggcttttagttaggattttgtctttaacttgggcccaaaccaaatatagctgcagactggattaggaaggccaccaatttaaggtattttcccatgtccaaatgttcgaagagaatgcacacagaaaaggttatgttttaagtaatatgcacagtgcacattgttaggataacagctttagtgcttcctaggtgtcttagtccatttggactgctgtaacaaattgccataaactgggtggcttataagcagtagcaatttgtttcttaacagttctagaggctgagaagtccaagataaggagccggcagatttggtgtctggtgagggctgctattctggcttagagttggtgccttcttgccgtgagctcccttgggcctctcttataagggcactaaccccatttatgagggctccatcatcatctaatcatctcctaaaggctccccttaatactgtcccattggagattaggtttcaacataggaatttgtgcaggggacaccgacagaccacagtattaggggtattttgactgcagcaatgagtttactactattttgagagagaggttgtgctttatgcaccatgtgttccacgagttggacacagtgttcatacgtgatcctgtcttttaggcaagcccaaacaagtgtttctccttacaataccaagttaatacagagcttattaaatatttgagacaaagggctaagagaagtgtgaggcccaatttccctttgcaattattgctggcaaggtgcaagcttttagcacgtgaactattttcctggaaagcacacacacgaaaacttgaatattccttccggggaaatcgacctctatcggtagccatagcttccccttcgctaagaactgctgtaagcacgaaatcgacatcaatagaaacccttccgcgttcctcggtaactaacggcaaccctgcgctcccggatgtgacgtcaacgttcttctgttcttccgtctgtcgaccgaactctgggctcgtagatttggttgctgtgtacgtggaagaagcaagcgcatgcgcacatgggcccccttcgtctcagctgtgcgggaacggccgagggtaacatcccgggctcgcgggaggctgtcggggtaatggccacacgctgacagaaccagccgagtggaaaaggggagcgaagccgttcctctgcacccttccccaggcctgaggccttcccgcttggtgctgccgccgccactgccggctgaggaggggcgatgagttggttcaacgcctcccagctctccagcttcgctaagcaggccctgtcccaggcccagaagtctattgacagggttctggacatccaggaagaggagccgagcatctgggccgagaccattccgtatggagagccgggtaagagagagaggagcggggttcctggctcccggaggctgctgttctcttgatgcaggcaggttaagtggtgtagagaggggtccttccttgctgagagagttttcaggaagtaatttctccccggcccgttccctaatgctgcttcagcctccaagtcggtctttgctgttttcctgagggaaaacccagatccaggttcccccttgtctttctttggtcctgggtgcgaggcttgtggacttggatgacaggggacttggttggttggtcttgccctcaagctctccctcgacgcagcttccaagcacaaccttcccgaacctgaacctcgaattgcttcgcgtctcgggcactgttgggatccaaggtctgaagtacgtaaatcatcagggaagggaagaacaatcgctaacagtcagtgaacatttcgcgcttggtagcgcgtaatgtggttttatgttgttgttgagacggagtctcactccgtcgcccaggctggagtgcagtggcgcgatctcggctcactgcaacctccgcctcccaggttctagcgattctccttccccagcctccctagtagctgggattacaggcgcccaccaccacgcccggcaactttttgtatttttagtagggacggggtttcactatgttggccaggctggtggaactcctgacttaaggcgatccacccacctcggcctcctaaagtgctgggattacaggcacgagcctgtaatgtgcttttttatggccttctcatcttcagaacaactcccagagagagcttggtttatatccgtgttttacataagaggaaaatgaggcccagaatggccaagtaacttgctctaggtcacacggcggaggaggattagaatgtgccggaggtattagccggaaaatgtgtgacccaagatttctggatggtatcacattttatttctgaatagccaagtctctctttgcagtttcattgagcttaatctttcagggatcttcattcagttgcttttgactcttaagtctaaggaacagttcagcatttgatgtgtggggtaaagatttgctggtgttgggggatgtgaacctttgtgtgaaaaaggataagagatgtacttgactactcctttctggtttctgttcttaattttacatcattgaaaagtcaggacctaaatttgaggtacctcagtttaagatattttggtccatgtgtgtatgtgatgatcctctttactttttacaagatgtcatataaccttgctggagtaactctgttttttcatatgtgccccagttaattagaattactaaactttagataagatagaatataggttttatatataaggatatttgttttcggaaaatgcccatagtcttcagaatggtataatttagatggataccaaataaccctgggattatataaagtattctccaagaggcaaaattaattcctgtcatcttttgaatgtatttaaattaatcagacataatcttggttgttcatttgcatatttaattttgattttctctggtttggatattgtgcaaatgaatgtgtagaactatgcctccaaactgaagttttctacatacttttcatcctaactgcctttgaagtcatacatatatttacatatatatatatttgtttttttgttttttttttttttgagacacagtctcactctgtcatccaggctggagtgcagtggtgccatctctgttcactgcagattctgtctcctgagctcaagtgattctcgtgcctcaacctcccgagtagctgggattgcaggtttgcgtcaccacacctgcctaatttttgtaattttagtagagacagggttttaccatgttggccaggctggtcttgaactcctgacctcaggtggtccgcccgcctcggcctcccaaagtgctgagattacaagcgtgagccactgcgcctggcctgaagtcatattaaaggatagattctactataaggcttgatagtttttagaagcttttagttacttgtgctctctccaccaacttctaattgtgaatattttgtgaatattttgttcagccacattttaatttgaaaaagaaaacatttttaaagaaatgctttaaatactttaacgaatataccatttttaagatcctgattatgccatttttaaaaatcaggattttagtagtagctatttgtatgactgatatgataattaactttttccccaagaaaacagtcattttctttgtagcgcttttttaaaaaccctagtgtcaaccacctctatgtcaaagagcaatagttcttaaaaaaacacacatttctgaaatttataatgaccttgtaatttctgacataatttagaatttgagaacaaaacttcctcttagagtgggcttggagagtgggatttagagaatcagcctgtgattaagtggatgaaaatgaatttgttctctagaacttaccattcccatcagtttaatatgatcttcgggaaagaacatttgtcaccattatcttggtttgaggcttttgttgttttgtttgttttcgagacaggttctcgatctgtcacccaggctgaagtgcagtggtttgatcatggctcactgcagcttccacctcctgggctcagatgatcttcccacctcagcctcctgagtagctgggaccacatatgtgggccaccaggcccagctaattaaaaaaatttttttgtagggacaggggtctcactatgttgcccaggcttgtcttgaactcctggactcaaatgactcttctagtgttgggattataggtgtgaacctccatacccactgagttcagtttttgagtgttgccctttgtctagctcataactatattactgatattacaagtaaaaattaatatgaaactgactgaataggtagggtcatttttctgtgactgcacatggcccaacctattcagttagttccatattagtttatttcatattgataagtaaagcgtgttattatgagatgaatcataggtatcttggacttactgtgggttataaaacatatactgttacttccttaatttgttgtggggaggaataacatactcgcatctggtagtccaggccaggcccagtcttttgtctgtgctcctccttcctctcaggtggacccacaccagttttcttccgtaagtccctgtattaac

SEQ ID NO: 93684 - DNA, 232234 bp, Homo sapiens
  misc_feature (1)...(232234): n = A,T,C or G
cagtccaaggctcctaatggaaaccatgcaaaatgtaaggcacagaacatgctggttgtttgatctccttccatggctttccgtagtactctagggccacaccattcatgcatctattcaagaacagtaactgagggctgatgttctacgacacattagtttaagctgcggtggaatcatgatgagtgaaaatagccttggttctgtcctcacggagtttacagtttaatctatgaaagcactcttcattctaatttgtgttgtttatttatttattagttctcccttcagaccagaagctctcaaacttttttggccgccacatccaagtaagaaagagattttatattgcaatttatattcacacaaatgctcaaacacataaccaaagttaaagtttcacagtacaatgcttatcttcatgttgtgtgatacactctgatattttctagtctattccagttccttttttttttcaaaatgctagtcatgatccaccaaattgatttcacaatccactaataagtcacaatcctaagaataaaaaatacttgactagagggcaatggtaacctcttgtgcctagcaaatagtaagtgagcaatatatttttttaaatgaatgaaaattatgaggactaatttgcattaatgtttacattaagaagaaatagatacagattaagtggtttataatatgtataatcagtgtcctaagaacacatttctatatacacattacattctatatacgcaattataatggataatttttttcagataatctataccagctatactaggtacactatatatgctgtcaatgtaatttattatttcagtcacaatcaaggactcacatattttaaattcacataattaaaaatatgttcatcttggaaaaagaagtcataagcagcaatgaactctttcagatattaaaactcattataaattccaatagtaaaagagcctgggattagagaccacagcaacagaataatggcctccaaagatccctaatccatagaacctgtgaatgttagcttgcatggtaaaagggattttgcagatgtggttaagttaaagattttgagatgtggatattatcctggattatatgagtagacacaatgcaatcacaaagatccttataaaagggaggcaagagggagaaaaaaaggcagaaaagatgatgagagagagacttgatgccatgctactaggtttgaagatggtggaaggagccatgagccaaagaatgcaggtggcttccaggagctggaaaaggcatggaaacagattctcccctagagcctgcctcctcaaggaacacagcttggcaacctgttttggacttttgatgtccagaactgtaagataataaatttgtgctcttttaagccactaaagttatggtaattttcttgttttttgggagtttgttttttttttttttttttgagacggagtctcactctgtcacccaggcggagtccagtggtgtgatctcagctcacagcaacctctgcctcccaggtttaagtgaatctcctgtctcagcatcccgagtagctgggactacaggtgtgtgtcaccacgtctggctaattttttgtatttttttagtatagatggaaccccacctatactataactggccaccatgttggccaggctggtctcgaactcctgacctcaagtgatccacccgcctcggcctcctaaagtgctgggattacaggcatgagccaccacgtgtggccaaatttatggtaatttgttacagcagcaacaagaaatgaaaatagagatggagtaaataaatagttcaatggcataaagtaaaaaaaacagtctagatccaacaaaaacttcgagaatttcatatctgatgaaagcaatttggtgtgtgtgtgtgtgtgcgtgtatgtgtgtgggtgtgtgtttattccataaggtggtattaggacaactggatagttatttaaaaaaaaaaaaaaagctacatctctatccccttacaccaaaattatttcccagatagcagcagaagacccattagcaatcctgagatcaggatcatggatttttaagtattttaaaaacacaactaaaagtactagaagaaaatgtgggatttttttaatgtgaaaaatacaaaacccagaatgataaggaagaggtggattatagcagtaataactctcacacagtgaggcaatcagtagtcaatttggcagcatttatcaaagttaaacatggccatacacttcaacccagcaattgcatttccacraatttgtcttaaagaaatgcttcattatgtgtacaaagctttatgatgaaaatgttctttagagcattatttgtaacagcaaagtactagaaacagcctgatgcccattaattagagaaagttaaatatattatggctcagcccttagatgacatgtatctacatgttttgttaaggaatgatttccacacacatttgtaagtgaaatatggtatgatcccttgtgtgtggggaaaagagatgtaggtttagcttatatattcagagaaaattctggaagtgtacacaagaactgtcaatagtgcctatcttttgggagtgggactgacagtaggaagaagtcttagatttttaaaattttacacttttttgtagagttcctgatatcaggattgctaatgggtcttctgctgctattcagcaagaaaggaaaaaaaggaaagaattgctgaaaatgaagagggagagccatgctcacatggtgacaaatctgggccagctgcctcagaggtatatggtataggattttgaatttttttaagtatatttaacacagctctgtgattaaaggaagcccaagtcacagaatcctgaacttattggaaacatgtgtgacacctctttaaaggtttaaattatttaaatttgcttgcttttgcttttaagttatgcatgaagattccaggcaggtaaaaagatgaaattctcccttaactgactagctaaggcagacaggtacctaaccaaggtctcctgttggggaccaggttagataggactcacatttcactgaaagcctgtatacctttgtatgtcccacctcaccagcgtaggcaacaaaatcaagtcagtttaagtcatgtgcttttttgaagttaaaattcataccactctgagctctacctagcgagtagagtccaaccttctgttgaggttcttctccctaggtatccccagtgatcctacggttactcatttcttccaaagaagtcctctccagttactgatagtgggtggctggtgagtcagccacagtgcctagtcaaagtttcttcttcacggctgctgcctggggtcactgccaaggcccatacaggcaagaacaaatgcttgttcccttctggctgtagctacccagggttaagagaggtcctaccattgaccacacagtgcaaaacggccagtcctcgcctgccaacatcctccaagtgtggatacaacctttgctcttactctcccaaagcacagtcaagggcagactgcagacaaggaaaaaaaaacagtcaatagcagtgtctgccaatatccagtaatgtttgaggccacttttgaatgaaaaaaaaaattcttgctaacttccaactgttaagtcattttaattatgtctcttaattatacataaactttaggtaataatttcttattcttatagctcacgtctataaaactaaaacaattttagaaattaaattcacaaatttaaaaaattcaattaatatgatgtatgtaatgtgtggtgaattatatttgttgttttgctgaaattaaattgtcctttgatatgagaatatggaactcactgctatggtatgtacttttttgtttggcatgcttataattgacttaattatctcaacattcttctctatttgaatttctgttaaacttctgtgcagtgtgccgtaaaggacgtatgaccttcacttagccagaatgctgtcctttccacaagaagtattctattcttttcccattagccccagaaaattaaatttgtggttggtgccaaatacaaaatcaagtgcagggtttcgttacaaggtggtcatcaaatgatccaatatagtgactagaatatattaacttttaaaagaacataatttaagtaagagcaaaatatttacatattttatagataatttgcatatattttttcttagactccagtttaaggaacagtagtctacacccctgctactccagggtggtccaaaagccagggagcttgttagaaagagtctctaggccaggtgcagtggctcactcctgtgatcctagcactttgggaggccaaggcaggaagattgcttgaggtcaggagggttcaagatcagcctgggcaacacagtgagagcctgtctctattgaaaaaaaaaaaaaaagaaagaaatgcagaatttcagggcccactctagacctaatggattagaccatgccatttaataagaactccaggtgatcagcatgtatattaaagtgtgagatatactaatttattatttcccaattcaattttcagtgggcccatgtgagcctggggcacagtctaaagctctctctctcttttttttaaggacaataattgcttcttctctttccagggttgcaggcaggtagatttaaggtgaactcagatttttcaaggaataatggtgagtattggtaacttcaaagggtccatcctggtgacttgcaggggaagttccactcaggaacttttgtgtcttgcttaacaccagacacaagactacatgtaagccatgtggctcacatgtgtaatcccagctactccgaaggttaaggtaagatgatctcttgagcccaggagttggagaccagcctgacaacatagcgagaccttgcctctaaacaaaaattacatattgtatgattctatttatatgaaacattcaatttctggtggaagtctcatatgatctttggttggaggatgactggatgttgacagatgacaatgaggtgaagagcattttagcagagggaatggcatgatcaaagacaaaatggagagtcagaggcaggaatgcatatttagggaggaatgaatgagcactggctacaacagagatctgggaagaaaagcaagtgaaggaagtaaagctggaaacatggattgacaagttgcctttttcaaatggaaaaactaacaggtgtgagggagaagagagtcaatagaaatttctgtcttttccagatttgttcacattcccctgatttgtagtcattttgtcggcttgggaaagtggtttttgaaagatcgtctttataaaggtaggctctgataggatgctcaagctaagagcaaggaaggacaaagaaggcgcctggcgacagaaaagggcactaacaaaaattgggcaaaaaggaagtgtggcggtccccaaatcccttcttcctccatttcagctgagatcattcgccagtaggcaactgtggtattaccaataagtttgtatcaccaataaaatattataatgcacctggctaaaaaccctggcgtgataacaccaaattcatgttattagaaggaattaaattttaaaaagcacaccgttccaggcacacagaaggagcccccgaacgtttgttttataaacgcaggttggttgctgaggctttgttttggagcctacgtttaggagaggaaatgattcaaaactgccccccaaaacctatatcctccaggagcactgaggttggggcgacctgctgccaactggtctggttttcccttttaacacacgcttcttgcccactatccggtccctgcggtcagtgggtgcagcaggggtcgcagtccaaacaaccaatcgcgacgcggctgcggggcgggggccacagcgctccgcctcccccctccaatccgccctcccaatcctcctaggccgctctctctcgcacctgcgtgtccctctgcgctccgactggtgcgacttctccctgcgctagcgaggcagggttttggcctcgcctctcgcgagatcgcctcctgttgctgccgccgccgctcctggccactgactggcggcgcctgcgcagccgccatgttcggttgctatgctgcggcctaggagagggggtgtgcttgagggaggaggaagagatagaggaggaggagggggaggaagaggaggtggagaaggaggggggtgactgagctcctcttgcactctcacacacaaacgctgcccaggattacccgccagctcacgccgcgcagtgcgcttttccgctcctcgcgccccaccaccaacattgttctctcaggactcctgggtcccaggggycggaattgggcctgagcgggagaggaaagagacttggctttggccgcggggtcggaggattggggccaggccccctcccccacgcacttttgggggtgtggattatctcatccctgcagggaggtaggagaggtcgccggctgcccgcctccctgccacctccccagcggcgccggcccgcggctgcccagcagcatgaggtggtgctggcggctccgggtcgtggcgcgaccgctgcggcggcggctgctcggggggcgctgaggtagccccccggagcggcacggaggacgcgcttctcctctgcgcgccggggcctcgaggctttttttctccagccgagaggacgcggctgtgatatacgaaggtaagaggttctccggtccccgccggcctctcggccctgcacgttgaacgggaggctcttacctgcatgtgtggctcctgggaggtgagccaggtggggcaagccggaggtacgaggatgatttgaaaggaaggaaaaaaggacaaaaacaaacaaacaaacaaacaaaaaaacgctttctttcctttcttcctgggacctctgcttttgcgggggttatagttggaatctctgttatgggtcagcgaagggccaagggatggaataggtgcggagatggaatgttcccagtacctaaactctaggtaaagctttggaatcttgagttttccattgctggtagaattccttttttttttttttttttttttggctcatatgagcgcttcttgcacgctgcatgagccaactattcctaccattgaagttttaagcctgttatgattctaccagtatatacctgtatttgggaatctgtagttgagccaaaaaaaaaaaaaaaaaaaaagttgagatgtgggtaaacagtgatgcatttcgcagggtttccataaaatggaacagcttacagttgcacaggtgatgtgtggatgtttctgcaaaacttagggtggaagattttatgtctgggcttgcatcatgtagtgacatcagtatgtacaaggacgatttgtaggatttttcaaaacgcctgttctaggataacttgttatgcatctgcaatatgccagctgcttttcgaataagaggtttcagtaatactaagtttctgtgtccagatcttgggcccarttgaaacagtacagctgattggtcacatttaaaacatatttatggagaaagataaaaggccaatgtgtccgacttgcaaaagacaattagagtagaaagaagactggaacagtaaaagccagggcatttttaaatcttggttttctgaactttaacgtgccagaggaaaaaaattttttttcaattttaagggggaaggagatggccttaaaataaaggattgttcagagcctaaactgtgcttaatggaatagagctaggtatatcatctaaatcttgaatttgactaatataaattcagctttcttttaaagaaaaaactcgtaagcagaagtttgtgtattctacagaacctcttcactagctcgtaagtgtgatcattttgtggacatcactgtttttttgttagaataaatttatgctccaattaccacaaaagcaatttttatgtctcttcgcattttttatggtacacatatctttgttacattttgcattgaaacacgcacggtcccatagtatcataatcttcagtgatttataagagaaacagtctattttgtacatggaaatgtttgtcatgttgccagtctgttttaaaaatttggcaagaggtttttaaaatccaaggaggcaccactattttgtagtttttaaaaatattaattgagtaggtccatgtttattaagttagaaaatcacgagttcctcaaaagtagtaatagacgaggatgtgatttttcttactgcccattttctaacatcttagcttcagagctgtaggtattgaattgagtcaaacttgtgtttttttcttatgttctaattaaatatcttttaaaatgtccctagtaacattgttactttaaatttataacacccaatttctaatttaggctaggcataaaaccagcattgattgaacgtacttgctaaaaatactttctgggtcggatgtacttagaatgcagcctcaggaaatttcatttgaactattctgtgaccagtgtacacttcattattgttgaaggacttttaaaaaaagtatagatctctcatactcgatttaatcagtttgagcatagatgcctaactttaaaaaaaaagtataataaagtgggatagtaatacaatttacgtgagatggtaataaaaacttttcagcttttttttttaacttgtatgacttcgttaggttgttattaaactgtgatttgtatttttaaaatagttttgtctgttaaacataattgaggtgtacagtacagtatccattgttatctgtttagtatttatttatgacttacaaactctaaaagcgggatcagtgatcatggtttttagtaagttgtctttaaggagcaaagtaagagactagcagaaaattgcaaggaggtttgttattgagagtacttctgccccccgcttgagagttaatatggccacttttaaacaagaaaagttttccagaaacgtggaaatcttgtttggtgtatgtttaagggcaaatgttttaaagttttgcctaaattcttagttagaatgcaaaattgatcaactccctaggaatggttattgtggctaaatatgaattgttgctcctatgtaaaatttagttattggtagaagtttactaactgagttgaattttgttgttttcctgggttattgcatgttatgaagttttttatgtactataatccagatttgttaaatttgccagtttactagaataagctgtgaagccttgaagtttggcttagcattctgaaaatcctttttattgtttgccaggaaagcactgtaggaaggaggtgttatctcttcatttaatatttaatgagtagtatagatgatgagataggatataatgtagaaataccgtagaatcttctttattgatatgaaagtaccattgtctaggaacagcataatttcttatcttttgcatgaatggggaaaaagaggaggggaaatttattagactctttcatttcattagagatatcttccctcacattcattcttcatttcattattcttaagtagaaactttggaagagagatgcaagtatttgaattaattagtaagaacaaaatgaaaattacatcgtatagactatcatgaggaaaatatcaatttgggttggttattgtgtttgtattttttaacaaggaggttatatagagtagtagaaagaaaaaaggacccagaggggaagagtgttaatatttattgtctgttaagtgtcagatcctgtataaggggcttttcatgttgtcccactcaccaagtatgctttatgaggtaggtattattaatcccctgtcctctccctgccaaatagaagctaagggaaatgaaataacttgtctaggctcatacttctagtaagtggaattctctaaaacttattctttagatcggttctgtccaattaaactttctgcaatgatggaaatattcttttttccttcaactttattgaagtataattgacaaatatcatagaaatattttttgcactgttagttatggtagccattaatcatgtgtggctatggagcacttaaaatgtgacgagtgtgtctgagaaactcaatttaaaattgtatttaatttaaatcaatttaaatttatagccagatgtggctagtagctatagtattggagagcatagctttaggtctgactgcttagaaaatctgagttgtagtatttaatcttccactggtttatgcatggcattgggcaagttgtttagttctgggcttcagtctaatctggtgtgaaaatgaaggggtcgccactaagagattatctccaaggttccttcttgcctgaagttctgtgactgttattaaaacatacagtagcattcaatattcacaagcattatgtctgaaaggatcccctccccaatatgctcacccattacctaaagatttctgtttagtcagtttctctttttgagaagcgtatgtataaagcacacataaaggatagtggattattccccacctccccaactgttcggcaaaaacattgtgtaactcaaggcagtactttatgatggaacaaagtttgaatctttaaaggccatattttaacatgccaccttcccgtttaaaaatatataggagttccccggtgcttatcaaattaatyccaaatttacctgcttgaccttgaagactttctaccaacttcatctcattaaccttgtttctcattcgtgcttaaaaagaaaatagtcttgttttttcctttgtcctcgtttccataatttaaacatctctgtctccaattcatgtgcctcctctttaaacctttttcaaaattcacctgtttctggaagaatgctgcttaatccactcacaaggatcagttaatgaatcctggtaataagtaccctaaggttaatatatgcttgtttagatatagtttaatatcttcttaagctttttttttttcttaagtttttatgttacctactctgtttccttaattttcttaggttaaaaaaattaaaataggaatagcgtcttttgtattgtcttatgaatttarttcatttttcaacaatgctacttttaaaagttgctaatttttaaaaaggataaatactgtaacaacgtttacccttgatcaccaccataatagctattttttgtttctttccaggtaattgttcatatttaaaaaataaagttgtgtggtagagagaattttgagaggaatataatgggaacattgtatggtggaggctgtgcaatgtaggggaaagatcacagactttggagtcaaatctggtgtggaatctagcgtcaaaaacctcgggcaaactgtctgatttctgagtcaggagtcaaatctggtgtggaatctagcgtcaaaagccttgggcaaagtgtctcatttctgagtcaggtggtcttgaattgtggggattaagatactatatgtaaggcatctagcgctgtgctttaaatacaagagatgatcagtcagtgatagttggtattattttttcatttttctattcccatcttcatgaatattatttatttattttagctacccaaagccaccaaggtcaatgaatataatttaagtgattagttaaacattcaggtgatataccataactgatttagacatttacattttgttaagtggttttttgtttatttcctcagtttaaaaccctaggactgggataatggtcaagtgtcatgaatatttctgtgccagatctctctcttacagaagtacctacagtggttgttcttgttttgggaagaaaaaaatgctaattttataattgtatttcattgttttaattaatgtaatttgaaaatttatttggtgatgatgtaatgaacattcctttatatgttaagcaaacatttgaaatgcccattgtagtgggagcagtggtataaaggtaaataagacatgattcttgtccttgagctcaaattctagggtggtaacacatgtcaacaaacaattaacaattcatagtgacagtgtaataagatctggggaaaagaagtggcatttgaatatggtcttggaggatcatttggaattgatctgggtagagagaacagcatatagaaaaagtcaaagtatgaaagaatgtgtggtgtgtttggagaaatgtaagttgtcttgttggatatgtctgtctctgtctgggtgggtgtggttgtctgttcctgtgtgtgaatctgtgtgtgtgtgtgtgtgtgtgygcgcgcgcgcatgtgcgttgattgcagtgggaaatgaagtcttgtgagggtccttgtgtttgggcaatgagtgggatcattttaagacctttaaaatagagcttcccaactggtgtgccatgaatggtttaccagtgtttcggagagcaagatacccttgtttaatgggacctgggcatatcagatccccctccccaccctgccccaggatggtttcttttggctttgaatagcatttgtggcttatcccaaygtgctaagaaattattattttctttgttgccaagttgggaaaaggattgggaaaaccactgttttagagactgtaagtattagaaagtttatggttcctactcacccttggcatccactatggaatcagaaataaatatcaaatcctaaagtaagcttaaggtaaacttaagaattcttaagtcaccttcctctttctctctctttttccctccctttacccgctgcctcccccatttcactggtgtatgcgcatgtgcgcgcgcgcgygtgtgtgtgtgtgtgtgtgtgtgtgtgtctgtgtgtgtgtgtgtgtgtgtgtgtgaaatatctctttggtgcccttgcgttactggtgccctaaacatgcatttagtctgcctcttgggaaatcagcattaacattcaggaacaatttagaggtatttaaataagggatgataagattagatgcaggttttgaaaggtaactcctgacttctagataatgatgcaaagttacaaggataatgcaaggatgaggttagaaatggagcagagagaccagatgctgttgcagtggtccaggggagggatgataggaaccagaaatagggcaatatagatatgagattagaactgaaaactgagtagtttcactagacctgagagtccatttggacatggggggaaagagttgaagatgatgctaggatttcttctttggcagcttcccttctttagcaagggaaggccagattatttttattgagcacttccagtgagccaggtattttgctagacagcgaagttgtcacgagttctcatttaacattttgaaataatttcaaacctaatgagaaatctcaagaaaagtacaacaaagagctcctgaatcgccttaaactaatttttaacattgtactagctatgtaccgtgtgtatacacagctcaagatgagcctggaacacctcgtgcttggctcagtaaggccttttccagatgccccaagtggtcaccttggaattgtgttyagccctttccctttttctactgtatctaattggatcctcaaatttcagtgaaacaacctcatcatctctcatttctggtcctacattttaatccttatttctccatttcaggggaatgcaccatttctaatttcatttggcttttttcctgaattatttgagagcaagttgcagacatgatccctatcactactaaatattttagtgtgtatttagcaaaacaggacaatctcctacataaccgccaaatcaggaaatcaacgttgatataacactaccttcaggtcgaacctagatgccattcaaatttttccaactatcccagtagtatctctcttttctttttggtccagcatccaattcaggttcacacattgcatttaattgtcacatcttttagtttccatcagtttggaatgattcctcaatatttccctgtcctttatgaccttgacagttttaatgagcagagtcctttttttctgttacatgttttcctcaacttaagttcatccagtggttcctcatgtgcagaccgagtgcattgttggcaggaatgccatagaaataatgtcgtgatattcttagtacatcactaagagacgtgctgtatagtcctgctactagcgatgtttaactttgaacacctgttaaattcaagtctgctgggtttctctactgtgaagttatcgtttttttccttttgtaattgggaattcttatgtgagaagatatctgggagtgtgtcaatagagctgaaggctgtaaccacgagccttcaggtctgatgattgctacctgaatcagccacaactgtgaaagttgtcacctacatttattagttcatattctactgaaagaagattttctccttcttctccatacatttatttattcattcatttatatcaatatatactcctggatttgtttctgtttagtggtttttattagttactgtcattttaaaatttcattttgttggtcaaattgtcccaaatttggcctttaagttggctcctctatctccttgacctgtccccctccttggtgtatttccttactttctggcctaacaagatgttccagatgatcttaatactctcctatcccagctctgaaatcatttatttttccaaggaatcctgattttattttacttttttaagtagagatgctatttaggaactgagatccgagtgttcagtgtgttcatttctgctggcatgtcatcacttttagggggatagagctaggaaatacatatatgtatacacacatctgaatctgtttctatgcctatgtacaggtattttataagttcacactgatacaaccaattccaatctaacatctcaggattcgtctagccttttccctttctgtatttgtaaatctcttctccagcagtgataaattggttcctattatctcctcagtgtatttacttatttgctcaatccccttgtatgtgccagtcttccgaccccgcattagttgtctcctttctccttgcttgcygcctctgaggcctgtggcatggggtcctcagagcttgctgtcaggtccatgtaggaaagagaacttctcatttaatctttttcccctcatttaatcaggacagaaatttgttagaaaggtgctattcccagttttaaaaggagaacagagctgaaattcaaaaaggtctgtgtctttaggcatgttactgtgtaaatagctgagtaaatattttgcattcagattcgtctgatactgaagcatcttttctctcctgtactgcatagcctctgagtatctgtggaatccaaagtggcaggatttaaggttgtatagatggtagctgaagcaatgggtgggactgtcactgcttatgaagtatatataaagttaggaagaggcacactgacagagctcctaactaccaycactgaaagattaagggctctccgaaatcaagaagccagtgaagaagactgaaagaaaggttgtgagagaggagtgtggttgtgtgttagatgatggtgaagtaaggaatttcatgaagctgccatgttgctgagagaaaaagagaagaccaagaggctttgaatttgactgttggaaagttattgataatctcagctagttggttttccagtgtgttcaggcgagctgcctgtatcagaattatggagatactaatgaaaaatatgaactccccaggtctcatctcagaccttatagattcttaaaagggggagtggggagccaggaagtggtagcctgggaaaatctgctgaaatgctaaggttcttctgaggtgtactagtttgaggtttgttgctttagcagaagagttatagtggaagagtgtaataaactaaattgaggaaaccaagtgtacaatgaatatagatgagacagctcttcgagaagtttgccatagaggtaaaagatctcaggtcatggaagaataggggacagcatcaagaaaaatacctttgcgtttcaagggttacatacaccttaacatttgttgggattaagagaaggaaactgtaatggttattttaaagttgggtaagcaaaactaattagcaacacctactatcaaaaaaatgccctgagtgaactttgatatgtatctgggatagctgcctgctcccattttaaatgccatcttttggtaggtctttggagtaatccaagggtcattgtttattttgtttttagttaaatttgtatcttgtgtttttgttatacagttgtgtaaagagcttctctttgctcatttttatacaaacacgaattctaagtatattcttgtatatagacgagtcactagcaatacaattaaaaattacgtccaaaattggaggtgactttagagggaaatccaatccagggctaatttaatgtattctttgagcaccagctaggtactaggcactgtgcttggctgtggggatacagaattgaataagacatgctctttatcatcaagattattgttctttcttcagaggaacttgaaatctagtgtatagctagaaatggtacagataagtcatagataactatgttagtctacagtaaaataagtacagataagtcaatgtttaattaatacagcagtgtatattaccataattctcagacttgtcattttaaaattgtatttaaattgtattttcgtatttgaattggcaatatggctacatggttcaagtttcaaaataatataaaaaggcatataatgagaagtcttgataccactccttctctttcctgttctgtataggtaactacttttattttttgtatattctatggtatttatgcaaatagaaacacatataaagattactgttttccccctaccttttttatgtagaaggtatttactatattaatgctttgtaccataatttttaaatttaaaatataccttggagatcatttgacttcagcatataaaaagctgtccctttcttcttctttttaaaaaatatagtagtatgttctattgtatagatatactattaagctaactaattctaattatttaaactttaagttttagacccttttacttgtgtaacccatttcctttcacctctttctgtatgaactagtgctccctgaagcattttacattaatgacctgcctgacttttctgtatctaaagggtctaactttttttttttttttttttgagacggagtctcgctctgtcgctcaggctggagtgcagtggcgcagtctctgctcactgcaaccgctggctcctgggttcaagcgattctcctgcctcagcctcccgagtggctgggactacaggcttttaaaaatcttgtcagcttctgcttttactcagtagaaatcagttaccatgtaacaagtctgattaccttgagactcccatgctgtgaggaagcccaaactctcacaggagagaccagaaggccatgtggatgagtacttcagtgaggacacatgaaagtgatgccttcttggactttccatcccagcccagccatcaactgaatgtagatgagtgaatgatcccaaatgatgccagatgacatccagtgcagcagaagagctgcctaatctagcttttacccaattcctggccagggaattgtgagacatataaatccttattgtctgaaaataaataaataaataaaagtaggtttatttgagtgcagatctgtatctgttctgctctgtcctggttttctgtgttaacaatgtcctatttttaaattcctgtactccaatcttgtagctggagctctctgctatctactgtaagcattgcctgctgccatgtttccttactgtgtttttccgtgattgctgggataccacctgcttatctgacctctacaatgctaaagacctgcttgcctggatcactgcttattgtctggtactgtaagctctggatactattttctaactgcctgtctctattgcctctcatcatcattagcgagtttccctcttctcccctaattttccctatcacagccctatcagcccttgagttttagtttgtcaatgtgaaacttggcaaaacttctgaaattatttgggatgatttaaaatcttcttgatgttagttgttataagtccattatgccttgtctggactcttgtagtagtctttttaagtgcagtttgctatagttttgccctttataatctcctttacactgtagccagagtgatctgacattcatatctgatcagaattcttttgttatctctccatctctctataaaataaaatgaaggagttttccaaggggattaaagttatttgggaaatatcagtttttaagataatattatttttgtgtgtttcttttttagatacttgttcatgaaagcaaaatatcattacaaatgccaaggacttccaaattgtttcatttgcattgaaataagggaaatctttctaatttatcttactgtttccagcctagcacaaattgcagtcagttatagtggcttactacaagaagctgctagggaaaatggaatgtcttcwttgggaagggatcgtgatttgaaaaagttctcttaggtgattctgatactgtgactcattttgtatctggctatttttatggcttttgatctgtgttatcataattgtttatgaaaagaatttcgtaaccaacagtttgttatatgcaattctgaaattcccacatccctaaaaagcccaaaagttttgttaactaatttggcaaccaaacttgacttatactgaggtgagactacttagtctcatttattccacttacagtgtacattcttcagattctctaaagaaattttattttatttttattttttgaggcggacttttgctctgttgcccaggctggagtgcagtgccatgattttggctcactgcaacctttgccttctgggttccagtgattctcctgcctcagccttccaagtagctgggattacaggctcacgccaccacacccagctaattttttatatttttggtagagacggggtttcactgtgttggccaggctggtcttgaactcctgacctcaagtgatccacctgcctcggcctcccaaagagctgggattacaggcgtgagccaccgtgcctggcccttaaagaaattttaaatagcaatatggttgaatacagggtgctgccctagaatcaagaatgttacttaatgtaaggtatctgtgccgtatcacctgtctgtgtcccagatactctgaaattcaaaacacttctgaaagtgttttgaagctagagatcttagatatgagattgtagaactgaaccaccaacttcctagcaatggaaagaagtggtactttgttttcttttgtatttctttttggtggtaatgtagttgaacattttttcatgtttattaatttcatttcttatattcttcaaattttttgttcatttatctgctagggtgaatagtttttcttactaatttataatatcgtagatactaattggttttctgttcattctaagtttttgtatctagcatattggtggaaaatgctacaagttgaaaacgcacatacagctgatgtttgaacaacatggatttgaactgtgtgggtccacttatacgtggattttttttcaataaatatatcggaaaaatttttggaggtttgggacgatttgaaaaaaacacagatgaactatatagcctaaaaatatcaagactttttttcaattaagaaaaaaactggctgggcgcggtggctcatgcctgtaatcccagctctttgggaggtcaaggcaggtggatcacgaggtcaggagttcaagaccagcctgacctacatggtgaaaccctgcatctactaaaaatacaaaaatttgctgggcgtggtggcgcacgcctgtaatcctaactactcaggagactgaggcaggagaatcacttgaacccaggaggcagaggttgcagtgagccgagatcgcaccactgcactccagcctgggtgacagagcaagactctgtctcaaaaaaaaaaaaaaaactaaaaaggaaaaattagatgtcatgaatacataaaatatatatagatactagtctactttatcatttactaccataaaatatacacaaatctattataaaatgttaaaatttaacgaaactcacacagaccatacatggtatcatttgcagttgagagaaatgtgaaaaaacataatgatgcagtattaaatcaactgcacaaaattaaccatcttacataatgtattactgtaataatgtaataaccacctctatttctagtgagttcaggtgttggaagtatccatttaaaatgccatgtgatgctaatcatctccacatgagtagtttgtctctccagttaattgcctgtcacaataaaaagtgatcttttgtggttcttgagtattttttagctatgtttcatcatgtttagtgcaaatcataaaccttgaataacaccatggaacccatatgaaatgcagctagtgatgctggaagtgctcccaaggagagaaatgtcacaacattacaagaaaaagttgaatggcttgatatgtaccatagattgaggtctgcagctttggttgcttgccatttcaagagaaatgaatccaggataaagaccatttttttgttttgtttttgttttgtttttaaaagaaatctgtgaagctgttgctacagctacaccagcaggtgcaaaaatcttgcactttttgtgaaatacctttttatctcacattgaaaatgcagcttttatattagtgcaggattgctattagaaaggcacacgtatagactctaatatgatttgagtaaaagcaaagtcattatatgatgacttaaagcaaaagaaaggtgaaggatctaaagctggagaatttaacccaatccaaggatggtttgatagttttagagtttggcttaaaaaatgtcaggataacagcagcttctgccaaccaagaggcaacagatgagttcctaggcacccttaagaaaatcactgagggccaggcatggtggcttatgcctataatcccagcactttgggaggccgaggcgggcagatcacgaggtcgggagttcgagaccagtctgaccaacaaggtgaaaccccgtctactaaaaatacaaaaattaggcatggtggcatgtgcctttaatcccagctactcaggaggctgaggcaggagtcgcatgaacctgggaggtggtggttgcagtgagccaatatcgcgccactgcactccagcctgagcaacacagcgagactgctaaaaaaaaaataaaaagaaaatcattgaggagaaaagatatctgcctaacaggtttttaatgcagatgaaggtgccctattctgaaaaaaaaaaaaaaaaaaaaaaaaaaaaagccacaaaggacatttattagtaagagagaagtgagcatcaagatttaagggaggaaaagataggctaactccactgttttgtgcaaatgcagtccggtttatgatcaggactgcccttatctataaagctgctaacccccgagccttgatgggataaggtaaataccagctgccagtctattggtcatataacaagaaggcctggacaataactctttttctggattggtttcatttgtgctttgtccctgaagtcaggaactaccttgccagtaagggactgccttttaaagttcttttgatgttggacaatgccgctggccacccggaaccctgtgagtttaaccttatgttgaagtggtctgcgcgctcttccaaacacaacatttctaattcagactccagattgattagtcctaaggacctttagggctcattacacatgatactctatggaaaggattgtcagcattatggaagagaaccctgatagaacatcatggaagtctggaggattacagtattgaagatgccattgttgttatagaaaaagctgtgaaagccatcaggcctgaaactgtaaatacctgctacggaagactttgtccagatgttgtgcatgacttcacaggatttacaacagagtcagtcagggaactcataaaagagattgtggatatctatatctatatctatatctatatctatatatctatctatatactttttaaaggttgaggatgaagggtttcaggtatacatcttgaagaaattcaagagctaattagacaccacaccagaggaataaatggaaaataacttgatggagatgagtgcttccaaaccagtaccagatgataagcaagaagatgtggaagaaacagtaccagaaaataaattaactatagacagtctggcagaagggttccacttattcaagactgcctttaacttcttttacaacatggacccttctaaaatacgggcactgaaactaaagcaaatggtagaagaacgattggtaccataatataaagatttatttatttattaatttttttgagacagagtctcagtccgttgcccaggctggagtgcagtggtgcaatcttggctcactgcaagctacgcctcctgggttcacgccattctcctgcctcagcctccagagcagctgggactacaggcgcctgccaccacgcccggctaattttttgtgtttttagtagagacgggtttcaccaagttagccaggatggtctcaatctcctgaccttgtgatccgccctcctcggcctcccaaagtgctgggattacaggcgtaagccaccgcacctggcccataatgtaaacattttaagtgaaagttttaaaaagcccaacagaaattactatgtatttctgtaaagttacgtggagtgtgcctgcctctcctgcttccccttccacttcctccacctcttctatctctgccacccagaaacagcaacaccaatctttcctcttcctcctcctcagcctacttaatgtgaagacagtgaggatgaagacctttgtgatgatccacttgcacttaatgaatagtaaatatattttctcttcgttaggattcttaacattttctttagctttatggtaagaattcagtatatataatgcatgtaacatacaaaatatgtgttaattgactttgttattggtaagatttccggtcaacagtaggctgttagtagtgaagttttgggaaagtcaagagttacatggagaaattagacagtgcaggggtcagtgcccctaaaccctgcattgttcaaaggtcaactgtatttatatggtaaaggagatgatcttgctcttttgctcaaaatcctttaacggcttccattctttcttagagtaaaagctaaagtttttactgtggccaaaaaagccctacatggtctgtggacctggctgtctctctgaccttatctttgaccactcttctttttcatttttctcaaggcacactggcctcctttttgttcctggcactggcagacttgttcctacttcaggtcttcatgtttgttcttccttctgccttgaacacccacctttctcccaagtgttccaggcagatggagtatgcacatggctcactcttttactttttaagtctctgctcaaaagcaaatttctcagccatggctttcctgagcaccctatttaaaattgctttcctactcctacatggctgttctcctttgcttaccacctcacattatactatatatatttttttctttcctcattataatggaagctccatgagggcaaggacctttatcttgttttgtttgtcgatatattcatgttgcttcttcctgtctggcacaatgtgaggtacttaatagatatgttgaacatgggaggggttagggaaaagtagaggaacatttatctaattgcctaacacatggacacttgattcgagcctttagttataaatattctgctaattctggtgtaactagagtattttatatatatttattttagagatagggtcttgctctgtctccttagctagaatgcagtggcatgctcacagctcactgcggtctcaacctcctagcctcaagtgatcctcccacctcagcctccctagtagctgggaccataggtgtgttccaccatgcccagctaatttttttttttcccctaagagatgaggtcttggcatattgcccaggctgatcttggactcctgggctcaaaggatgctctggtctcagcctctcaaagtgctgggattatagatgtgagctactgtgaccactggaaacagttgctttctgaaggaagtataaaaactctatagagaccggcattcttttttttttttcctctaaaaaaatgcactaaacctctaactaataaaatattttttgctagggaagagaggaacaataaagctttaaatataataccacatacactataagactgcctctttttagacaaaaataaaaatattctcattgactggtagtacttatgaaagattggctttattgttggaatctcatagggaggagaccaaaggacagaaatttagaaaatggagagggagagagggaaagaactagctggctgcttctaatgtttctagtacttaggtaatgaactgtagataggagaaagagtagttctttgactcactaaattaattaatatacgtctgttttagtaaataatttcactgaattatttagtttccatccctaactagactgagcttcttgagggcagagatctagatgtgtgcatatgtgtatctctagcatctagcactgtgtctagcaactaggagctattcacatacttacgtgaataaacaggtatattgaaggcataggtttagagaaytctgtagggccttagtgggtcgggagtgtgtttctttcttgcacgcacagtactttaaatgctgaaatgtataaataggatatagtgagttgtaaaagattaaaataagttaaataaaaaaggaaaagccttaggtaaatcagtttgatgcaagaaatggcacaaattagattcctgtatttaatatatagttaatataaaatctattttgacattgtaattctttattcttatcaggtcggtaacaattgagtagaggacatacaaaggacattttgaaaatgctgtctgtacatcagtgaatcccagtgtaggtccagtgttacgcattcctgtttcagatgattgattttgcacatgattaccaggaatactttgttgtcgtataccatttcttaaataagaagcttcttatttaagttgttgcataatgacttctatataaatgtgtttggtatgtgtaagtacagagagagaaattttagagcaaaacctgttgctacatttgaattttttttccttctacagggtatcagttttatagttcatagttttggtagcactatcctaagggaatctggcccattctgttgccaagttcagttcacatggcttgagggaaccttctttgtatacagcgttataacaataagctaagttagtccattatcttatactaccagcatttgaatttataattacatacaaaacattgtgtaataaactaagttggtagcaaagcagatggtccagttgggaatattccatttcaaataagtgtaaagaattgtcggctgggcgcggtggctcacgcctgtaatcccagcactttgggagcccgaggcaggcgtatcacgaggttaggagattgagactgtcctggctaacacggtgaaaccccatctctactaaaaatacaaaaaattagccgggcatagttgcaggcacctgtagtcccagctactcgggaggctggggtaggagaatggtgtgaacccgggaggcggagcttgcagtgagccgagattgtgccactgcactccagcctgggcaacagagcgagactccgtctcaaaaaaaaaaaaaaaaaagatcagctatcgaggatactttttcggtgggtaattgattgatgatttttgataactgtggttttattgtgtatgcatttgttaagtataaaagcagaatttgaaataattcttttattttttgtttttgagacacagtctctctttgtctcccaggagaagggcagtggtgtgatcttggcttgctgcagcctcgatttcccaggctcaagtgatcctcccacctcagccttctgggtagttgggaccacagtcactcaccaccactcctagctaattttttgtattttttgtagagacaggacttcgccatgttgcctaggctggtttcaaactcctggactcaagaactctgccctccttggcctcttaaagtgctgggattacaggcatgagccaccacacctggctgaaataattttttttttaactctttcctcacaactttttattttgaataatatcatgcctatggaaaagtagtaagaatggtatattgaacatctgtataatcttgcatagattcattaattgatactttgctttcttgctctctctttatatgtactttgaaaatttctgaactatttgaggattgcagatatcatgatcataacacttaacctaaatgtttcagcatgtaatcatgcatcttttggtaataaacacattcttctatgtagcatgatcacactcaggaaatttagcattgacacaataatattacctaaaactcagtctgtattccagatttctccaattgttcaagcaagtcccttatactttctaccctaaccccccgccaaatccatgattggatcaagagctacacattgcagtaggttgttttatctttttaaatctacaacgctcccccatccttttacatctactcctcacattttcgaagaatccaggcaaattgttttttagaatgttcctcaatttggatttgtctcattgttttagttttatttcatcactagattcaagttaaacatttttggcaagaacactatataaggtgttatgttctcagtatatgacatcagggtgtctatgataccagttttggtgatgttaaatttgattatttggttaaggtgggatatgacagatttctccattgtaaagatatcgtttcccctttgtaattaataagtaatttatggggtgatacttttggattatgtatcttgttacccaacaactctcacccagtgattttagcatttgttaagtcttgcctgaatcagttatagtaactgtaaaatggcatttttctatttctgttcttccttctatatttatcattagatattatttttaaaaagttattcctctccctcacttaaaaacattagcatcactctggacttatggatttttattcagartattataatctattatttattttggaacttaagttgtttcatatttcctgataggagtttctttaaactgcctctctttttctttgactagtcctcagttagattttgagggcttacttccttacttaccagtacaagacatttagcctcaccttgtattttccttgccccagctctgaaatcagccttttttctccagagtcctaatttcttttagtgaggaatagtayatagtaggttaagtatattcagtgttattggagtattttgacttctaggttctagtggataattttttaaaaatgagattaaccaatgcctctaattctcatccagtacwgcaaccatctctgatgccatatctgacctcttgtgtcctgtagccagactcctggttctcaacaatattaatatttattcatttgttcaatcctataatagacacaaaatagtttcagaatgttgcatcaagaccactgtcaacaacaaactttataaagttcggagttttttatatttcttttgatttatcttcagtgtattctgctgtggttagcaaactgtggcctgtgggtcaaatctgaccaccaccttttcagtatggcctgtgaactaagaatgctttttaagtttttaagttcttttaaaaaataaaaaatatttcatgacccatgaaaattacatgaaattcagacttcaatatctgaatttagaatacagccatactcattygtttacatattgtttatggctgctttcatgctacataggtagaattaagtagttataccagagatcttaatggcctgtaaagcctraaatattttctgcctggctccttactgaaaatgtttgtcaattttaatactattatatttaacaattactggaatgctttttttcctgcgtgattgtgttatatattattagattcatttatttactcaattttagggagaaaggaattttttttaaatgttggaaattggcagtgatcgaattttagaattagaaggatatttagtgttcctgtagtcccacactgtccagtaggataaccactagccaaatgtagccatttaaattaaatataaaaaattcttggctgggcgcggtggctcacgcctgtaatcctagcactttgggaggccaaagcgggcagatcacttgaggtcaggagttcaaaaccagcctggccaacatggtgaaaccccgtctctactaaaaatacaaaaaaattagccgggtgtggagacaggcgcctgtaatcccagatactcaggaggctgaggcaggagaattgcttgaacctgggaggcagaggttgcaacgagccgaggtcatgccactgcactctagcctgggcgacagagcgagactccgtctaaaaaacgaaaagaaaaaaaaattcttaagttatatgagtcacatttcaaatgtttagtcatcctatgtggcatggttcctatataggacagtacagattatagatcacaaaaagttctatcattttacagatgaggaagttgaggttcagaaaaatgaagtgactgctccaaggtaatagatagacagtaacagatttagagtgaatcagtggcttactagatattacatttgttgtgacatttgtaatagaaaagaaagacccctgtgttaggctatgaaacccccccacccccctttttttttttgagacgacctcactctgtcatccaggctggagatcagtggtatgatgatggctcactacagcctcaaccccccaggctcaagctatcctctcacctcagcctactgagtagctgagaccacaggcatgtaccactactcccggctaattaaaaaaaaaaatgtgtggagacaggatctccctatgttccccaggctggtcttcaactcctgggctcaagggatcctcctgccttggtattacaggtgtgagccaccacgcctggctgaaatccctttttttttttttactaaattccagatgagtgcatcatagtaacatcgaaatatttgtattttgagagcttaatgattggttgaaatgggtgccctgtttttgctgctttgcactcatttgcattcattcatttgagttcagttttcactcattcgtattcattcatttttgcagtaaggacgtttttccatttgtacattgatttaggaacataggaagctatcgggaaaggttagaaaaactggggtatgctaagtaaaacaacaacaaaactattgattctctgtccagctgtaatccttttcctgttaatgtcaccaacatacatgagcagggttattctctcatttgtgagcccttactgtaacaaaggtctcagtatatgtgattgtgacttcttttccccttrattttctggggcaagtgttgaggtggagattgcggaaataatatattgrgtgcagtgaatcagattgaagattagcaaaccttacaaatagtaatgtgtctttttcagtgataccttcaattagtttaggtgcttctgtggttgactttgaaaataacaatcagaataatttcagcatgaagaaatagaaatcattatgatatggtggaaatctttgagattagacagatctggattcaagtactactctattacttttgcctgcgtaaccgtaggcaagccacttaatccttctgaggggattaacaaaaggaactgtcattgttttaagaataagtgacagaatgtgagatgtttaagttattgttgctgcataaccatgccaacatttagtagcataagttaatcaccattttattatttacaggatctctcagtgaggaattcaaacagggtacaggagtgagagctcttttctgttccacagtgtctgcttgctcattggcaatggctgggggttggaacacttggaggtgggggatccacttcgcagattgcttattcatatgtctaatgactgaaggatgggctcagctgggactgttgagcagagcacttatgtatggtttctctatatggcttgggcttcttaacagcatgttagaagctgggttctgaagggaagcatcctgagagtgagtgttccaagggagctagatagaagctaaagggcttttctgatgtagtcttagaagtcatatagcatcacatctactgtactctgttggtcaaagcaattacaagtctcaagcttcttcccccacccctccttccccagaatcaagagaggtgatgtagactccctttttttttttttttttttgagacagaatctcctgggctcaatcagtcttcctgccttaacctaccaccaagtagctggggctacaggtgcacamcaccatgcccacctaatttttttttttttttttttttgagacagagtcttgctctgtcgcccaggctggagtgaagtggcgcaatcttggctcactgcaagctccgcctcccgggttcacgccattctcctgcctcagcctcccgagtagctgggactacaggcgcctgccaccatgcccggctaattttttgtattttttagtagagacagggtttcgctgtgttagccaggatggtctcgatctcctgaccttgtgatctgcccgccttggcctcccaaagtgctgggattacaggcatgagctactgcgcccagctgcccagctaattttttttttttttttttttttgtagagatggggttttgctgtattgcccagggtggtctcgaactcctgagctcaagcagtctgcccgcctcagcctaccaaagtgctaagattataggcgtgagccaccatgcctggtcagtcttctaactcttgaagggaggagtgtctggcattaaaagcagcataagtcaaagtttctagttttatcagtctgggttcctcatcctttccatttttcttctattcattttatgataytgaggaaaagaaacacctctaaacttcctcttatactgtttgttaacagtagattagagtttctcaactttagcactattgacattttggaccagatcattatttgtatgattgtcctgtgcaatccgtgatgtctaatggcgtccctggcgtctctgcactggagccagtagcactttacccttcaattgtgagaaccaaaaaatgtctgcatacattgccaagtgttccgtggaggacaaacttgcccctgtttgagaaccactgctctacattcrtgtttctcaaagatattgatatggaccagccacattgatatcacttgcgggacttactgaagtgttattttttcagaatctggaattgggtcccaaaaatctgtattttttaaaaactcctcaagtgattctgatgcacacttaagtgagagaaatgctgatataggttatccttaaaagctgaatgactaagaggtatataaatgctttactcactggtaatatactggtttcaggtcagattaatggcatagtagagttgttaaatatactgttatatattatatattattttgggttccatttccatagattattagtgtaaatagtatatccattcctgtttcatgaaatttttgttttttaattatttttctcagctttattgtgaaaactttcaaacacagaaaaattaaaagaatgatgcatataatgaacacttacatactttaccactgagaatcaagagctgttaaaattttgccgtgtttgctttgtgtgtgtgtgtctacgtgtgtgagagaatgagtgcacacgtgtgagcaatcagagctttcctggtgtatatgagagagagacagggagagagcaatcagaagttttcatggtatgtatgaaatccaagtaaaggagagagaggtgtaggattctgcagtataagtgctcccatgtggatagactgatccattcatcttcacggtatttaatcaggatacctttactctcaagcagagttgatttagtgtaatggattgcaaagttttaaaaatgcgtgcttggttgaacacctttctttccttactatttagtggttttaatgccactccagtcaaattacacttctcctcctttcatatagcctaggacagtgctactcaacagattgtctatggactgggtaccagtccctggcctatgaggaaataaatacagtaaatgagagtgagtatttagtattagtattttataacagttgagagatacttcaccttctgcttaataatgaaaaattatgactcgtattttttgtgtcttaaaaaattttattttctagtcacttttattgtatttgcaaacatactgtattggtctgtgttctagttacctactgctgtgtaaccatcccagaatgtaatgatttaaaacaataacagtaattaattttgttcatgagtctgtaatttgggcaggacttggcaaggaagacttttctcttttcattgcagtcagctgtagtggctcaactgaagttgctccactcacatatctggcagattggtgctggctctgagcagagattctgtcagtgctgagggctgaggatctcagttcctttctacatgtgacctgggcttccttggaggtgggtgactggattctggggataagtatccccagacaaacccagtaaaaattgtatctccttttgtgaccaagcctcagaagtcactgcgtcatttctgctatcctcttattcactgaggcagctactaaggtctacccacattaatggtggaagggacatagactccacctcttggtgtagtggcaaaattgtagaaaattgttgctgtcatttttgttaaaatacaatctgccatagcctgtgatagattaaaaatggaagaaactggcccttccccacagatacaacctgagaggcaccactgacctggtcctacctggctttaggttgggcacttactataatacagttctaatttaactactatacatttggaagacaccttattatacctttatgcagtagacgtaatatgggacaatggtgggagagataacaaaaggctaataggaaactcgtgaatgggtgtgtaggtgtgtgtgggtgcacacgtgtgcatgtgtgtgcatggtggttctgtttttggcttacaggttttagcatttacaaatcttctcctgggctggtggctagttttctcaaagggattaccagtatcctgcctgggcaataaacctggctgctagtgttccagaaacccagttggggaaggacattgagggaaacagaggccaaagtgatactgatgtttctatataatacatactttttgaatactgctgagtacagagctcagtactaggtgctaagagaaatacaaaggtaaagctccttttatttgacactttaatgtttaagtagtattcttattaatattcaagatctatacattatgattactactaatagtgatactgctattagaagtagtattgtctaacactttatgtatgtaatacttcaaagattccaaactggttttcagatattttctactgccttagctaatagattagctctagtaagtcgtcagtacttactgtagtacctggaacagagtggatgcttaatacatattttattaaataaataaatgaatctttaaggtatggtagaatgattgcagcctctggtgtctggctcattaggtcttgtactttctagcagtgtggcaatgaggggattgtggaacctatgtagttctatttcttcatctatagaaataaagttaatctctctttacacactatatataaaaattggttgaaagcatcaggtatgagtccctaagttggtgtgtatgttttccacttctagttttaaagcccagtatgtgtggtgagtagaagaaattgctggtattaaagactagtattagacattttaggcactgaagtttaaaaatagaatgttgcccctaggagtagggcagtgcattattaaattaagtgttgaaatctttatgcctcttcatgcaacataaacttttatttggaataaatatgacatattaaacaaaattaaagtttattttggtttatttaaaaatttacccttgttacagtagttttattgatgtgttcgtaagaaaacttagggttttctttttctccccagattaacttgttgtttgcaaattttgacagggcttttgaaaataggtaatgtatttttaaaaagatgatggaggaagaaatccaattgagtgtatttatttagaataagagagatcacaaattaagagatgctaataccacaaatttcacaaaattcaaaaataaaataatttcactaattaactgcctgacacacctctaaacatttgattacagaaacttagatcacttcataaaatgttatgttttaaaaaattgtttttaatcgaggtaaaatatgaatagcataaaatttactaaaatttaccatcttaaccatttttaagtgtacagttcagtagtagtaggtacattcacattcctgtggagccatcaccaccatccatcttcagaatgcttttcatctttaaagtatgaaattctgtacccaataaacatctctccattccccattctactttttgtctgtgattttgaacgtactaggttcctcatataatggaattatatataatatttgtcattttgttgactggcgtatttgacttagcataatgtctcaaggttcatctgcattgtagcatgtgtcagaattgcctacctatttaaaggctcaataacacttcattgtgtggatataccatattttgcttatctcctcaatggacacttggtttgttttcatcttttggttattgtgaataatgctgttgtgaacgtgtgtacaaatatctctttgggacccagctttcagttattttgggtatataagcagaagtgaaattgctgaatcataggataattctatttttcattttttgaggaacaactctactgttttccacagtgggtgcaccatttacactcccaccaacagtgtacttccagtttctccttatccttgccaacacttgttatttttcttttttctttttttttttttaaagtagtaaccatctaaataagtgtgaggtgggtatttcattgtggttttaatatgcgttttcctaatgattagtgatattgagcatcttttcatgtgtatattggccacttgtatatcttctttggagaaatgcctattgacgttctttgtcctttttaaattggattgtttggtttttggttgagttatagaagttatttatatattccagacattaggttcatctgatacatgattggcaaatatttccttctctattgtgtttttaaaaatcgctttcttgatggtgtcctttgacagacaaatagttttaattttgatgaagtccaatttatctgtttttttcttttgttgcccgtgctattggtgtcatataaagaaattattgccaaatccagtgccatgaagctctattcctatattttcttctaagagttgtgtatgcaggggtttatttctacatcccatctattttgatgtgttgttatttttgttttcatttatccatctcagaggattttctgatttctcttgtgttttactttgaccattacttatgaatgcgttatttttcactttcttgtaaattttcctaatttcctgttaataattgataatttcttctttattattttttgagacagaatctcactcacccaggctggagtgcagtggtgtgatctcggctcagtgcaacctctgcctcccaggttcaagtgattctcctgcctcagcctcctgagtagctgggattacaggtgcataccaccatgctcagctaattttttttttgtatttttagtagagactcggtttcattrtgttggccaggctagtcttgaactcctgacctcaagtgatcctcctgcctcggcctttcaaagtgctgggattacaggtgtgagccactgcacctggccacctgttactcatttctaattttattccattgtggttgaataacatactttgcatgatttcagtccttttaaatttactgatgattttttatggccctaatatatattattctactttggagaatgtaccatgtgcacttgaatagattctatatattttttttgttggtcatagtgttctataaatgtctgttagatctagttggtttataatgttgttcaaatgttctgtttatttttctgcatattttattcattattgagaatgaagtattgaagtctcctactattgtcaaattgtctatttctcccttcaattctgtcagttcttgctagatgtattttgggacgttgtttttagctgcatatatgtttataattgtctgcccttttgttcttatacaataagagtaaaacttattatctagtagcacttttggataaatatctcattttgactgaaattagtattagtataggtatggtagctctgttgttacttttttggggtatatatttatatatatttttatattgtttatgttttagaatctgaaatatggcttttgtagagagcatataattggagcagggttttaaaaatccattctgctcatctctgccttttgatttgagtatttagtccatttacacttaatgaaattactgacaaaccagcaccattttgcaaatgttttatatgtctttggtcccttttgtttctctattcatctattattgtttgtttgttgttgtatgttgatatttttaaatttgtcattttatttctattgtttatttcactgtatcttttcaagaaaattttttctttgtgattgcccagggtatttacttataactatctcatggggggaactgcaacttaattcagtagtattcagaaattttgctcctatatagcacatcctcctttccccttcctttgtattactgtcacacaaattgcatctttatacattgtaagcccatcaaygttgtattgctttacgcagttatattttaaatcagataggaggaaaaaagagttacaaacacaaaatgtatttctaccgttgtttacatttagctatctaattactctttttttttttttttttttgagacagagtcttgctgtgtcgtctgggttggagtgcagtggcacaatctcagctcattgcaacttctgcctcctgggttcaagcgattctcctgcctcagcctcccgagtagctgggactacaggcatgtgccactatgcccagctactttttgtatttttagtagagatggggtttcaccatgttggttggccaggatggtctcaatctcttgaccttgtgatctacccaccttggcctcccaaagtgctgggattacaggcctaagccacctagcttaggctatctaattactcttaactggtactttttattataggacagattgctagtgacaaattcttttaggttttgtttctctgggaatatttaaaattattcctcattttctaaagctttgttttgctacatatggtattctttttgatagccatttcctattaatactttgaatgtatcatcctactaccttctaaccttcatgtttctggactagatattgccttgtactgtaattgaggatcatttgtaagtgatgagttactttctttttgcactggagattttctttctctttgatttttgaccacttgactatggtatgtttaggtataaatctctttgagtttatcctaattggaggtcattaagtttcttggatgtgtagattaatttttctaagtcaaatttgaggaggtaggtgccattatttcttcaagtattctgtcagcccccttttctgtctactatctttctcggacttttattgtgactgtattggtatgcttgttagtgtctttgaggtctcaggctctgttcgtgtttttttgttttgttttgttttgttttcagtctattctttctgttcttgagactggatattctcagttaacttgttttcaagttgactgattcttctgtctgttcgaatctgctgttgcgctcttytattaacagtggtagaaagttcgatttatgattatggaaattgagatgtcatttttaaactgtccttttatttcaaaaggatttttaaattgaaaacattataaagtgctttcttttatatttgagctagaatgtatagaaccacttatataaattattttttagggtaaattgatcacttaaagattagtcattttgtgttttagcttagtgcagtacctatatttcctggtacctacaatagccctttgagttgggtgctattattatttgtccatttcagtgaagcaagtgaggcagagagaggctaactagaataaacacacaactggttatcactgttcttttcttattaacaggttttatggctataatctatagaacaatgcatagctgaattgttacaacgtctgaggttaaaagccaatattaaaatttttaatttgcacttatatttaccatcactgaaagaaataagctacattttattaacataatgaagaaaaattaccaaagtatgaattttgccaagttaaactaatcttgatgataaccaggagattgtgaaccagaatatctatcggggaaccagcccccaatatttcaacgtaggttcttttctattttccctaagtgtcagccggtctgagaaataaagggaaagagtacaaaagagagagattttaaagctgggtgtctgggggagacatcacatgtcagtaggttctgtgatgccccctgagctgcaaaaccagcaagtttttattagcgattttcaaaggggagggagtgtatgaatagggtgtgggtcacagagatcacatgcttcaaaggcaataaagtatcacgaggcaaatgggcagggcaaggtcacaaggccagggtgaaactgggattgctgatgaagtttcatgtcccactgtgtgcgcattgtcattgataaacatcttaacaggaaacagggttcaagagtggagaactggtctgactagaattcaccaggctggaatttcctaatcctagcaagcctggggacgctgcaggagaccagggcgtgtttcatccttacctacaactgcataaggcagaygctcccagagcggccattttagaggcctccccctgggaatgcattctttccccagggctgtcaattrttaatattccttactggggaaagaattcagcgatgtttctcttacccgttttcagcaataagagaaatatgactctgtcctgcccggctcccaggcagttagacctaatggttatctcccttgtcccctgaacatcgctgttatcctgttcttttttcaatgtgctgagatttcatattgttcaaacacacatgctttacgaacaatttgtgtagttaatgcaatcatcacaggctcctgaggtgacacatacatcctcagcttacaaagatgatgggattaagagattaaagtaaagacagacataggaaattataaaagtattgattggggaagtgataaatgtccgtgaagtcatcacagtttatgtttagagattgtattaaagtcgggcgtaagaaattataaaagtattaatttggggaactaataaatgtccatgaaatcttcacaatttgtgttcttctgccatggcttcagcaggtccctctgttcggggtccctgacttcctgcaacaaatgtcaaaaatccatgtatattttgcttcttaggtggtttgaccatatagtttgtttatttgtttcatttttagtttttttttttttttttttttttttttggtgatagtctcactcttcacccaggttggagtgcagtggcttaatcatagctcacagcagcctcgaactcctgggttcaagtgatcctcctatctcaactgggattacaggtgcgtgccaccatgcctagctaatttttgttttttgtttttgtagagatggggttttgccatattgtccaggctggtcttgaactcctgggctcaagctatctgcccacctcagcctcccaaagtgctggtattataggtttgagtygctgcacctggccagatttttttttaacagctttgttgaggtaaagtagcatataataagtgacatatgtttagagtatagtacttgatgtttttgttataggatccgtgggatattgcttagccagctggaaacctctgtggccagtggcgcctttgcctgagttttgttctggcctgctgggcttgttccatccacttggcatggcaggctgtacttggctcccgctaccagcctggatcccacacctgccaagggtgagccagatgtggagcagcaaggcgtgtgtggagctggggtccagccactgtgcacagccaggcatgctggctgttgcagggtatgcagctccaggtgtcggcatgggtgctggctctgtgcaaggctgttgctggatcaagcataccataagcagcttccacggctgacgctggggaatgcggtgtggcacctggaagcttggagatgccagaaatcacggagccttgaagagggtgtcagagccctggcttggagagtttctaggtctgggctccctgaagggctgcagcatttctctcctcctctcttctgtccttcttgtcacctgcagcaacgtggtgggcaagaggtgtgtttcagccctgtttgtgttacagctcttttaagcctgccattcagcgggtcctgagttcttgtcctgtgtccaggaagaatgaggtatgcagacaagtggagagtaagcaagacaaagaggagctttattgagcgacagagcagctcagaggagacctgcagtgggcagctcctctctgtagtcagagtgtccagatgagtgttcagctctcagcagaaagggtagctccactctgcagctggctatcccattgtttcttcagctctcagcggagagggtagttcttcttggctgctggttgtcctgttgtctcctcagctctgagcagagaggagaccctgaggtgggcaggtcctctctgcagttggttgtcccatcatctcttggtgtctggctgagtctggggatttatgggcctcagagggaagtgcttgctgcttggtccatgggtggccatggacggactggaaaaggcaccacaagttcccactctggtccatgggaccagcagcccagcccccaggcttcaggctctctgtggcttgaaggtggggctttaccggggacctggctggcctcttccacccaggagcctgactcctgccaccgttcatggtgcccaggctatttgtgccaaggggcgcctgcaggccagtgctaagcgggcctcaccccctcctcggcctttctcctgtgctcgttggcacccaaagtccagagggggccaaggtggcagggggctggcatgtcagtactgcttctggtgtgtgcatacctggctgggttgtgacagcacccgggcttggcctcaacttggctccacagtcggagctggcgttgacaacagggagaggccaggcagtgggagcagacacctctgagcctgtgagggcaagggggggccttcctgggtcccccaagattgcagagatgcctgggtccacaactgtaacttttgcagcaacatccatgcctggggggcggggcttctgcctgctcctggcttccaccagctctgtggagcaaggcaccgccctgggcccagttctgccttggggccctctatccccacccctttgtgcctaacatcactgctccctcactggtgggtgacttgcccggccccatcgcaatggctcaggagcgaggggaggcatgggggcaaggtgcaggtggcactgcagccaggcaaaccctgcagaaatgaaccctacacttggggccagccttgcgaatcctgactgcaccttctttggggtgcctgcgggcccctgagatgcagtggggagcatgattgccgaggcttcgggcctggaaatgggtcctacccggccatgcgagggcrggggtggcccagaggctgcctcagggatgcaggacacaagggacccactgctgccactgctgctcccacagctgctcctgctgccactgctctggcctccccactgcagctggcgtgatggcagtggctgttctggatggcccgctgctgccaccatcattttgacatatgtatacatccattaaaccaccactacaataaaaataatgaacatatctattactcctgaaagtttttttgtgccttgatgtaatcccttctcccacagctcccccactggactctcatccccagggaactgctggtctgctgtctatcaccatagctttgtttgtgttttgtagaattttatataaatggaatcatacagtatatactctttttttggtctaatttgtttctcattgtaattatttttagacttgtctatgttgttgcatgtatgaatagttctgttttattacttgtattccattttattgatatactacaggtcaattaatatcacatatgaataaactaattcacctattagatgcttgtttccagtttggggatataataaaacattcatatacagatctttatatggatctatgcatttgttacctaggaacgcaatggacagctcataaagcaggaatatgttcaattttgtaagaaagtgccaaaccgttttccagcattgttgtaacattttatattcccaccagtgatgaatgagagatgtattttctctagatcatttccagcatttggcattgtcactgtttttgtgtgtgtgtgtgtgtgtgtgtgtgtgtgtgttttgccattctgataggtaggtagtgatatcgcatggttttaaattgcctgagcctaatgtctcatgatgttgagcatctttttgtatggttatttgccatccatatatcttctttggtgaagtatttgttcacatctttcgccttgtttttttaattgtttttttctttttatttagttttgagagttctttatattttggatacaagtcctatgtgcttttgcaaattttttcccagcctctgggttgtcttttcattctcttaacagtgccttttgaacagcagatagtttaattttgatgatgtcgaaagagtgatgaagaaaagattagccactctccactgaattccctttttacctttgtcaaagttacgttgtccatatatatgggggtattattctggactgttttgttccattgatgtgttgtcttatcttgatgcctgtatgacagtgtcttggttttgctagctttatagtaagtcttgaaatcaggtagatatactcccctatggtgaccatctttttcagagttgctttagaagtggtaaaagtagatggacatctttgttttgttcctgatattagatgaaaagtgctcaattttttgccattaagtgcgatgttgaatatgttttctgtagatgtcctttatcaggtcaagaagatccagctgatctctttcctccattctctgccaccttcagtccatctttcttgtgctttcttgctgctgctgcatatggtcatgtcatttgtcttctatggcctaaatcctttaatctctatttatggcaatagaaaaaataaactaagtttttgccatttgacctttgaggttaaaacaaggtcggaaacagcatgcatatttttattaaacaaaatagattatattaacgttaacagaattttaaatatgaaaaaattgtatcccagaattttaattccccagtcatggtgtgcatttgcctaagcgcttcttctttttttgtatttgttcatatcttttatagttcgaacatcatttatgttcaactcttcacttaacataatgtatataactttttacatattttttgaacataaaaagtagatttatcttggttttcaaacttttagaatatttacaattttataggtacattaaatatgtttaaaggaataaacatttttatagattattatttataatccttttttaaaagaaatgggctctttcctactgtcagcagctgtttatacatatataccaattttactgcaacatctttttttttttttttgagacggagttttgcgcttgtcacccaggctggagtgcaatggcatgatctcagcttactgcaacctccgccttccaggttcaagcgattttcctgcctcagcctaccgggtagctgggatgacaggcacccgccaccatgcctggctaatttttgtatttttagtagagacagggtttcaccatgttggccaggctggtcttgaactctggacctcaggtgatcctcccaccttggcctcccaaagtgttgggattacaggcatgagccaccatgcgcggccaactgcaacacctttcaaatggaaaagtaaagatgtgatagataattttatttgatcttctttcsccttttaaaacatgaagatttagcatattttttcccaaagagagaattttcaagtagtgaattctccagaaattaagaattactgtattgtgaaatgaaaagtaaatgtggcaggaagtgggaatatatttgataccttggtaactaaaaatattgtgttagtttatggaaaaatcaagagctgattagacaattcacttaagctttaggtctatatttatttggatagattaataccatattcaggtaggttctccaaatatactgttttattaactattgtttattcattttcaaagactcagcttatagtgtcagactaatttattcacagccgtaactagtggagtatgaggcagaaaagcaggctgggaggagtgctgattttcaggacctgaagggtggaaaatatactgttgatatatcgttatgattgctttatcgaatgtattgtttgatggctactcctcggcttctctctgatccagtaataaaccttataaaacccaggagataaccaaaatgtagctctatacaatcatctttcatagttgttatggcaggtgaagttgttagggacatttgaatgttatttttcggcttcagatcattggaaactaggatgacttaatgttcctctattggtctgtagagattgtagtagcaaagttcaaactactgatactaatttttgtcacagctatttttaacctccataagtgaaatgctgaaaagttataaagcaggaacagtgattatttcaatgatgactgcttcttagtattggaaatattttattgacaaactatccaatccaaagttatcaaacaaattagtagaacatttgaaaaataaaaaacacttcagttaatgataacccttgttaagaatcaatagaaataagacatgtgagtaatggcaaatttttcgttttaaagttggccatttaaaagggaaatactagacatggtaatttggttattatactttaggttgggagtatgaagaattacctttgtatctggctataagtctgccacctctcagcaaatttgaaataattgagcttacagattctcacctttctaagaagtttgcctaatttaggcacttttttcaccccagaattcactcttcttggaactgaaagaatatggtggggtttataattccaaaacatttcccctggaaacacaggaaacggaaaagaaggaaaagacgttaaagctgactaggtgggttagcttcaagtgctggttctcttttcctgtgtcttcacttcataaaatcaggagttgatcatgcttttaatgtaattattttctggtcaagaaaaataccatatagaaaactttagactcctccagtgatgtagtttgcaaaataaaaatgcgttctttgaccattatgaaagtaattttatacagatttttcttcattttcttaagttacatatagaagataaaatagaaaaaaattgtgagtcgatacattctttttgggtaaaagggagataataccttattaaaggaaaaatgcgtaatgacttcattcctccagattgctttaaagagccttttgttctcatatgttcttttaattctaagaggatgcaatcattatttttaacattcctctacctcccacttgtagtaagatatttgaattgtatgtatttgtttcaggattttgtcagagatccagtttctcagcatctttaccaaaatgccactattttttattttggccgttaaataggtatatggtggtatctcataatggtcttaatttacatttcccaaatggctcagattgagcatcctttcatgtgcttaatggccatctgaatatcccattcggtaaaatgtctttttatgtttttttgcccattttctaatgggattatttgatttttttttttttttactgttgagttctgagagtttattacatattctgagtactagtctattgtcagataaatgttttgcaggctttttttttttacagtctgtaagttttaaattttgatgatatagctaatttgtcttttttgttgttgtttttatgaatcatgcttttgatgtcacatctaagaacacttcaccatacctaggtccctaagattttctagtatgttttcttctaaaagttagtgttttaggttttacatttaaatctgagtcagtgagtaattttttgcataaggtgtgaggtttaggttgaggttcatttttcattttgtgtatggatttctgattggttcagcactgtttgttgaaaaggccatcctttctctgttgaattgtttttgtacctttgttaaaaatcagttggctgtacttgtgtggtaattctgttttgttccagtgatctcggtgtctctacttctgtcgttaccaacagtcttgataaatgtaggtacataatcataaaatctgggagagggattcccagtttatttttctttgggagtgggagtatagttactcccactttagtctttttcaaaattgtttttgctacaatgattcctttgcctttccatattaattttttattttttttaaatttgaggcagagcctcgctctatcacccaagctggagtgcagtggcacgatcttggttcactgaagctccgcctcctgggttcaagtgattctcctgccttagcctactgagtagctgggattacaaacatgcatcaccacgcctggctaatttttctatttttagtagagatggggtttcgccaagttggccaggctggtcttgagctcctggcctcaagtgttctgcctgcctaggcctcccaaaattctgggattacaggcgtgagtcactgcgcctggccttccatattaattttagaataaaattatctaaaataaaattatctacaaaaaagtactgggattttgatagaaattacattaaacctgtatgcctatttggagagaattgacgtgtttactagtttgaatgttccagtccgtgaacatagttatgtctctccatttatttagattttcttcaatttttttatcagcattttgtagtttttagcatagaagttctctatgtgttttgttagatttacacctaagtattttgttttttgtttagcagttgcaaattatactgtattttgtttgactcctcatatttattcctagcatacacaaataaaactgatttttgtatgttgatgtattgggtgacctcgctgaacttacttattagttctaggagtgcttttgtagattccttgggattttctttgtaaaattatttcatctgcaaaaatgtttaatttattcctgtatgctatttctttctttttctgttttttctttctttctttccgttttttttttttttttttttgaggcagtcttattctctcacccaggctggagtgcagtggcgcaatcttggctcactgcaacctccgcctcctgggttcaagcgattctccttcctcagtctcccaagtagctgggactacaacaggcgcccgccaccacacccagctaattttttgtatttttaggagagacggggtttcaccctgttagccaggatggtctcgatctcttgaccttgtaatccgcctgccttagcctcccaaagtgctgggattaccggccaccgtgcccggcgctcctcctttttttaacctcacagcataggctaggacttgcagcattatgttgcatatgagtggtgagagcagatacccttccttgccttattcctggttataggggaaagcattcaggctttaaccattaagtatgatgttagctgtggatttttttgtagatgctttttattatgttgaagaagatccctttatttctagttttctaagaattttttattatgaatgggtggtgaattttgtcaaatgctttcctgcattgattaaaaaggtcatgtgatttttctcccttagtctgttaataaggtggattatattgattgattgttaaaatattgggtgaaccttgttgcacctttgaaataaaacccccttggtacatggtatgtaattctttttacatattgctgaattctggtttcttgtattttattaagggtttttgtgtctgtattcatgaggaatattggtttgtagttttctttatgtttttgtctgttttttccatcaggataaaattggctacatggaatgatttgagaagtatccttttctattctgctttctggaagagatcatctagaaattgtgttactttttctttaaatgttaggtagattttcccaggaaaccctctgtgtttgaatattctgttgggggagttttagaattacgaatttgatttttaaaatagttatagggctgtttaaattttctgtttcatattggctgaattttggcagtttgtgcctttcatggaattggttctttttatgtcaaattgatgtataagttgtttgtagtattaccatttcaatggttgcaaagtctatgtggtatcctctgtttcattcctaatgttagcaatttgtgttttctgtttctttgttagccttgctagaggtttattatgtttattgatcctttaaagaactagcttttttcccctattgattttctctatttttattttctttaatttcattgatttatgttctttgttatttccttccttctgtttgctatgagttcatttagctcattgtctaggttcttgaggagggaggttagattactgatttgagacatttcctgttttctattgtatgcatatattgctgtagatttctgtcagcactgcttaaatcatatctcacaaattttgatatgttgtgttttcatttttattcaatcagtgtatcttgattttccttaagatttcctctttgtccagtggataacgtagacttgtttagtttctacgtgtttggagatttttctgttgtctttctgttgttgatttctggtttgattccattgttctcagaatacattttgcataatttcaattatttaaatatttagatttgtttcttagcccaggatatggtctctcttgaaatgttcagtggatgtttaaaaataattaatattctgttgtctttgctagagtgttctataaatgttcatgattagatcctattggttgttaagttctcttatattcttgctaattttcctagttgtatcaattattgagaaaggggagttgagctctcctataattgtgggatttatctttttttatttcagtttgacagttttgcttcatgtatttttgcagctctgttggttggtacatccacatttaggattggtaatgtctcggtggcttgaccattttatcattatgtaatgcctaatctgttcttatgaattttatttgttcccaagtctactttatctgatactaatataggtactcttcttcctattgattaatgtttccatgatacatctctttccatccttgtactttctacctgcctgtattgttatatgtgaggagagtttctggaagacagcattatagctgggccatgtaccccatccccacccccactccgccaatcactgtcattttagtttcttagagacagggtttctgtctgtctctgacactggggtacagtggcatgatcatagctcactgtaaccttgaactcctgggctcaagggatcctcctacctcagcctcctgagtagctaggactacaggtgcatgccaccatgctcagctaattttttttttttaattatactttaagttctagggtacatgtgcacaacgtgcaagtttgttacataggtatacatgtgccatgtttgtttgctgcacccattaactcatcatttacattaggtatttctcctaataccatccctctccctgccctccacccaacgacaggcccccgtgtgtgatgttccccgccctgtgtccaagtgttctcattgttcatttcccacctgtgagtgagaacatgcagtgttttgttttctctccttgcgatagtttgctcagaatgatgatttccagtttcatccatgtccctgcaaaggacgtgaactcatccttttttatggctgcatagtattccatggtgtatatgtgccacattttcttaatctagtctatcatagatgaacatttgggttggttccaagtttttgctattgtgaatagtgctgcaacaaacatacacgtgtatgtgtctttatagcagaatgatttataatcctttgggcatatacccagtaatgggatctttgggtcaaatggtatttctagttctagatccttgaggaatcatcatactgtcttccacaatggttgaactagtttacactcccaccaacagtgtaaaagtgttctatttctccacatcctctccagcatctgttgtttcctgactttttaatgatcgccattctaactggcatgagatggtatctcattgtggttttgatttgcattctggtcatctctgatgaccagtgatgatgagcattttttcatgtgtctgttggctgcataaatgtctttttttgagaagtgtctgttcatatcctttgcccactttttgatggggttgtttgtttttttcttataaatttgtttaagttctttgtagattctggatattagcccttcgtagatggatagattgcaaaaattttctcctgttttgtatgttgcctgttcactctgatggtagtttcttttgctgtgcagaagttctttagtttaatcagatctcatttgtctattttgttttgtttgtttttgccattgcttttggtgttttagttatgaagtccttgcccatgcctatgtcctgaatggtattgcctaggttttcttctagggtttttatggttttaggtctaacatttaagtctttaatccatcttgaattaatttttgtataaggtgtaaggaagggatccagtttcagctttctacatatggctagccagttttcccagcaccatttattaaatagggccatttcttgtttttgtcaggtttgtcaaagatcagatggttgtagatgtgtggtgatatttctgaggcctctgttctgttccattggtctatctctctgttctgataccagtaccatgctgttttggttactgtagccttgtagtatagtttgaagtcagatagtgtgatgcctccagctttgttctttttgcttaggattgtcttggcaacgtgggctcttttttgrttctatatgaacttcaaagtagttttttccagttctgcaaagaaaatcattgttagcttgatggggatggcattgaatctataaattaccttgggcagtatggccattttcacgatactccttcttcctatccatgagcatggaatgttcttccatttgtttgtgtcctcttttaccccagaatttcatattcagccaaactaagcttcataagtgaaggagaaataaaattctttacagacaagcaaatgctgagagattttgtcaccaccaggcctggcttacaagagctcccgaaggaagcactaaacatggaaaggaacaactggtacccgccactgtaaaaacatgccaaattgtaaagaccatcgatgctaggaagaaactgcatcaactaatgggcaaaataaccagctaacatcataacgatgggatcaaattcacatataacaatattaaccttaaatgtaaattggctaaatgccccaattaaaagacagactagcaaattggataaagagtcaagacccatcagtgtgctgtattcaggagacccatctcacgtgcagagacacacataggctcaaaataaagggatggaggaatatctaacaagcaaatggaaagcaaaaaaaagcaggggttgcaatcccagtctctgataaaacagagtttaaaccaataaagatcaaaagagacaaagacggccattacataatggtaaagggatcaattcaacaagaagagctaactatcctaaatatatatgcacccaatacaggagcaccsagattcataaaacaagtccttagagacctgcaaagagacttagactcccacacaataataatggaagactttaacaccctactgtcaacattagacagatcagcgaggcagaaggttagaaagaatatccaggattgaactcagcgctgcaccaagcggacctaatagacatctacagaactctccaccccaaatcagcagaatatacattcttctcagcaccacatcacacaccacatccaaaattgaccacatagttggaagtaaagcactcctcagcaaatgtaaaagaacagaaatcacaacaaactgtctctcagaccacaatgcaatcaaattagaactcaggattaagaaactcacacaaaaccacacaactacatggaaactgaacaacctgcttctgaatgactacggggtaaataacaaaattaaggtagaaataaagatgttatttgaaaccaatgagaacaaagacacaacgtaccagaatctctgggacaacttaaagcagtgcgtagaggaaaatttatagcactaaatgcccacaagagaaagcaggaaagatctaaaatcgacaccctaacattacaatgaaaagaactagagaagcaagagcaaacacattcaaaagctagcagaaggcaagaaataactaagatcagagcagaactgaaggagatagagacgcaaaaaacccttcaaaaaatcaatgaatccagaagctggttttttgaaaagatcaacaaattgatagactgctagccagactaataaagaagaaaagagggaagaatcgaatagacgcaataaaaaatcataaaggagatatcaccacccatcccacagaaatacaaactaccatcagagtactataaacacctctacgcaaataaactagaaaatctagaagaaatggataaattcctgggcacatacaccctcccaagactaaaccaggaagaagttgaatctctgaatagaccaataacaggctctgaaattcaggcaataattaatagcctaccgaccaaaaaaagtccaggaccagacggattcatagccgaattctacaagagttacaaagcggagctcgtaccattccttctgaaactattccratcaatagaaaaagagagaatcctccctaactcattttatgaggccagcatcatcctgataccaaagcctggcagagacacaacaaaaaaagagaattttagaccaatatccctgatgaacatcgatgcaaaaatcctcaataaaatactggcaaactgaatctaggagcatatcagaaagcttatcccccaagatcaagtcggcttcatccctgggatgcaaggctggttcagcatacacaaatcaataaacgtaatccatcagctaaacagaagcaatgacaaaaaccacatgattatctcaatagatgcagaaaaggcctttgacaaaattcaacagcctttcatgctaaaaactttcaataaactaggtattgatggaacgtatctcaaaataataagagctatttatgacaaacccacagccaatatcatactgaatgggcaaaagctggaagcatttcctttgaaaactggcacaagacagggatgccctctctcaaccactcctattcaacatagtgttggaagttctggccagggcagtcaggcaagagaaagaaataaagggtattcagttaggaaaagaggaagtcaaattgtccctgtttgcagatgacatgattgtatatatagaaaaccccatcatctcagcccaaaatctccttaagctgataagcaacttcagcaaagtcccaggatacaaaatcaatgtgcaaaaatcacaagcattcctatacaccaataacagacagagagccaaatcatgagtgaactcccattcacaattgctacaaagagaataaaatacctaggaatccaacttacaagggatgtgaaggacctgttcaaggagaactacaaaccactgctcaacgatgtaaaagaggcccagctaatttttaaaacattcttttttgtagaaacagggcctccctgtgttttccaggctggtctcaaactcttgtcctgaagcaatcctcccacctcccaaatcgttgggattacagtcatgagccacttcacccagcccaatcactgtcttttaattgtggaattttacttggcaagcgtctccttgtcaacatagtaagacttttttcccctacattatttttatatttatataacaatgacttttactttgagctttaatcttttgaaatgaataatctgtgagagatcagctccaggtattatcactgatttgaaatactattttcattatattttgcttactcattgttcatactgcttactacttattgcttactcattcaaacatcccaaatactagtctttcttctagtttagtgtgtttcctttacctaattgtctttaagacagaagtgttaggtgttttaaagtttgaatccttaaatgcctgagtgttttaagagtttttttttctcctccatgaatgttaattttctaggtatataagtcagtgtttcaaagaattttctttcacaactttgaagctacagcttcattgtctttaaacatctagtatcgctgatatcactgtgatttctgttgttttataggccatctagtttttatctcttaggttaaaaattcagaagcaaagattggtcaccatttctattttgttttcttaggaataataacaataatactattaggttgaattttgaggatggttaaaatgaagggttgtttttttttttaaacttcttggtttccccaacaccttaagttttttaaaaaagggaagggcctgccaaaattaaataatttttcctcctgttgtcattctacagtgctttaaaatacttgcatcaatgagtaatatccaacttcctgaggcagcataatcttcccgccccttttggctactccaaagtttacatattttgaattggaatatgacttccttaaaaatttatgtattaaatcttctggatggagcagttaaaaaaaaaacctctttttcaaagcagtggtaactttagtttgatgatgaactatatataacttatacctacaattcttattctggtgtttcaaaatttataactgttttccacctaagttttaattgagaaatatataataactttgccttttaaactacagcttatattttacgaaccttttatttagtgaatttttttttttttaacttagactttgtgtggacagtaatgacctcacgtttccgattgcctgctggcagaacctacaatgtacgagcatcagagttggcccgagacagacagcatactgaagtggtttgcaacatccttcttctggataacactgtacaagctttcaaagtcaatgtaagtattttgtgtcttttaaaaaataatctctggctataagtctgaatttagacatatatgtaaactaggattattaaattatagtacagtttgaaaagtcttattcaagtaaaaaagtctttttggtgcaggattgtattagatgcatgctctcattcaaactgggtctttttaaaaagtgttgctcactggatgttgttgagaaaccaacagtgtgcattttgattagtagagcagatccatagtatgtgtgtggttttcataaatgtgcttgagggtgcctgaaaagaatttgttcttctaaataatttatacatattcatggtaattttacttgtactgtctgtgagtaaaatttttgccaaacaaaaataaatgacagccctgatcttatctatcgtctgaaatatttatttaacaaatatttgttcatcctatttgtgtctagctttgtttgctcatcgttatttgtgagttttacccatgtggtgtgttaacagtagttagttcattgttactgctctgtagtacccttttgtatgaatatactatagtttacttatcctttcatttaccatttacttgtccagtttattgttggtatatatttggatttgtttccactttgggctcttacaaataatactgctgtgaacattcttgtacatatcttgatacatataaaagtgtattctccctttttatttaaaaacttttcaacctatatggaaaaggtgaaataatattataatgaatacccttataccctttacctaaattgacccagtgttaacattttgcacatttactttatgtttccttctctctacatgacttttttttcctgaaccttttgaaagtaagtacttcagtattccgagaatctcataattaccacatccctaaatttaactttatgaaaataataatatatgcagtctgtattcaaactggaattcttattcttcaggatgttttggtatttccaaatttttcaggatgttttctgctgtattacttgggtatttccacactttgaaatctttaagtaatataaaatatgaatcttacaccggggccagtcgggggattaggggctgggggagggatagcattaggagaaatacccaatgtaaatgatgagttgatgggtgcagccaaccaacatggcacatgtatacctaggtatcaaacctgcatgttgtgcacatgtaccctagaacttaaagtataataatacaaaaaatgaatctttcttatttaccagtttaagcttaaaattttctgtgtattactatatagcaggattatgaatttatctcaaattccaagctatttcacattgaaaaaggggctgcagagtagtgaatattacatcattatcattaaaaataccttcaacattatctaaaatacccaacagatttaggatttagtgtgcttttctaaaaagctaaacttttgatttcttttgtattctatcatctgttaatatatagttggaatataggttgccaaacagagataacataaagtgaagagaattctacttcgtacaaatttctatttaatagaaactctcrtgtattagacagttgatgtaagaaaataagccttttttcctattattcacgtgttagaattcttttttggaaaaggcataaatttaataacttttgtcttagcttaaatttagctactatttagttttcattttaactatagttttgaatgtatttcaaaatattgtaaaaaggtttggtatgtttctcagctagcataattttctgttgagcactttagttaacagtagtatgctgtatttttcagtgtagtaatcaatgtgctgtctagttactcttttagaaagacatatatattaatgtacttttatatgtttatattttaaaaatatatattacatatatttagctggcagtttcaatagacctggatatattacctagaatggtaagtaagcttaccattctgtggtgctagaaactttctctaccattatctcaggtcatcaaaaaacttaagaggaacaatatttatgaaaaattgctggttatgtggtatatttattcctctgggtatttgaacccaagccattcaaaccaaaagagttgctttgtacttttaggtagattatttatcttttaatccatgtgaatagatctccagttatgtactttacaacctgtggagtggtatgtggcagcctgcaaactaattgggggtttgaaagttttggtgtttgttttcttgtgtccacttagtaccattaagtctcagaaatcctttgtgggcagctgccaggttcaccagcatttctctgttcaccaagaaggagaactactcagtttcctttggagactaccaggcattggagtcattgcttttcatgaaagatttttgcaccacaggtaaaatattcatgttgccaaagcctgctttgtttcatctggtagttatctcatcaaagccgtttctgtattttctgagggaaatttttgtaatgaaggagttgatgtaacttcactagatcttgctttttctctgctgtggacataggaatgataagcctgttatcactgggtttgtgttggcttgtgttgtttcaatgtcargtcctattttcactgtggctttggtataaccatttatttactgtggccaacctatggagtgtattgtccctctcatgccgtgaattcattgtcactaaatgaattcatgatatgagaattcatctcaccaaatatgtttgcattaacaactcactaaatatgtttgcattaaatactttaaaatgcatagtgtccgtactacatggattgatgtcttcaatctatgaggatttttacccctaatttttgacttgacttttactttggtgcagctgattaacgttagcctgtatgatgaacaaggaagggctgggaggaccagcctattttagttactgtgactgcgtragaaattaccctaaaacttagtggcataaaataaccatgtattgtcctcagggattccgtgagtcagagattcacacacacacacaaaaggcttaattttgctccattatgtatcagtcctcggctggaagactcaaaggctggaggctagaatcattcgaaggcttattcactcacatggctgttacctgaaaccttagctgaggctgaggcacctatatatgacctcttgatatcctggacttcttcatagcacagtggctggtttctttctttcttttttttttttgagacggagtttcgctgttgttgcccaggctggagtacaatggcacgatctcggctcaccgcaacctccgtctcccaggttcgagcgattctcctgcctcagcctccctagtagctgggattacaggcatgtgccaccatgcctggttaattttgtgtttttagtagagacagggtttcttcatgttggtcaggctggtcttgaactcccgacctcaggtgatccacctgccttggcctcccaaagtgctaggattacaggcatgagccactgtgcccggtcacagtggctggtttctaagggtgagcatctttagagagagagccacactgtagctatattgcctttccagtctggcctgggaagccatgtaatgttactttttccatgttctatttgtcaaggttgtcacagagttaagtgaaaggaaatagactgcatcttgataaaaagtggaggatcatcatgtgggatcagaaatgttgccgtggacttactgggaaaatacagtctgccaatatggcatcctgtggaggtgtccattttgcctcttcctcatcacttaactgtacccatcttcctactttcatagatacccagaaatttcatcccagaactgtctcctttgcttctcaagggatagctaccatatttaaggagtcagagatgatgaaagacaggtttaatttttattatttgctctttgtgtttattatttaaattatttacccaggtgtgccatacttaaaaaaaaatgtatatgtgtgtgtatgtgtgacacacacacatctatcttttaaatttgatctatatgttttattttataagtgtatgtatgtacatgtaattggcgtattcatttacacaattttcaaaaccatatagttttataggtcttgagtttgtagagcctcactgccagtcttcttagagctgagtgagaggaagggattggagaggacttacctattcactatgtagattttttcttattatgcaggctctgtctgtacaatacaggcagtataatctgcctgtacaattagtacagtacaaattaatcagctgcacatgatgctcctgattccagagtccttctggttcattttcttcagagagtaaatctccagttcctatggtgattggctgtaggggaggggaagtgagagaagtcatgtaggggctgttacttgtatagactctcaacattttttcagtcctgaccctgccttctctttttgaaagataatttgtacccctatttctagagtttgtggggtaaatgaacttgctcctaggcctttctcacactgttaactttttctgtcacttaaggtgaccactgaagttgcttttcattttccaaaattttcttagggtagtcttttctttcattactaactatacctacactgttattttagtgtgccttgagcaaacatttatgttcagccttcctcatttttaaccttgacatctctcaagttgattgtcaacagtgcctaccttgaaggagaatttattaaataccaaactttaaaaaataaaatcagatgttaaaatggaatttatctttagtacaaaaagacatgataattttgtcagcttttatagtatatgaaaagtccaatattatagtgtatgatagatttttaaagcttttatctattttgaaatcctttttttctaggctataatcatattaaacactagaaaattattttatcagtcaaatttagagttgagcacaattaaggtgaccatatttcttgttttattatttcaccttgctgtggtttcatcaggcatatagttcttgggtctcatattatatttgccatgcataagtctgttactgaaaatgacytttacttctattgaaagattcttgggcagttattcaatgatgattttatacatctttattttgaaggcttactctgtgactatacacaagttgttcttgtctgtgtttcatattctttctttgttaagagagaataatatctacctgacattaggatgcttagcattaaacaagaatgttggtgaagtgcctgtttatgtatctgactagtattatgcatttagaaaggttgactttcctctcttgcttgtaatccaattgatccattctcttgttccagaaatgttttcttggaaatatgttatttttgaaattccacaaaatagcaatttactaattgtttgatgtgcatatataacgttttcatccatgtattggtgtacatatactgcttgcaaaacccaatttgtttactggcagtattgattaaaaatatatatacacagaaattttaaaatgccagttatttgtaaaaagtaaagagaaaacaattgtcaagtgttacttttttgagaattaggttttttttatcccacagaaaattgtagttattcatgtacattatttaataattattgaatacctaacatacattatggagtataattcaaaaatagttggcagccattaaattatgagagagatgttggattctatttagaaagattttcagcttggttttccttctctggaaattacatgtagattttattgttttttgtaatatgtataatgcacaaaacagtgcagtacacagatcttcattatataactcaatgaattattttatgtatacacctgtgcagtaccaccagattaaggcattgaatatttctctcaataaaaaggattcccttgtgctcctctaagtatagtcacgcatcacttaacaacaggcatacatcctgagaaatgtgtcgttaggtgatttcatcattgtgttgagcatcatagagtgtactcacatgtagatggtataacctattacacacctaggatatatggtatggcctgttgctcctaggctacaaacctgaacagcgtgttagtgaactggctattataacatgatggtatttgtatatctaaatgtatctaaacatagaaaaggtatggtaaagatacagtattaaaatcttagttaggcacagcggtaggcacttatagtcccagttacttaggaggctgcggtggaaggattgtttgaacccaggagtttgagttcagcctggacagcatagcaagaccttgtctctgaaaaataaatcaaaaatcaaaaattaaaaatctataatctatggcagtggtccccgacctttttggcaccaggaaccggtttcatggaagacaatttttcatcggacttgggtgtggggcaatggtttcagggtgattcaagcacattacatttattgtgtatttaatttctgttattactgcattgtaacatatcatgaaataattatacagctcaccataatgtagagtcagtgggagccctgagcttgttttcctgcaactatatggtcccatctgggggtgatggtagacagtgacacccaaagtgtgttgcttatgtccagtctactccataatctcattttggttgctgtcacttcagaaaacactgcttcataaagataggatgttggaaatggaagcaggcttttcagtgctgttgtagcaatctcaggatattccaccttgactttaatctggaatttacggagatgtgaagttgtctcaaacatacttttataaggccaccatcatttgcaatctcaagcagttgattctcttctagcacggacaaagttgattcacctggtttattcacaaatgggtcacagatccatgtaatgctcgaattcttttgaaagctgagacctatctcagaagttgccatagagctgtgtgaacagacctgagttaagggaatgcatttgtcaacttttgcttttgttgcaattgcttttgttgtcttcgtcatgaaatctttgcccatgcctgtgtcctgaatggtattgcctaggttgtcttccagggtttttatacttttggcttttacatttaagtctttaattcatcttgagttaatttttgtatatggcttaaggaaggggtccagtttcagccttatgcatatggctagccagttatgccagcaccatttattgaatacagaatcctttccccattgcttttttttttttttaatactttaatttctgggatatatgtgcccaacttttctctctggctgcccttaacatattttccttcatttcagccttggtgaatctgaccattatgtgtcttggggttgctcttctcaacagttgtaggtgtgtagcattatttctgggctttctgttctgttccattggtttatatgtctgtttttgtactagtaccgtactgtttttggttactgtagccctgtagtatagtttgaagtcaggtagtgtgatscctccagatttgttctttttgcttaggattgccttggctatttgggctcttcttcggcttcatatgaattttaaaatagttttctctagttctttgaagaatgtcaatggtagtttaatagagatagcattgaatctataaattgctctgggtagtatgaccatgttaacgatattgattcttcctatccatgagcatggaatgtttttccatttgttagtgtcctctatgatgtctttgagccgtcgtttgtagttttccttgcagagatctttaacttgcctagttgtgttcctagacattttattctttttgtggcggttgtgaatgggagttcattcctgatttggctcttggcttgactcttgttggtgtataggaatgcttgtgatttttgcacgttgattttgttycctgagactttgctgaagttgtttatcagcttaagaagcttgagggctgagactatggggttttctagatataggatcatgtcaactgcaaacagggttagtttgacttcctctcttcctatttggataccatttttttctttcccttgcctgattgccctggttagaacttccaatactatgttgaataggagtggtaagctagagcctccttgtctacacatatatttacatcacccctaaatctgtttttattgactgtcttgtctcttgattgtcagtcactttcccctgctttacacatctgctaatttgtcgttgtatattgaacatagtgagtgaaatgtagagtaatggacaacatactatggccatgggccaaatccagccttctggctgttattgcatggcctatagctaagaatggttttttacatttttaaaggttattgtttttgctatgttgcccaggctggtcttgaactcctggcctcaagcaatcctcctacctcagtctcccagagcactgagattacagctatgagccaccatgcccagcctctgtttgtttttaaagagaatgtacaacagagactatgtgtcctcaaagcctaaaaatatttgctttctggccctttataggaaaggtttggactcttatttgttggagctctggattattaagtccctctaaataatagtgaattatattatggcaggcagttaaatagccagcagattactttgatcttatggagattagttttaagctttttaagataggtctgtttcacctttgttcttactcctaggacagagtttgtctagggtctcaactaagtgactaaggtgttcatcaagatatctctcctccgagcctggaccacaccttctcagaactgcacaacctctgaaatctctgtttagttaacagctattttctcctagaaattctaaccctgtgtacgcacatcctatgaagcaagtaaggaccaaagggcaatttcatgtgtatttttatagcttttttcctttcactttctcagttctaataacctatccccaaaaccctggcaccatagcaaccccaaacattaattttagttttcttatcctagcaggactaccactgtctgcttgggctttgtttctccacagtatggtttggcaggtgcccccaaggagaaagccagcgtgagacttgattcatctgcccttttctcccaaagatcatagccctgtgttggttggtatctgttgcttgtaaatgttacatacatgttttatttggtctatatttggtccggtttttatagatgcttgtaacaggagaatattgcaataccagctactctatatgatcagaaccccaaatcctcattattttaaaatatgaaaacgtatctcattatataatcagtgaattttgatttgaaacatttaacatgttacttgctgtattttctgattcattgtttacttgacccagatagttgagccaaataggacttagatctcagttaataatagtaaatatattcatcttataaaatcgaaatggcccttgctttccaaagatggaaccctaaacagctgggctaatggatttgatattttagaagatttcatctgcaacatttgagatgcaccttcacacaagttgatctgggcatagccgttgtcagagaagcttctgtccttggctgataaattattaatgcttaattatttaacttttttgtttgtttacatatctagcatcttaaaaatatttcataaatattttagcctatgccctttttttctctactgtattcacagtgtgtaaggaatacttggctgttgttttttttgttttgtttagagacagtgtcttgctctatcttccaggatggaatgtggtagtaccaccatagtttagtgcaggcttgaactcctgggctcaagggaatcctcccacctcaacttcccaagtagctgagactacgggcatgcgccaccatgaccacctaatttaaaaaattctttagagacgaagtctcactatgttgttcaggctggtctctaactcctggtctcaagtgatcctcccacctcgacctcccacactgctggaattataggcatgagccgcggtgcctggcctatttggctcttaaatgtgctgccttttgacttatttcatattcttgaagggaataatcatttaaatatttttgccatcatagtgctttgtatgtctctcctgaagctcatttaatagcatgtccatctgtgatagatgtgatctgttctttgggaaaggatgtatgacatagctctgttttcttcctagtacttgcataaagaaactttcagtattcattggaatggagttggtgagcatagaaagagttatagttaycacataaggaagctacatgactcactctctgctgcctcactgcttcccctgggtaattgtctgtcctgattcccatgtggattcaagaatcccccaaggaagccctggtgggaagacctggaaggtctggctctttgcccagatgctggtgttggtgttgatgttgatggatgtgctctgctgatcataatactctagagaagaaattgcrtcttatctttgaacccaccattcataatgtttattcctaactcaaattggatagttcagtatctgtatatcaggaatttggtttcatattaaaggtaatatccatttatttgagtctttgcccttattatttaacattcttttcaataattagacttaataattatgcttccaaatgtttaaaataaagctggacttgcacatatatatatgtatactttacatatatatatacacagctttacatacacacakgtgtgtgtatgtaaagctggacttgcatgtgtatatgtatacacgtatacatgtatgcacacatagcaagatttacttttgaaaatatttatcctgaaactcctttatcctcttggtaattcagtatagtagctcttcctcttaaatattattcctagtgacattttatgactctgtttttccatttaccttttgaattctatccataattttttttttttttttttttgagacaaagtatcactctgtcaccaggctggagcagtggcgtgatctcggttcactgcaacctccgcctcccaggttcaagtgattcttctgcctcagcctcccaagtagctgggactacaggcgcctgccaccatgcccagctaatttttatatttttagtagagatgaggtttcaccatgttggccaggatggtttcaatctcttgacctcgtgatctgcccagctgggcctcccagagtgctgagattacaggtgtgagccaccgcctctggcctctataatttttagtgtatcagtttggtttccaccaagaaaagtgacagctgtactatgtgaggaattagtaatagtattatgacacttttttttttgaatgtgcagacatttccttttgatgattcatttgatttgtttatgataaacttcagagcatgtagttttggctttcttttgcaattatttaattttttcatgtaaaatctggatgttgataggcacttgatacattaaataggtacttaattttagcactaggttaatttacaactttggattcactgtattttttgacatcacttactttgaatcactgtgagatgactttcatttttcttcatcaagaatatcttgtgtgggatgtgtgctagttctttatatccttcgtttttgaaaatgtcttaagttttaccctagacttaattgatagtttgggtagagaattttagattggaaataatttctcagagttttgaaaatattgccttctattaatattgctgatgaggagtctgatactatttcaattcctgattgtttatgtatgacgtattgtttgtagacatttaaaacgtgttttccttttcacttttttttttgcttaaatttcatgtagattgtgcatgaaatccaccagcttgcaatatgacactcttttgctttccactatgcttgatgtccctagatttgaagccacttcagtttatcttagaataattcaggggaggtatgggattgagaactgagggacacaactgttccctacatggatcttcaaccttcctttcccatttttagcctcatgccttatcttgctgtttctcacacttatcctccaatgtttgagcctttctgtatatttgatttgcttcctgttgatatctttctctgcaggtatttggtgtttagctctgctgtctcttccacatgctttctatcttccaaagtgtattagtatcccctcccccccccttttttttttttgagatggattctcattctgttgcccaggctggagtgcagtggcgtgatctcagctcactgcaacctccaccttgcgggttcaagtgattctcctgcctcagcctcccaagtagctgggactacaggcatgtgccaccatgcccagctgatttttatatttttagtagagacggggtttcactatgttggtcaggttggtctcgatctcctcacctcgtgatccacctgcctcggcctcccaaagtgctgggatttcaggcgtgagccaccgcacccggcctgtgtgttagtatctctttagccgatatcttctctccttttgttgttcttgtggtttttatgtttttagtacattccttctttttttttccccctcaaattagtgggctttcaggaatgagtaaaggtaaacacattttcagtccatcacatttaactgtaggtttaagcatttttgaacagtaagttattaattctttttcctttagaagactaacaacagtggatggtggtttgccatgacatttgaagtcacattcttgtattttaattaaaatcaagtttttatttttgaagtttgcctctccccmcatttctattttacatgtgttttggggactataacaagagtcaccttaaccagtttgtaatcaagcacctaaatattgcaatcttatctcaacctttattcttttactgtaactgcttcctcagtgattattatctagttaagaaattcatcagtttatcaaggctcattttgtttgacctctaggagctttaaaaactggtactgctccttatttcaaggaaagctctcttctctgtgatcacattctggatatacttcatctgtttcttttttttttttttttggagacgcagtctcgctctgtcgcccaggctagagtgcagtggctcgatctccgctcactgcaagctccgcctcccggattcacgccattctcctgtctcagcctcccgagtagctgggactccaggtgcccgccaccacgcccggctaatttttgtatttttagcagagatggggtttcaccatattagccaggatggtctccatctcctgacctcgtgatccacccgcctcggcctcctaaagtgctgggattacaggcgtgagccaccgtgcccagcccatctgtttcttacatatcagtattccttgaggatttactattgtcttttgtatcttttcactttcaattatttcgtggttgctgaagattgtggtatctgttatctctagtttggatatctttccacaactcaaattctgtgtttgctgaagatttcagtggtggttttaaaatcttcgaaatatttcttactgagagagagaggctgtattccctttacttgaaccttggtgagcctttatgagtgccgttttcttccaatagaatctgttgaaagagatgttgcatgacttccctcgctagcttagaaaagacccttcagcttctgctattgttttatggtaaactcactctcgaagaacttttagctgctctgtaagaagtctggctcccctgaggccaccatgtggagactctgtggaaagacaacatgctataactatatctttttgatatgttgtcttttcatattcatttagttcagaatattttccaaattcccgctagacttcctgtttcccccaggcattatttatatgtatgtcgtttagttttcaaatagttgaggattttccatatatctttcgcttaatgatttctatttcaattctgttatggctagagaacatactttgtatgatttcagttcttttaaatttgataaggtttgttttaagggccagaatatgacatatcttggtgaataatccatgtgcacttaaaaaggatgtctgttctactctttttgggggggaggcagggcggtggaaagggctagaaatatcagttaggttaagttggttagtagtatttttgtttttatattttaaaaaaattgagacattctgtgttgctcaggttggtctccaactcctgggcttaaacagccctcccacctcaggctcccaggtagcagggattacaggcacacggtagtgtttttatatctttgctgcttttcttttaactttgttctatcaattatcgagagagtagcattgaagtcttcaagtataattgtgcatttatctatttctttcagttatataatttttatcttttgtattttggagccctgttgttagatacccatttgggactgtgattttctttttggtgacatgactcctttattattatgtaaggagttgaatataaacatttttttctttgagatagagtctcgctatgtctgccaggctggagtgcagtggtgtgatctcggctcactgcagcctctgcctcccaggttcaagcacttctcctgcctcagcctcctgagtagctgggattacaggcacgtgccaccacgcccagctaatttttgcatttttagtagagacagggtttcaccatgttggccaggctggtctcaatttcctgacctcaagtggtccgcctgccttggcctcccaaagtgctgggattacaggtatgagctactgtgcctggccaaatataaacatttttaagccatattaaaagaaagcaagtttttatttggtagttgtatagggtctttcctacgtatatacttatttctataaactgaataacttctcccagcttttcaacttgtggaaattatcttgtttttcaatgtgttgtccatctatcaacttgcttaactgagatatgctttagttttaatagttttgaataatatttagagtatgtttctgtagaaacagcttttttttatatatccagattaatattaccgtaattttactgggatatggccttccgtttagtcataggtattaatatctatgaagtaatagtaatgtgtgtttattatgtccacagagttttcacttttcacacttgtttcattcttgtcagtaacaatgtggtggggcagttacctcttttttacagatagaggaatcaaatccagggattttgcggcttgcccacagccacgtgctaagcagtagagcccaggctagaacccaagccttttttttttttttttttgagagggagtcttgctctgtagcccaggctggagtgcactggtgtgatctctgctcactacaaccttcacctcccaggttcaggcaattctcctgcctcagcctcccgagtagctaggattacagatgcctgccaccacgcctggctaatttttgtatttttagtagagacagggtttcaccatgttgggcaggttggtctcgaactcctgacctcaagagatccacccaccttggcctcccagagtgctaggattacaggtgtgagccaccacgctctgccaatccaagccctttgacccttcaaactggtgtttttatttcccacaacatctgctatcaattggatggtcttctgtttcatctctatatgtcattgtgaaaagtgacacaaatttaaaaattaaaagttatggccatgaaagactaaatagtctgtgatgctgtttttcttatcttttgttgaacataagaatataatagtaagttactaaggaaggtttattagaagttcagattggtgcttttccacctcaattttataggtctgtgttgggacccaggtgtgtatatattaaatgagtacacaagatagttctgatgcacatattctctggccttacagagaaacacagttgggagagatggagactgccttggcctcattaacattctataattagccatatatttatagaacacattttcctatttgttcattgcatataccaagtgagacagaatcaaaatccatgttaaaacctagctgcactatacttatttttctcctcactcatggagtaggattttctgtttagtgtttttctaaagctgaatgagaaaataatctgtacaaggatagtgtttagcaagagcttttgagcccttaccggaaactataaactctaaaggaactgtaaactctaaagcaatgattcctaaatggggcagactttgcatctccccaacccaatctccaagggacatttggcaacgtctgtagacattttttgttgtcacagttggatggtgggtgctactggcctctagtggctagaagccaaggatgctgctaaacttccttacaatacacagtacaatccctcccctatcccccacaatagagaatgatcctaatacaaaatattgacagtgtcaaagttggaaaactgtgctctaaggttaatattcaataacatatttttgatgagtaaatttttaaaataatcttaggtgagtgtggttgctcacgcttgtaatcccagtgctttgggaggccgagacagaaggattgcttgaggctaggagttcaagactagttagggcaacatagcaagaccccttctctacaaaaataaaaaataaaattagtcaggcatggtggcatgcacctgtagtcctaactgcttgggaggctgaagcagaaggattgcttgggccaggagttcgaggttacagtgaactgtgattgtgtccctgtactccaacctggacaacagagtgagaccctatctctaaaaataaaatagttttttagctgcagttttgatctaactaggcgtttcttcttcagaaagttgagtcaagtgattttgttttgtctgtagccgtacccctatacatacacatttgcttcctaagttgatagtgtgcgttgtgagaatacttgaaggttgcttgaagatactaatcacacaatggataaataggtataactgcatcaacaaaccgattcacaaatcttttatcaccctgttggggggaaatctatttgagtttaacctttaaaggaaggcaaagagggaaagtagaatgtttcaaagtactaactttgaagtagggagcatttaaaatataaagtaaaatttgcaagttttgtgtgcatcagcattacatgagagtctccactgagctgtttgtttacttgctaattttccttggtcaaacaaaaacttcttcccattctgaatgaatgtgaactagtattttattgaggattttggcagtgcaagtgggccagaaataactttttattacaagtatagcayatatacaataaagaacaaatcttaaatgtaagacaagaatttataaggtgaaatctcctgtgaaactatcactggatcgagataatagaatattaccagtacttcagatgcgtccgttgtgcttccttactgttactatttgtctcttgcctaaagtagtcaccattctgaggtctgtcattatagtctagttttgtttttgtttttgaatgttattgagttaaactatatgagattgtgtttttataggttgtaattataagcaatttcatatatgtagttcaatctaagtattttttccccattgctgtataatacttcatttatggtagctagtgtcaatagatggccccctacacgtacacttgatactcacaccgttgtaaagtccctcaccccttgaatcttggctggcttctaagtgactcacttttaaccctgacagtaaagttaccctttgtggctcccagtcataagaagccttgcagcttccaattgggtctccttagaacacacactcttggggacagtccattttagacttcagctgtcatgctgtgagatgttctcaccatatggagaagccatatgtcagtgctctggtcattagctccagctgacctcccagccaacagtcagcatcagttgccagccatatgagcaaggcatcttgtacgtcagattcaatcaaacttctgatgactttactatctgctgtctaactgtagccacaagtgagaaccgccatgtgggcccagtcaacccacagaaccatgagtaatactaatatttgtttggtttatgtttgtgtatttgtcttagcattgtggtgtatttgctgcatagcaacgtaaaatgcatcattgcatgaatataccaaaatttattcagtttactgttggtggacccttgatttgtacactttggggctactatgaatactgtagctctaaacagtcttacaatacatatattggtgaatatattcatatacttctgttgggcaattatctaagagtggaaatgctgggtcagcttcaggagacactgtgaaacagttttccaaagtggctataagtatgtatgctccagcagtttatgagactgcatttgtcccacatcttcaaaaataccttatattttaaaattttagccattctgttgcttatgttgtagaatttcattgtggttttaccttctgttagtgaattttcccaacatcttttcacttgcttttcccaacatcttttcactttcttttttacataagtagaaggctctacaataaaaagtataggatagtaaatgctaggtgataggaattttttatctccattataatcttttgggaccaccatagtatatgcagtttatcattgactgaaaagcagttaatgaggcacatgactgtactgaaagctttcccctgaaactggaaacaaggtaagaatgtccactatccaccaccctttattcattgtgttttttgggtttttcttcccatatatttgttgaccatttaggtttccaattcttatctcactctttctgtggtttgtcagtgatttttgtttctcatgctgaaatctcctactatgagggatttgtccatttcttcttttaggactgtcagctttttactttgtgtgttttttttgaacggtttaattgagatgtgattcacattaaagtggatgattcaccttttaaaagtgtatggttcaatgtttttatgtatcacagaattaatttttaaaaattgttgtaaaatacatataacgaaatttaccactttagccatttttatatatacaattcagtggtatcaattaagttcacaatgttgtataacctttcatgtctacttccaactttttattttgccaaacagaaactctagccatgtggcagttgttcccatgattctctcccctcagctcctgttaacctcgaatctttgtttctctatgaatttacctagtctagatattggttataagtagaatcatacaatatatgtcttattgtgtttggcttatttcacttagcttaatgttttcaaggaagcatgtagcatgtatcagaactttcacttttttttcattccagaataatgttttattgtatgggtataccacattttgtttactcattcatctgctgacaggcacttgggttgtttctaccttttacttatgtgattaatgttgcaaacattggcatacaagtatctgttcaagtctttgttttcaattctttggagtctatacctaggaggagcatttctggatcacgtgataattcagtgtttaacctttaagaaactgccaagctgttttacatggtgtctgcaccattttaaattcccaccagcaatgtaccagggtgcctatttatacatatcattaccaacactgttattttccaggttttttttttaatagctatcttagtaggtgtcaagtggttacattgtaaccattgtaggttacactatttttgagactgcagtcatttactgcataataatgtttcatgggccatagtcacaaaggtgtgtattcctatattttcctccaagacttttgtagttctagctattaattttaggtccaaacttcatttggagttaattttctatatggtatgaggtaggggtccaatttattcttttgtatgtggatatctttttgtctcagcaccatttgttgaaatgataattgatatggtttgaatctgtgtacccacccaaatctcatgtcagattgtaatccccagtgttggaggtggggcctggtgggaggtgattggatcataagggtggtttctcatgaatggcttagcaccatttctcttggtattgtcctcgcaatagtgagttctcatgatacctggtgtaacacctctgccctctctctctctctattttttgagacgagtctctgtcacccaggctggagtgcagtggcgcggtcttggctcagtgcagcctcagccttccaggttcaagcagttctcctgcctcagcctccagagtagctgagattataggcgcccgtcaccacgccccgctaattttttatttttagtagagacggggtttcaccatgttggccaagctggtctcgagctcctgacctcaagtgagccacctgcgttggcctcccaaagtgctacaggcatgagccaccgtgcctggctcaccctctctctcctgcacctgcttctgccacatgagacaccttgctctctctttgccttccactatgattgtaagtttcctgaggcctccccagaagccaagcagatgccagcatcatgcttcctgtacagcctgtggaactgtgagccaattaaacttcttttctttatagattacccagtcttgggtatttctttgtagcaatatgagaacagactaatacaataattcagcagtacccaaactttttggcaccagggactggtttcaaggaagacaatttttccatggatggggggtggcagtagggcgtggtttggggatgaaacagttctacctgagatctggcattagattctaataaggagtttgcaacctagatccctttcatgcacagttcacaatagggttcatgttcctatgagaatctaatgctatcactgatttgaggaggtgsagcttagacagtaatgcttgctagctcaatactctcccgcccatcgctcacctcctgctttgtggcctggttcctagcaggccatggactgatactggttatggcttaggggttggggacacctacaataattcattttcacttgagtggtcttggtattcttgttacaaatcaacaataaatggaatagtttatttttggactctctattattttttgttccaatgtctacccttatagaagcaccacgttgtcttataggttcgtagaaacttttgaaatcaggaagtgtgagttctccaacattctttttaaatattattttggtgcatacacatttaggattgctatgtcttattggtggattggccctttggtcattgtataataattctttgtccctgttaaactctttagctctgaaatctattttatttgatattataggcacatctttcttttgattaatgtttgcatggtgaatcattttcatcatttaccttcaatctacctatatcattatattttgagtttctttgagacaacatatatctgggtcatgttttttatatatactctgccaatatttgagtcctggttgaaatttgaattcctacagagaggacttttatttacttctgcaagtaacctgttggcatcatcatactagaaccacttgaagtttcttttttcacttgggttttctgactacgtcatagtaagttctcaacagacagacaattttgattttattttttaagttattgttttgtttttctttgccattctatgtggtatgatttttgttgttgtttacttttattctgtgagaatagctcatagaaagcttgtgggtctcttattgtatatccatcctgaatagaccttaatatcacttttgattcccatgtatattctgtgatcaaaatcggaggtagaaaacttaaggactagaaactgaccttaacaggtcttactaggtaggctccctggtttcactttgctttggatctttgtttctactttttttccatgctagctcagtaacagactaaaacaaaaagtttcgaaaataatttatctggcaattttattgtatttgagaggagttttccataatacgttatctcctgtactgtctgtcaaaaagaggagtcatttttttttggtgtctttatttgcacagaaagttttcattttaatatagtcagatttatttacttgttttctttattgttcatactgtgggatctttttctgagaaagtttctcctattttgaaaatataaggatattctcacataatttcttctagaaattttataattgtgctttaaatttatattgaatttttctgtatgatgtgaaataagaatcaactttttttcttactgatttttcaatttgatttcccccctatttttaaggagatacttgtatatctttttctccttattctgttaatattagtaattacatgtactgcatttgcaatactgaattttccatgaaattcttgtacctttttttttactgtgatgcaaaatcagtttgctaatattttatttgaggtttttgcatctctattcctgcatgtgatttgcctttatacattcttttacgcacattccctcttgaattagaatcataagactaactgggtaacagtccctgccttctcattctttggaatagtttaagtaaactggagattatttgctctttgaaggttgttagaacttcacaggtttgataaaagctttcaatgtcagatgatttttatgtgtgagatttttaaccacttgtttttctttaatggttataggtctaagtgctctatcattctgttcccttttttattctgatctgtttgtttaatttgcttctttcacttccttcattgttcttctctagtcttgtcagaagtttgttgttaatctttttaatccatctttaagtaattttgtggtatggtgcagtttggattttgattgttttattctttccatgtggctatctagttggcttattgttatctcattgaaaaagaccttcctttctcgtgctcttcagtactactttgttgtaaataacatttgtgtaggtcagttttctgggccctttttcctattctaatggtctcttggtgtatctgcatgccaatccatattgtcttaattattttagcttaataaataagtttttatattggatagagcaaatccttttgtatctttaatacttttaatcatttaagtttgtaatctctatagttctaattatttgaagttttaaagggatataattgagtcctgctaactcttgttaataaattgattactcttgtgtcttataattttgtattgtgacctggtcatcaggtaagtgttaactctgtgaatcaccttcagtcggagttacggatgcgttcctgaagatgttttattttcacctcggactaatttttttttttaatcacagtgtttcacctttggggttctgtaaacagtatataatgtaaaatcaaacttcacacccacgtgagacttttccttcttcattccagatcccatttggaggcagaaaaacttaacttgttctcatcttgggcttatgggaggatttttccccctcctagtctacctttcattcagaaatgttgctatccagactctgggctttcactgggaaagacttagttctgtatctcaccttatttaggcccaaggcctgcacatttttccacctgtttgtgataaacccgaattgctcggttatttttcccctctcttttttccagtgcccacctgttttctgattgatatataatacttgtacatatttatgggtacatatgatacrgggtgcatgttacatgcatagaatgtgtaatgattaagtcaatgtttagagtatccatcaccttgagtatttatcatttctatgtgctgggracatttcaaattctcttttctaggtattttgaaatatataatacttgtttttaactatagtcaccctactctactgaggaacattagtatttcttccatcagacaacctctcatcacctctccccaaaattcacacacctttcccatggcttactttttaagaaacctgtccatgacaaccctagcacagttacacccaacttctatttttcctttctgcacactggagatttcttttcagcttagctatgtaattaaaagggtatttgttaatattatccagcatgttttaagtattttgttgctgagatttctagattatctagtctgccatattgctggaaaaggaagttggtattttaaaataagctatacaaagcaattgtatattgttggctgaaagaatttcccccttcaggtgggagtactaaatataatacccttccattgttgacacagttaaaaactgtgtctttgaagcaaagtattgcatagtggctctaagcatggactctggagcttgataatctggggtagagtataagtcctgccactcatgacctgaatgatctttacaagtctgtgtaatctccctgtgcctcagtttttcatctttagagtcttaatagtaactatctcatagggttgttttcatgattaaatgagtcagtccatakacactgaacaacagtgtctggcaatagtaagcagtgaataagtttagctattactattgttgttattaacttcattagatataactcttacttagagctcttatcctgtatgtgaaaaattttccactgacttacatatagacagcatttttcattttcaacgatagcgtccatactttgtatttggagtactgtattgtttggtttcccttcttcctgctttataaaggagctcagggcagaaaatggagtctattgtcacttccttaagccactactaaattttaagttatccatcagtaagtaatctttttcttatcaaaatcagtatgtttatgttatctctttttttgagacagagtctcactctgtcgctcaggctggagtgcagtggcacaatctcagctcactgcaaccttcgtcccctgggttcaagcaattctcctgcctcagcctcctcagtagctgggattagaggcgtctgccaccgcgcccagctaatttttgtatttttactagagatggggttttaccatcttggccagggtggtcttgaactcctgacctcgtgacccacccgcctcggtcccgaagtgctgggattacaggtgtgagccaccgtgcctggccatttatgttatctcctgaagtttctgccttctcttattaatcactccctcaaatgaagatgtattcctatgatggattcttcattcagtgaggtgatcagtctatattctctataaggatctgaaggatttcagtcactgttaagtctgtatgcctttggactaaacattatggaacgaactggttcttacagactttctttcttactgacctgcccaacctattaaataattatgttttttcttatatggaaaatagtccctctgtccatcttcaggagagcatctttagaaatgtggaaggaaccggccgggcatggtggctcacacctgtaatcccagcactttgggaggccaaggcgggtggatcacgaggtcaagagatcgaaaccatcctggctaacacagtgaaaccctgtctctactaaaaatacaaaaaattagccaggcgtggtggcgggtacctgtaatcccagctacttgggaggctgaggcaggagaatggtgtgaatccgggaggcggaggttgcagtgagccgagatcacgccactgcactccagcctgggtgacagagtgagtctccgtctcaaaaaaaaaaaaaagaaagaaatatgaaaggaacctcagagatcactatactagttgtttttagacacttaaaaataagtgtctttccagtgaagatacgcatacatgcatacaccactacacacatggagacttcatatgtgtatgacgaatcaagttcattattatagttaaagctaggagcccagatttggccttcttagacttttcttcctcagtaactcagcctgagacactcaaggagccttagacattacacagtagaactctggaactgctgatcaggtctttcttgtagtttagggttgatgaaactggcctgtgtagcaagaaaaattcacccaagactactaactagccaaataagaactcagccttagtgatggcagtggcagcctgtctggagcggccgctgcaaagacaccaactgcagtgggggacgcgcagctggggctgtgcactccacggagcctgcgggagctgggaacaggtgggagccctgccccctttccaagttggcagagtgggaaacctgcccttctgggggcaactgcagctgcccagccacggctgcagacctgggcatccctgtgctctcgcggggtccaggaagcccctcagcccctgcaggcttggaagtacctgctcccactgcctggcctctcctcgctcccagcgcctgctccaatttccaaagttgaggccaagcccaggtgctgtggcgacctagctgggtgtgtgtgtgcgcagggtggtgataacacaccagcctccttctgcctcggccccctctggactttgggcgctgatgagcacaggagggaggcctgtagggggctgaggatggctcgtcacgggcctccaggcaaccctcagctccagcagcctgggcaccgtggacgaaatgattgatggcggcaggaagctgacaggcttctgggcgtaaaggggaaggttcccrgtgaagccccaccttcaagccagggatgaccagaagcatgggggctgggctgtcagttccaagttgagtccacagcctggagggggataacttaaagtgctttttctgggcccacgcatggccacccatggaccggttagcatgcacttcctcccttctgaagtccctaaaaacagcccgattcacacagatgttgggatttaccagctgtgggaaggagctacccactttgggttaggtctcctcgactcttcgaggcaatctgtctgtgggaaggggctacccatcagaagtctcctctccactgagggctggacacttgtcgggtcgacctgcctgtggaaaggagccacccaccataggtctcctctccacygagagctggacacttgtctggacgacctgcctgtggaaaggagccatccactgtgggtctcctgagagctatgctgtcgctccgtgaactcctctctgccttgctcacctccagttgttgacatacctcattcttcctggagggaggacaagaactctggacctgctgaatggcagtactgagaactgtaacacaaacacggctaaaacacgccccctgctcgccatgttgtgggcaacgagaaggagagaagagctgcagcccttcggggaacccatacctagggtacccttttaattacgtagctaagctgaaaagaaacccagacctgtgacaccctctttggggttcttgtgttcctggcatctccaagcttccaggcaccaccgtgttcccctcatctagattcaggtgcccgcatcggaagtctcgtgtgttacatctggtccagccacagccttgcatggagctggcacctatgccagtgcctggggctgcctgccctggctgtgtgcagtggctggaccctgtgctcactcgcccacacacccctcgctgctccgcgcctgactcgcccttggcaggtgtggaatccaggccggtagcgcgagccaagcttccttccagtaggaaatatgatgggaaaacaggaaggccgtttaattcagattaatagaagaagtaggtttcaatggagacttcaaagggaaaatgtgaacacttttttttaaaatacttttttttcctttttatatcatcttgtatttttcttcagtggatgatttctggttttattgtttgtttgcttttttatttccaacttttattgtaagttcaggggtacatgtgcaggatgtactcctgcacatgtaccaggtgtagcctgccaggtcaagtgggcggaacaagcccagcgggtatgagcaatactcaggcagaaggtgccgccagccaccgaggtttctggctgccgaagtgacaccccatgaattctgtgacattaatatttactgtttccattttggcttggaaacatactaccttccaaagtattttcccctgctgcaggtctgcagagctgctgctttgtctttcctgcaaacttgtcttaacatatctctccttgtacttggtctgccaacaggaagctccttttgcctggcagttgttattgacttaaaattctagtgataaagctaaataagatctgtcgggaccagtctcttcatctttagagaaacaataaccagtaaattagtttctctgtagatgtattatcccttgagctttagagattctttcaagtaccttgttctctagctggtcctcttgtgaaataagaaagactgaagaatctgcaacactggcaaaggaactaaaagcacataaactttaaaattgcttctatttgctgttttatcattcactcattcagttattcaactaaccaaatatgtattgattgttttatttaacagcctactggggattttggtatatgttagaattctggccacagtttaccaattacatttatctctctttcttacagttaagtgttgccttttgcctgtgagttttcttatgtacttattctctctgcctgaaatacccgcctccaaacctggtgaacttttattcatccttcaattgtaacttaaaactcccctatttcaggagggtttttctagcactcttgagtgaattaagggttttttcccctatggctttcttatcataattaaattaattattttaattagttttcattcccacaccctcacctcaagtccccttctccaatatgatacccatggcaatactaattttaggagaatttgctatcataaggttttttcagtcttgtattttttggtcctagcaatgtttctgacacatagtagatgctcaatatatatttattgcatttcttatactcgcagaagatttatagtgctaataatgcatgtatagtatttgtcttccaagacattgtttccagaatcttctgaagtgagtgatgagaggacaaaactttcaaacacataaatatgattactaaatgttgcctttgtccaagaaatacttaaaaatcatttagttcacttgttaagtatatcagaagtagcaacaattttaaaaatactttttttggttagtttacattttaaaaattgcaataaaaataaaactgcaagcaggcaaccaaacactgatataagactgtagaccaaagtgttcaagtatttcttataattagaggttccttattatgaatagtatttgaagatacttcagtgcttaggtaaatatcaacaaatgtgaaattattgtacaaaatacattacaggacatatacattttgctatatgttgcaaatatatatatttgctaagccatctagttaattgactgtatttaaaattttgtcatcagtatgcagcttgcttagagagtaagttgtattgaatttgagaaattatgccttagatttgtgacttattgacaggcttccttccagtggaaagtatgaggggaaaacaggaaggccatttaattcagactaatagaagaagtaggtttcaatggagacttcaaagagaaaatgtgaacacttttttatttaaatacttttttttcctttttaaatcttcttgcatttttcttcagcaggtgatttctggttttatagtttgcttgctttttatttccaacttttgttttaagttcagcgatacacgtgcaggtttgttacacaggtaaatatgtgccatggtggtttgctgcacagatcatcccatcacctaggtattaagcctggcatccattaggtattcttgatactctccttcctcccacctcccaccctctcacaggtctcacaggtgttgttcccttccttgtgtccctgtgttctcatcattcagctcccacttacaagtgagaacatacggtatttggttttctgttcttgtgttagtttgctgaggataatggcttccagctccattcatgtccttgcaaaggactgcatagtattccatggtgcgtatgtaccacattttcctaatccagtctatcattaatgggcatttaggttgattccatgtctttgctattgtgaatagtactgtgatgaacataggcatccatgtatctctacaatagaatgatttatattcctttgggtatgtacccagtaatgggattgctgggtcaaatggtatttctgcctctaggtctttgaggcattgccacactgtcttccacagtggttgaactaatttacactcccaccaacagtgtaaataaaacattcctttttctccacaacctcaccagcatctgttgttttttgactttttaatagccattctgactggtgtgagatggtatctcattgtggttttgatttgcatttttctaatgatcagtgatgttaagctttttggttggccgcatgtatgtcttcttttgagaagtatctgttcatttcctttgcccacttcttaatggagttgtttttttcttgttgatttgtttaagttctttgtagctgctggatattagacctttgtcagatggatagattgcagaaatattctcccattctgtaggttgtttactctgataggcttttttctttttttcttttttcttttagctgtgcagagctctttagtttaattaaatcccatttgtcaatttttgcttttgttgcgattgcttttggatattttcttatattttaaccgcccaccagatcataattttaaaaattattttgaaaaatattttttctcattaataaaaccctagagggtttgaaagtgtaaaatacaaagttaaaaacccttgtgcttacacattactgtaataaacttgtgtattcccacattttctctgcatatgcaagcatacatacacatacatgtatgtgtctatgtgtgtgtatgtgtttatatgtatacattatatattcttagagttggagtcatggaatacttcctgctttctgttacctgctacttttcctctttctgtatgctttttacatacaaagaatctttttggttctttttaatgattgcagatattccattgaatgcatgtgtttttctgttacaatgaagcagagatgtatttatgcatatatatctatttctccagctgtagtactaatagtatagttgctagctcaaaaggatttacatttttaattatcttagtcacacactcccatctaaaaggcttgtgtagatttacacaatttatgttctctctaccagtttatgaatgtatctgtttcttctcccttcccatgctcattactcagcagccttctaaagtaaataatcatgggcttttactgcgtaatcagattagcacagtaaatggtggaaaaataacattattgattgaaaagttggttaagaagacataagcttgctgttgtttctttcatagttttggtgttaaaatttgctggtgtttgaggtaactaattttaactagattcagggtgacactatctgtaagaaaagatcctgggaacttgagaagaatgaatccatattcataccaggttagttcatggaaatatctgctctcaacatttaagcaaactaagaatgaataatttgttacagtttacaacatatgatttcatttattcctcacgtagattttaatctgttatgcagaggagtagagtgaaactcagaaagataaggaaggctccctcaggtcacagtttataaatggtggaacttttgttttgttttgtttttgatgaattatattgcatttctaatctaaggaagcacgtgtgcatcaggtcctagtataaggtctactaaataacagaggctcaataaaagtcttcaaattaatgaattctcttttgagaggaaatattttgaagtctttaaaggcattagtagggttcaagactaagaaagagaccacatggccttattactttgatttttactagggaaagttgtaagcatataaaagtagaaagaattgtaaaaatgaacttctgtatatccagctttataacagttattaactcatggccaaccgttttcatggtggaaatccactcaacacaagatgacaactcaaaaaaagctatagaaaacagaaaaattcaggtggactcatgatataataaaatagttattgaatgcctactattgatagacgtgtagagtagggttttggttgttttgtttcgtttttttctttttcttttgaagtaattgtaggttcacaggatgttacaaatatagtacagagaggtctcatttactgtttactcagcttctcccagcggcccaatggtracatcttctctaactgtggtacaatattaaagtcccattagttgacattggtaccatctacagatcttttatagctatcaccagtttttacatgctgtcatttgtgtgtgtgtgtgtgtatttgcatggatgtgttactttttacatgtctagattcatgtaacaattatcaaaatacagcataaagtattatatatgatgttagctgtgagacttcatagatgttctttatcacattgaggaaagttctctattactaacttgttaaaagttatcacgaacgaatgttgcatttttaaaaatgattcttgtctgtctattgatatgatcatgtgacttttcattagcctgttactatagtggattaccacaaacaaataaattttaaacaaataaactaaatatggtggattatattgagcttttttagaatattctgccaagaattggtatgcatttttcttttttttttttttttttttgcaccgcccttaatccatttaatcctgagtggacacagcacatgtttcagagagcacagggttgggggtaaggtcacagatcaacaggatcccaaggcagaggaatttttcttagtgcagaacaaaatgaaaagtctcccatgtctacttctttctacacagacacggcaaccatccgatttctcaatcttttccccacctttcccgcctttctattccacaaagccgccattgtcatcctggcccgttctcaatgagctgttgggcacacctcccacacggggtggtggccgggnnnnnnnnnnnnnnnnnnnnnnnnnnnnnnnnnnnnnnnnnnnnnnnnnnnnnnnnnnnnnnnnnnnnnnnnnnnnnnnnnnnnnnnnnnnnnnnnnnnnnnnnnnnnnnnnnnnnnnnnnnnnnnnnnnnnnnnnnnnnnnnnnnnnnnnnnnnnnnnnnnnnnnnnnnnnnnnnnnnnnnnnnnnnnnnnnnnnnnnnnnnnnnnnnnnnnnnnnnnnnnnnnnnnnnnnnnnnnnnnnnnnnnnnnnnnnnnnnnnnnnnnnnnnnnnnnnnnnnnnnnnnnnnnnnnnnnnnnnnnnnnnnnnnnnnnnnnnnnnnnnnnnnnnnnnnnnnnnnnnnnnnnnnnnnnnnnnnnnnnnnnnnnnnnnnnnnnnnnnnnnnnnnnnnnnnnnnnnnnnnnnnnnnnnnnnnnnnnnnnnnnnnnnnnnnnnnnnnnnnnnnnnnnnnnnnnnnnnnnnnnnnnnnnnnnnnnnnnnnnnnnnnnnnnnnnnnnnnnnnnnnnnnnnnnnnnnnnnnnnnnnnnnnnnnnnnnnnnnnnnnnnnnnnnnnnnnnnnnnnnnnnnnnnnnnnnnnnnnnnnnnnnnnnnnnnnnnnnnnnnnnnnnnnnnnnnnnnnnnnnnnnnnnnnnnnnnnnnnnnnnnnnnnnnnnnnnnnnnnnnnnnnnnnnnnnnnnnnnnnnnnnnnnnnnnnnnnnnnnnnnnnnnnnnnnnnnnnnnnnnnnnnnnnnnnnnnnnnnnnnnnnnnnnnnnnnnnnnnnnnnnnnnnnnnnnnnnnnnnnnnnnnnnnnnnnnnnnnnnnnnnnnnnnnnnnnnnnnnnnnnnnnnnnnnnnnnnnnnnnnnnnnnnnnnnnnnnnnnnnnnnnnnnnnnnnnnnnnnnnnnnnnnnnnnnnnnnnnnnnnnnnnnnnnnnnnnnnnnnnnnnnnnnnnnnnnnnnnnnnnnnnnnnnnnnnnnnnnnnnnnnnnnnnnnnnnnnnnnnnnnnnnnnnnnnnnnnnnnnnnnnnnnnnnnnnnnnnnnnnnnnnnnnnnnnnnnnnnnnnnnnnnnnnnnnnnnnnnnnnnnnnnnnnnnnnnnnnnnnnnnnnnnnnnnnnnnnnnnnnnnnnnnnnnnnnnnnnnnnnnnnnnnnnnnnnnnnnnnnnnnnnnnnnnnnnnnnnnnnnnnnnnnnnnnnnnnnnnnnnnnnnnnnnnnnnnnnnnnnnnnnnnnnnnnnnnnnnnnnnnnnnnnnnnnnnnnnnnnnnnnnnnnnnnnnnnnnnnnnnnnnnnnnnnnnnnnnnnnnnnnnnnnnnnnnnnnnnnnnnnnnnnnnnnnnnnnnnnnnnnnnnnnnnnnnnnnnnnnnnnnnnnnnnnnnnnnnnnnnnnnnnnnnnnnnnnnnnnnnnnnnnnnnnnnnnnnnnnnnnnnnnnnnnnnnnnnnnnnnnnnnnnnnnnnnnnnnnnnnnnnnnnnnnnnnnnnnnnnnnnnnnnnnnnnnnnnnnnnnnnnnnnnnnnnnnnnnnnnnnnnnnnnnnnnnnnnnnnnnnnnnnnnnnnnnnnnnnnnnnnnnnnnnnnnnnnnnnnnnnnnnnnnnnnnnnnnnnnnnnnnnnnnnnnnnnnnnnnnnnnnnnnnnnnnnnnnnnnnnnnnnnnnnnnnnnnnnnnnnnnnnnnnnnnnnnnnnnnnnnnnnnnnnnnnnnnnnnnnnnnnnnnnnnnnnnnnnnnnnnnnnnnnnnnnnnnnnnnnnnnnnnnnnnnnnnnnnnnnnnnnnnnnnnnnnnnnnnnnnnnnnnnnnnnnnnnnnnnnnnnnnnnnnnnnnnnnnnnnnnnnnnnnnnnnnnnnnnnnnnnnnnnnnnnnnnnnnnnnnnnnnnnnnnnnnnnnnnnnnnnnnnnnnnnnnnnnnnnnnnnnnnnnnnnnnnnnnnnnnnnnnnnnnnnnnnnnnnnnnnnnnnnnnnnnnnnnnnnnnnnnnnnnnnnnnnnnnnnnnnnnncggccgggcagagacgctcctcacctcccagacggggtctcggccgggcagaggcgctcctcacatcccagatggggcagcggggcagaggcgctccccacatctcagaggatgggcggccgggcagagatgctcctcacttcctagatgtgatggcggctgggaagaggcgctcctcacttcctagatgggatggcggccgggcggagacgctcctcactttccagactgggcagccaggcagaggggctcctcacatcccagacgatgggcggccaggcagagacactcctcacttcccagacggtgtggcagccgggcagaggctgcaatctcggcactttgggaggccaaggcaggtggctgggaggtgtaggttgtagtgagccgagatcacgccactgcactccagcctgggcaccattgagcactgagtgaacgagactccatctgcaatcccggcacctcgggaggccgaggttggcggatcactcgcggttaggggctggagaccggcccggccaacacagcgaaaccccgtctccaccaaaaccagtcaggcgtggcggcgcgagcctgcaatcacaggcactgggcaggctgaggcaggagaatcatgcagggaggttgcagtgagccgagatggcagcagtacagtccagcttcggctccgcatnnnnnnnnnnnnnnnnnnnnatttttctttaaatgtaatttttttctttaaattcaccagggaaaccatctggatctgattttttctttatgaaaagttgtttctaattcagtctctttacttatgataggtatatttaaaatttttatttcttcttgagttaatacgtgtagtttgagtctttctggcaatttgtccatttcatctacattatctatcggcatacatttgttcataatgttccttaacatctcttttttccccttgtaacttcagtattaatgtaccttcttttattcctggttttaataactttttactctttttttgttctttctcagtctacctaaaggtttattagtttttctgatcttctcaaaaaactaactttcggttctgttgattttctttattgttttttaattctctattttatacatttctgcactaacttttctttctttgtgctttgggtttagatttgtatagtgtcttcagataaaagattctttatatgagatcttttcttttgttatgcagtcatttgtagctataaatttttctccagtttacctgcatcccatcaaatgtgatatgttgttatcttcattttcatttatatcgaagtattttctaatttctcttgtgatttcttctttgaccccttggttatttatgagtgtgctatttaatatcgacatatttgtgaattttccaaatttctttctgttactgatttctagtttgattccatttgttgttggagaatatgttgggtattatttcagttcctttaaatttactgaggtttatttcatggcctaccatatggtttattgtggagaatattgcatgtgcacttgagaagaatgcccattctgctattgttggatggagtgttctgtctgacctgtcagtcaggtctcgttagtttatggcattgttccaagtcttttatttccttgctgatctctgccttgttgtttaatatgttattgaaagttgagtatgggagtctccaaccattattgaattgtctgttttataggtacatatatttttatgtttgtatcttctgatggaacgacctttagcgttataaaatttccctctttgactctagtaacatttttattttaaaactttgtgtgatattagtatagctgttccaccttccttacggtgtaactttttaaatcctttacttattatatatttgtatttctgaaagaaaagtgtgtctttctttagcagcatatacttgcgtcttattttttttttttaccagtctgacatccctgccttttgattgatttttgttatgtcagttaatgttattattgatatggttggatttatatttgtactattttactttttgctttttttgtttctcttttcctcctttattgctttcttttacattcagtgcatattttcttgtgtaacatttcaattcctttaatggttttttcagttttcttttttttaactagttgctttaggacttaaccagatacatcttaacttatcagaatacttcaggcttataataacttaattacagtgagatatagaaatgttactttatatagctcagtttcctctttccccttcttgtgctattattcttatatatacatatattacaaacccaaaaatatattctgtaaaattattactttatataatttatgtaattttatgtctagtaagctgagagaagagaggagagcaagtatgtatatatagaaattgtatattagccttctattgatcatttctggtgcttttcatttctttctatagattcacgttaccatctggtatcatttccataggccaaaacaactttgattccactataattatatacatatacatatatatgtatacatataaaaaaatatatagagtatatatatacacacatatggttttatactatttatactataataaatcagttaagaaaaaaaggagatactctatatmyacacacacacacacacacacacacacacacacayayayatatatatatatatatwtwttttttttttttgagacagagttttgctcttgttgcccaggctggagtgcaatggcgtgatctcagctcactgcaacctccgcctcccaggttcaagtgattttcctgcctcagcctcctgagtagctgggattacaggcatgcactaccacgcccagctaattttgtatttttagtagaaacggtatttctccacattggtcaggctggtctcgaactcctgacctcaggtgatccgccgcctcggcctcccaaagtgctaggattacaggtgtgagccaccatgcctggccagagatactctgttttatagttactcatttacctgtaccagtgctctttggtttttcatgtaaattcatatcactgtctggggtcactttttttcagcctgaagaacttcctttggtatttcttgtaaggtggatctgctggcaacaaatactctcagtattcatttatgtggaaatgactatctttattttgccttcgtcttttaaagatgtgctgagtacaagattcttggttagtgtttttgcctctttcagtgctttgaatatgtcatccaggtgtcttctggcttctgttgtttcttatggcaagtcagctattcatgtttttggagtttcctcgtacatgaggagttgtcattttttcttttgctgctttcaagatattctttgttttttgggggcatttttactctaatgcttcttggtgtggatcgttttgcatttattgtacttacagttcattgagctttttgcatgagtagattagtgtttttcatcaaatttgggaagttcacatccacatttctattttttttttctcctttttctttttcttttttttttttgagatggagtctcgctctgtcacccaggctggagtgcagtggctccatctcggctcactgcaagctccgcctcccggattcacaccattctcccgcctcagcctcccgagtaactgggactacaggcgcccaccaccatgcccggctaattttttgtatttttaatagagacggggtttcaccgtgttagccaggatggtctcaatctcctgacctcgtgatccacctgcctcagcctcccagagtgctgggattacaggcgtgagccaccacacccagcccacatccacatttctttaaataatttcttccgtttccttctctcctctccttctggtactgtcattatacatacattggtgggctcttaatggtgcttgcatwtctctgaggctcttaatttatcttctttttatttattttttttgagacagagtctcactctgtcacccaggctggattgcagtgatgcaatctcggctcactgccacctctgcctcctgggttcaagygattctcctgtctcagcctcctgagtagctgggattgcaggcacatgccaccacgcctagctagtttttgtatttttagtagagacggggtttcacaatgttggtcaggctggtctcaaacttctgacctcgtgatccacccacctcggcctcccaaagtgctgggattacaggcgtgagccaccacacctggcctcttcattcttttttctctgtattatttggattatataagctgttgatctgctttcaagtttgctgattatcttttttcagttcagatctactggtgagccccttaaatatatttttcatgacaggtatttttgtgaaaaaccatttgattttgttttataatttctatctctttatattttgtatctgagatattgtcatcatacctttcattacctctttaagcatggtctcctttagttctgtggatatatttataatgactgctttgaagtattgttcagtctgacatgtaggccctctcaygagcagttcctgttacctgctatttttcttctgtttctcttatatgtttctgtttcttctcctgtgttatgttttcgtttaaacttgacgttttactttattttatatgtttttgagatagggtgttgctttgtcacccaggctgaagtgcagtggttgtgatcatggttcactgcagcctcaacctcccagactcagttgatcttccccctcagcctcctgagtagctgggattacaggcacacagaaacacatctggctaattttgtactgtttttgcagagatggggtttcaccttgttgcccaggctgatgtcgaactcctgggctcaagcaatccacccacctcagccatcccaaagtgttgggattagaggtgtgagccaccgcatccaagcaaaccggacattttagattgtgtattgtaactattgataatatattgacccctcccttccaaggcttgtcgttattgtttacttgtttttcagtgatttgattgaactattttagcctctgatatcttctcacagtgcgcacagcattaggcattctcacagtcaccctgggatgacagtggtttatcagggctctgtttgactcctctgatttctgttaggttaactacctctgtcagtttcatatgcagctgttaagcttcaataattattgtctaatttctacatttttttcatcagtatataaatagagcataaattgttccacagtcttgatccagttaaatctaagcccctttgcagggatagttcttgaggccaatctttgatgtttgttctgactctaggagggttcttactttatttgtcttacctgcttatcgtatttccctggttatctctggtaaactagctgacgtatgttgttttcaagagcactcttagactggaacttctctatactcgctaccaaataaagtcagtttctttgggtagagttttaaagttttctgttcttgtggcctgtctccctttaacacagcttctccactgccctggagctggggtggggacagtgttcggcttctcttggagtgaaactcctgccttacaagcagggctcttgtaggggcagtgtcctttacttgatttgcctctccctacatggaatttctgccctatgagtaagctgaggcaagggtgattagggctcagtattctggaccatctgtgtctgaggtagagtcttgccctgcaggctttgggtggaggaaggttgcttttgattctttgacataccattctggaatttaaattgtgataatgttgctgggaagcatgagaagtgctggtggtctgcctctcctatatcccttgactaggatctggggaaraagggatttgcatcttcctggccatattttcccagagtggaacattggccagggcagaagaaggagggagtgggttgtggctcaagtgccacagggtcttgctgattttactgagattgagtagactttgtggaataaatgctgttttctttgttactttcttttaggtgaattctccaagactaaattcttgctttttgtttttgttttataattttccctaatagtagttgttatgctcaggagcagatccatagagttcctttctgtacattattacttgattgatttttaagcactgaaccagccttgcatctgtggtaaaaccccatttggtcatgtgtataatccttttgagatattgctcagttcccttgctactattaatattttttgaggatttttgcatctgtgttcatgagaaacattagtctgtagttttctcttttatactgtctttttctgtttaagtatcaggccaatgctggtttcatagagcaatttgggaagttccatcctctactgttttctggaggaagattgtgtagaattattcttaattctcatctaaatgatttgtattttttagacttctccagtgaaatcaggcccaggagatttgtttttggggaggtttgctttgaaactgttgttaccggtggaaggtgtcccgagttaccggcagtgaatccttacaggtctgcagcaaccttaattcttgcctccttataagaaagaattccactgagggtcatatggtagaaaaagagactgaggcaagtttcagcaggagtggaagtttattaaaaagctttagaacaggaaagaaaggaaagtgcacttggaagagacccaagtgggcaccaagaaggtcaagtgccacgtttaactgtgatcctaggactttataggacttctggcatcttggaacccttccccatgattctttccttacggtgggctgtccatatgcacagtgcccttcttaccctttggaagtgagcacatgcagtggatttaggaagttttatacatgcccatctgaggctttcttcccttttccagtggtgtgccctcggaaagccaggctctgctattttgtctcttaatgcacatgcctgggttccctcacccaacacctgagattttattggatgccctttttacttctccctggggcctgcattcaattaacactttataatgttaacagctgtagattatcaggagattgtctgtccctgcctccggctgctgaattatctttagagaggcaatgcaataattgtggaaccatcacctgatcacctgacattcctggtggatggggagagccctctcctgcctggcttatgcctgcctaactacctgtaacactatgatttcaattttaaaattattgtgtgtcttttaaaatgatctatttcatattaggtgaattttagtaggttttggtctgtgaggaatttgtctgtttcatccaagttctcaaatttatgcttaatagattcctttctcctattttgttaccttgtaaatgtttttggagtgtgtagttacatcctcagctttgttgggacaactaaattcctcttcaaagactcaacttcctggtcataagttgtaaatcaaccctacctccttcttttttccgcttctccttttcttgcagattgcgcgtttaccctatttgggaaaaaaaattaggtctaagccaacggggatcagcttaggttgtgcggtctgaccccagccaacaggggaaggacacagaaacaggagctgtgttagggttaaaaaccccttccttcctttgttcagtgtgctcttgcagttgtaacaggtgcaggcaacacccttccaccaaagtaaaagtgccttgctgagaaattttctgtttaggtgcgggtttcttttggctacgccragcacttgtttctgacagcttcaattctgtaaaggttgatttgtgtctttttttcccctttttattttagtcttgtttgaggtttgttaatttcattgatcttttcaaattgaccagatttttgttttaccaattttgtctattttttgttttcaaatacttagatttctgctctttcctgtattccctaattttggtttattttctctttttctaattttctttaggtaggagcttagacttgatttgagaccttccctttttttaatgtaacatttaggtttataaattttcctctcagctctgctttggccttattccacaagttttgatatgttgagttttctttcagttcagtggttttttttgttttgttttgttttgttttgtttttctccagagtcctctttgtcctgtgggttatttagaagttgtttaatttccaaatttttcctatctttctctcactgtgttctattttgatttcattatagtcacagaacacactatgtgatttcagttattctgaatttagtaaggtttgttttatgacccaggatatagcctgtcttgtgaatgttgatggatgcttgaagagaacatatattctgctgttgtcgagtagagtgccctagaaatgtcagtcaatcctattagttaatatgttgttgggttcttttatatccatgctgattttcttttttacatctttgctgattaatctagcaattgctgagagagggatgttgacatccctagttatatgtgtcccttttctatggcttaagttgttttctgccattttattactagttttatgactttattatttgtttccttattttctgtttgttctgcttttcaattctgttttactttttctgctcttcttagatttgtggcattttctagaatttcatttttgtttttatagtgtctttgagagtagtgtctttgagtgtctttggatagcttttttaggtgattcttgctattataatgtacattaaaaattttttatgctatatcattaacaacattttaccgctttgagtacatataaaaaccttatctacttttagagacctttgccttccccctttataatataattataatagtattgtgttttccccaatataatataactgtgtttaagtatttttctatatacattaggagcacatcaaataggtataatttttgctttagcctttaaacatttattcttaaagagaagaataggcttttttatttacttccatttctcccatttcattactctttcttcttttctgttgttccaagtttcttcatgttacttactttctggttggagaacttctgatagggctctgatgactagaggaacaccagggtcctttgtctcagaccgattagataaacaacacggacacatgtggcatggtttcaaggtttcagtgagtggaaagtttaataagaaagaaggaaaaggctcccccatagagagacagagggagcggggctctgaacgaagaggaaaaccctgagtgcaccagaaaacagtctgttatattaggaggctggaggaggcggtgtctgatttgcatagggctcagggcattggtttgaccaagtgtgtcattcacatagtctgtgaaaaacctggctctcccaccctggccttttaatatgcaaatgcaggtctccatgatgtcctgcacacgcggagtcatctggaggcagccatgacacttggcacacatggtgatgaggaggagacggaggaattaccatgctgaatggacccagtttctaatcaccagcatttgcatatcaaagcttgctggcctggctttttaagctgcttttctattagaaaagaaatgtttgaggagctacctttattaaaagaaaaaaaccttactgaggactccttaccctatctgcgtaaaataatttcttaataactcccgtaatattcccccctgaggagatgtcaccttaactgctgttagagagttttgggtgacgactctttctggccacttcctgctgaaaaggggcgtcaagtggggaagagcagctagggttcctcttggagtcgatctaagggtccttggaagaatggcctgcccatgcatggttcgttttgcagcaccatttggagtttgattgcttctaggcaagagaaaacaatttgagttatagtattgagtatacaaggtgcaaatatgaatacaagatgtgtaagcaagagggggcttaataaaagagctaaccaattccgtaaagatgattggaattcattaaagagggattatggccacccgggctgaagcctgcgttgtttcttagcctgtcaattattttgatttgatctttaagtacctgtatgttttcttctacttgactagaggtgttaatccagaaacagcgtgtttcatttaaaagtgcacaggtacctcctacttcagctatgaggacayctaaggcctgtctattttgtgctactactgaggtttttagtctgtagattgctgttgtgcctctatgacacttagagttgctttccatccttgttgtatcataatggaaatattaagtactgatctttcaaggagaggggtgcccataaaccagaatagacctctgtctatagaatttctcatccatggtttttctaagatgatgttttcacgtgcatgtcctccccagtctaccctttcagttaaatctccatacaagggcatagaaatgatagatctctttgtccagcatatacaagataatgcagtttccagaaaagaccctaagttagggatgtccccagatgatgctgctgtctcggtagaatttaaaaataacaagttgggaactattgctactatagtacaagttcccttacaaggccttgggaggattaagtttatccaggagccgcaaagaaaatatagccctgttccttgaagggacggttctaagttgtggcttgtgagagacaccggcagatttttctcatatcttagaagtttcccttctttacatataataggggcatccttgggataaggatatccgtctttaggatagtcatttacgatgccgtttggaatttgacatgccaagtgaaaaggatccacctgacaagtggagtttggaaaaatcagagacgtaatatgccctggccagtatctcagatgatcctgtggcaagggctgtcagtccagatgtctccagttcccccacagatctgtaagctgctactatgagcaagcatcatacaagggtctggaattccatgggggaatgtttggaaaggctcatgtgttattttatttattattwtttttttttgagacagactctgtctttgttgcccaggctggagtgcagtggcgcgatctcagcttactgcaaagctccgcctcctgggttcacaccattctcctgcctcagcctcccaagtagctaggactacaggcacccgccaccgcacccagctaattttttgtatttttagtggagacggggttttactgtgttagccaggatggtctcgatctcctgaccttgtgatctgcccacctcagcctcccaaagtgctggtattacaggcatgagccaccgcgcccagcctatgtaattctttacattatagtcaacatggtgacttagagcatatcactcccatcgggactttcaaccagaaggagaggctagattctgaaagccccccattagggcttctcatccttttagatcgctcctgttgcgttttcctccccacatctttgaactatcagcagttacaagtgtgatgttacagtatctgagatctcccaagtatggtccttccctactgcttttaaagcagagggagccatttgctattacccgatcaacttttaccagcctgagggtgtgaaatttatctttggggagaatgttgtttggcactgggggaagagtgttctcctgagaggagttagttacccagktaaaagtgcccccatactatgtcccatttatgcctcataaatctttaagggttaaaggtaaagctaacaaagggaatcctacgatgatgagttgtgggtcattgaagggttccttagtgtcattaaactgagcaaaccacttaggacagacccaacaattagtcttgttgtccaaatgggccatggctgatactgcaggagccaaaggatgtgacatattactaagtctgataagaagtcttaacagacttattggtagtaaaacgctcatgtttacttcctgttagtaactgttattcatactaggaggataataattaagcaaagtgctacagtaattgagattctctgtccaatattgtaccctgagggtgctacagtctataatcctactgcaaatagtagaatgtagcaattcctgcaggtgtggcatggtaaataacttccatcaaaaagaaattctaatatttggcaatgaatcttgaaaggagaggtagacacggcaaaaagtatttggtgaggtaggggtgagactgagtaaaatgagtagttcttactcagttacttatcttttgtgactttcagcttaagatctcctatttcttttttacttatatttttaaatttttttttattttgagacagtcttactctgtcacccaggctggagtgcagtggtgtgatctcggccccccgggttcaagcggttctcctgcctcggcctcccgggtagctgggactacaagcacgtgccaccatgcccggctaattttttatattttttgaggagagacgaggtttcaccatattagccaggatgatcttgatctcctgacctcgtaatctgcccacctcagcctcccaaagtgctgggattacaggtgtgagccaccgcacccggcccttttctgtgttgttcttattgagtaatttctattgctttttctnnnnnnnnnnnnnnnnnnnnagctgcttttcaagctgcttcttctattagcaaaagaaaagtgcagggcacggtggctcatgcctgtaatcccagcactttgggaggccaaggcgggcggattgcctgaggtcaggagttccagaccagtctggccaacatggtgaaaccccgtctctactaaaaatacaaaaaaaattagccaggcttggtcgcgtgtgcctgtaatcccagctactggggaggctgaggcaggggaattgcttgaaccagtgaggtggaggttgcagtgagccgagatcacaccactgcactccagcctgggtgacagagtgagactccatctcaaaaaaaataaaaaagaaatgtttcaggagctgcctttactaaaagaaaaaaaaaaaaaaccttaccgaggactccttaccctaactgcctaaaataatttcttaataactcctgtaatatttcctagagcattattttaggaaaatgatctgttggtgataatttccttaaatttttctgagaatattatcatttactcttcattcctattgagtattttctgttgacatagaattctggattggcaggcttgggttttgtttgtttgtttgtttagcacttgaagtttttttgtacatttcctgatatggtttggatgtttgtcccctccaaatctcatgctgaaatgtgattcccagtgttggaggtagagcccagtagaaggcaattagatcatgggagcagatccctcataaatggcttgtgaccaagcccttggtgatatgcgagttcttgctcagttaacctgaaatctggttgattctgggacctcccacactggctcttttactcctgctcttgccgtgtgatgtgcctgcttccactttgccttctgccatgattgtaagcttcccgaggccctcaacagaagctgaacagatatctgtgctgtgtatacaggctgcagaaccatgagccaattaaactccttttctttataaattacccagtctcagatatttatttacagtgatgcaagaacagcctaacacatttccttttggccttcttggttgcagatgagaaattcattctaatttgaattgtcattgcctgttggtaatttctttttttaagttgctttcaagatgtttactttgtgtttagtttttagtattttgattatgatgtgttataaggtagatttattttgattcattttgtttggggttcacttggattcttgaatctgtatttttgtttttgccaaatttgtaaaaattttattttacaaacaaaatactcaaatgttttattattttatcatcctagaaactcttcctcatctcttaaatactggagtgaaatgaatgtcacctcatttttttcttgtcccacaggttgctgacagtctggttgttgtcatctttttattttttcagtctgttttttctgttgttcttttttttttgagatggagtctckctctgttgcccaggctggagtgcagtggtgccatctctgcctcccaggttcaagcggttctcctgcctcagcctcccgggtagctgggactacaggcacgtgccaccatgcccggctaattttttatatttttttagtagagacaaggtttcaccatattagccaggatgatcttgatctcctgacctcgtaatctgcccacctcagcctcccaaagtgctgggattacaggtgtgagccaccgcacccggcccttttctgtgttgttcttattgagtaatttctattgctttttcttcaggttcattgattattttttttctttcttatctttattcttttgttgagcccatctagtcagtttttatttgttattgtatttttcagttatataatttgcatttggttcttttatatcttctattactttgctgaaataatctttgtttttttctaatttcttttcaacagcattcataatggttgcttccattgaaacatttttttctgatgactgcttccaaatctttgtcagataattccaatatctgattcctttcggtgttgacatctgttgattgtgttttcttattctagttgggattttcctagctcttgctataataaatgattttaggtagtatctcagacatttgagacattttgttacgagactttggatcgcatttaattggctttgtagtagggagtcaccttggtagcatacaggtcttggcttactttttaaattttggtcagttttacatgtagtcagttcgttgttaagtgtcctatccaggattacatttcaagatttaactatccctttttccatctaccttgtctcctgaatcttcttcctcctgtctgtttgggagacaccacttgctacagctatgtgatgatagcagtggaagtccaggcttcctcttcagcttctcctagtaccaactcaataggggaagccgaacacctcctgctaccaataagcctaagtgaaagttcaggatatgttttctgcttctgcttaacaccaccctagaggagatattatgaagtactactcggtactgtttggaagtgggtataagttcaggcttttcacttgctgcctgctcaaaccaggtggcacatgaaactaggcttcttatttgatttccgtggacactagtagagaagggctcagtttttttcccattgagtttggcattgtcaggtttctgtcctaccaygtacccttatctggtccttttcctagagaaagcaggcttttcttgggctctttcatmagcacctattagcatttctgggtaacagaattctacagtacccagtctgtgatatataggaagtgaaaagaaaatgcaaggtctagagtccagaaataaatccatacatttagtggaagaaagcatagtttcttcaaccaaaggtacattggattcaccttagtagcttttaaaaaagattaatgcttgctctcttccccagacaaatataatcagaatgagagacaggtcagggaggtagactgtatcagtatataaaacatttgcaggcgatttaaatgggggccaacattgagaagctctgtttgaagcacatacttcccatcattgatgagttttttcagatagccatttgacccaattctggccaataagagtctttgtaaggtaacttttacaaggaagcttgttcttttaaacattgtcacatggatatgaabcttggaattgctgtgagcatcttgctaaaggctcacgaatatagccaacacttggaatgcagatgagaaagatggaaagaaacctagtcttaatgtccctcatctgccaaattagcttgcgctggagtcttttgtgcctctgtactttccattatatgaaaaaaaaatgtccttagtgtttcatccataagtttgaattctgactggtacctggaagcttctaaactgctatagctaatgagaagaaaaactagtggtaaaatatattgctattctctaccatatccattttctgttgctataacagaatacctgagactgggtaatttattttaaaaagaggtttattggctaggcgcggtggctcacatctgtaatcccagcactttgggaggctgaggcaggcagatcacctgaggtcaggagttcgagactagcctgaccaatatgatgaaactctggctctactaaaaatacaaaaattagctggkcgtggtggcatgcacctataatgctggctactcaggaggctgagacaggagaatcgcttgaacgtgggaggcggaggttgcagtgagccaagatcagattgtgccattgcactctagcctgggcaacaagagcgaaactccatctcaaaaaaaaaaaaaaaagtttattttggctgggaggtccgggatcagatggccacatctggtctgttctgagggttgcgtgctgtcataacatgacagagaagcagaaggggaagtgggtgcatgtaaaagggatagaactccaggggcagcctcactttataccaacccatttgtggtaattaatctagtactgtgatagtgagaactcactcgctcccttgagaattaaccttgtccctggaatgtgacattaatccttctaaatgacctaatcacctcttaaaggtcctgtctctcaaaatcaccataccagggaccaaattttcaacacatgaattctaggggacaaactcaaaccattgcacatatttttctaatatatgttgtatataaatgtaacgagaataaacttctctagtgaatttattgataggtatagaagtttcctccagtattagcttttgtttgctacttatgttaagatgccagagtagttgatattgttattgcttgttttgtcaaattgctttcccaacagatatctttctaccatgttagcagcaataagtatttcttgtctttattttttatcattggattttattttgggggttgtttgcccatggcatgtcattataatttcccattttctttttttattttaactgaacatgttgatcatttgtctgtttttactcataagttatattttttattggagggggattatctaatcatgccttttgtaccacagtttaacagctttggaacttggggaagttgtatttactctttaatgcctacatgatagaattagtatgaggttaaaatgagatagttttctaaagttctctgagtactttggcaatgaaaatattagcaatcctttatcagtttgctataaataattgttaccatcttcgttccccttttatggcattataatacaaaattatattttaagtaatatttagccaaatatgtcactttccagtcacaatttaaatataagaataaaaggcataacaaaatgatatagatatatgcatgagttaatgtggcaataatataaactaaaaaaatatcgtgatagcctgaaagtgaaaagtattttcaatcaaatgtttctttgtattttcatatttattatatgctctttaaaccagtttgcctaaggtcaggttgttttctaaaagtgctgtgtcacatgtgaagtcttttttctcaaccaagtcattggtatgaaaacagttaccaagttaacccatttatgcctagtgctccattattggcttgctaagcttatgggagttatttatatcctactgctcaaggtcattgccaaggcctgatttttcacacaaaaaacgtttgctacctctggcataaatgggttaatagatgaggacaaaagtcaaccaggttaaaaaatgtgaagaatgtaacctatcaaagttgatttcattcaatttttttttttttttacagaaacatgatcaggggcaagtcttgttggatgtcgtcttcaagcatctagatttgactgagcaggactattttggtttacagttggctgatgattccacagataacccagtaagtgtaagattttgtctttcattttcatttagtttttcctctcagtttagtgtagaaagtcctttctgatttacagtgttcactgatttgatgagttttttttttacttgacttaaatagaggtaattcttttgcttttgttcctcttttcttgacattttaatctttcagaagttattagctttaaggttttcataattatgtcaggtaatgtcactttcattaattatgtgtctcagacaactaaaaagtaaatccaatttatgcctgttgactgaaagagaggaaattgggcataaaggttaaaataccttcagatgtatataaattagtctgcactaaagtaaaattagttttttattgtatttatagagagctatttctaataaaaattcttaatttattcaatgtcaaatttccaaatttcatcagagaccctcacaaataagatagagattaaatttcagagctgtacaattatttggcattaaatttcttggatttttacttattcttcagtaattgcaattgtggttcttttaattagatagatcacatcatagaaataraagatagcatgtgatgaataatagaaatgtttactttgacaattaagtgttataaaatgcactaaaggatataccttactctgaaccgagataaagggtatacaagcaaattctgattgaattctttgtaaatttatatgcttatacagtgagggacttctgcaataaagtatattcttttgattagtgtaagaggatctccattttgaagggaatattttgtatacttttagaaagattaggaggctgaagaaatggttctggattaatgttttagaaatctgtttataaggctatattaatagaagggctatagaaaatacaaataatgtttatgagaaaagttggtttgtttttttcttcctctctctcatggttgggatcttcattctctgaatgaatagctagtgggaattatatatcaaacgttaaatactaccacttatttttttgacatcatttactgattttgtattacaaaccagtcatggaaaaatacgaggatgacacaaagaaaaacaaaccaagggccagctagtttcagtgaaaataaatgcttttatactgaactaaaattaaaataaactttcctcatactttgatgccttcactagaccacttgagcttcttcaggggcctagagttatactgttgtttcctgataaataaacccatgtaaaaatggaagtgagtagaaatgtcagtaatgcagcctttcccaggttgaacctaaaataatcaaaagggtcagaatgtagtttaaagagagtttattcaagtgcaaaggttgaggacctcagcccaggatacacttgcaagttgccttggagagtgctctggagaacataagaaaggttcaagtttttaaagaataaagaggatcactcaggagagtgagtaagtgcaaaaattgttcttcaggaattctcattgacttacagaaataacattggttagcgattggctatacatggttgaactatagggtgtataacattttatggctacttggcttcagtctgcagcccacatagcaagtagcttcaagaggtaactatgtagctgaagggagagtgagatgtgactgctgttactttttaaatgcctttcttgccctgatcatttaaaggtgctcctattcctcagatataaggtttttttcctttcttaccagaaaggcaaattgtgagccaagcaaatacctgaaaggtgactgttatacctcattaagtatacctcgtgaagagaaaaaatagataattcttagctcttgctgaccctcataagtcaggccctgtagctgtaggctggcattagattgacggggtaagtgacaagatgacaaaagaggaagagaccagtgactcaccactgtagtcactaccataaatatgaaaacagtccttttcaggaagtactccagaaggattaatatcgagatcatgtatactacaagagataaaaattctatcacataaatttgtatacaaaaagacatatcatatacaaaaagatgtagggctaattacaccagaatgaatgtagggaaacaggtatttggagctagattgatctttttgctgtctcctactttttctttctttgtctttctgtcttgagtattccttctcaaataagatacattccaagttccaagagtccagttgtttatgattcaaagtaattcttccagaaaagttagaatcatagaattttaaaggtccaaaagaggctttagagattatctagcctcacactctaatttttcataagacattatcccaatccaaagctacttcctggcattagtgaaactaggacctggatctcctaactccccatgctagtcttgtccactgcactgcagtttcattatttaaatatttggaagaatttctgagatgccaaaatgtgtccacagaaagatctttagagcacaaatcttataaacagtgtcccatttctagttgtcaagagcacaaatcttgtaagtagagttccaattctagttgtcaatgtgaaattaaggctttgaggataattaacggactgaaggaaaaagatgctatgcttcaagagaaaggagtaggggagtatcatttataaaacatctgctgtgaatttgttaatcaactaaataatattccattttattctcacaatactttcctcacttatgatgaaagtgtcattaaaatcattttaaagatgaaaaactaatacttatagaagtcaactaatttgtttaatgtcacgcaaattagtgaagtagctgagaaaggacttgaactcagatctaacttcaaagcctgtactctctaccatatgatgttgcttcccaagtgatgatgatatagatgcataggatttacagagtaaatgaacatattaaggagaggaggtaaccatataataaaattactatcagtgatccaaaggaatttgctaagattctacaagaattaattctcacctatctttagctcataatttttaaatcttaaaacttatgtatgttacatatacatatgcacatgtatgtatatattatgtgtatatgtgtatttttatatattagttttagagaattagaactgttgccttagacattgaaattaatgtaattgagtttataattgataaacttaaaaggcacctagcattttgtttttttctcctaagtatgaaataacaaatacagaataatagctgacggtcttttcctttagaatcttccctggtaatgagttccagtgcaacaaagaaaattacttgaagctttgacttttcagaatttctcctgctttaatttaaagcctgtttatcacagttttagcttttagcataatatcttgttgtagtagtaatagtaaatgtatgttgaataaatgaggaaaataatattgtggttataattcattatgcattatttctttaattttatgagcagtcaaaggtggctttttcttagtggtctttatcagcatgctatttaacagaggcttgagattatattattcctgtgcatttactgtttctttccctattaaattgaattatactgctcttaagtaggatagagggtagattattaattattgttggcctgatctttctgcaggttcattcttctggtagtttttgttggtttatgatatttgactggtttactcctctttgcatagctcctaaccctgtggttttcaaactggagcttgcatgagaaacaactggaaggcttcttaaaatacagatttctgggacctatgcctagagatttctgaatcagaaggtctactttggaactcaagaaattgcctttcaaataagtttccttgtatcactaatgctgctagtccaaggaactatattatgaaaatcactactctaacccagtatgctgttaattaacactactaagttatgacatatttttcttggggtaagtttatttaccctttgaagatttcttttatataactcaattcttacattatttatttcattaggtttgagtaaatatgggaaaagtcacatacaggctgaccgttatttcaacaagccatgtttgaatacatggttgctaaaatgcttaaatctattttatatgtttcactatttctctcttatctattcatatgtttccactgtaatatcttaattcaagctcttatttgcctgttgtgtaatcctctttggtagcctgctaaatgcaattttttgcttcttgtctcgtttaactctgttgtattttgagagggaatggcaaagagacctggggtgcacagaagtgtttaagaaagaagcaggagcatatgcagagatcaagagtgaagaaacaggaatgctgaatttgaagaactggaaaaaagttttagtattaaacctttatttaataaaaggagaaggggtaaaagatgagatttgagcattacatgatatcatgaaaagccttttaatccatgataaaaatcaaacttacctatgaatttatttatatgactaaacacaagacttgtattttacacatatccctgtggttatagtgtagccagcaactaatagacagttgggagattgttggaataaagaaattgctaagaaagtagtggttggctgtggggaatgaagaaaagaagatgagtgctagagataattcagttaggagataaagtcaacaggactggttggtttgattcagatacagtgagttcatgaggaaaaggggtaaatcaaggttactacttcaaattctgcttttggcaacttggtaaatagaaaaaacatgcaaatagtattgttggttttcttttttcatttcaaattgtttatttctagcatatagaaatacagttaagtttgtgtattgattttgtattctgtacccttcctgaactcacttaattctagtagctttttgtaaattctatagaattttgtacctagattatcatgtagatatatggtaaattacattgattttcaatttttaaaccaactttgtgtttctgggataaaccccaagataactaactgattgtatattaaccttgtatcttgagaccttgctaatacacattactgttagtagttgttttcattgattccttaggattttctgtgtaaataatcatgtcttttgtaaatagggacagttttacttcctccttacaagtctttatcctttttgtttttctcattttttaattcattattgcactggccgaagccagcagggcaaagatgaatagaagtgataggcgcagactaccttgtcttgttcctgatcttagaggaaaataccgaagatactgtttccccatcaagtatactgttgagtttttcccctaaatcaatgtaactgaggcataaattacagagaataaaattcagcagccattcataatgaaaacccaactaaacttggaaaagaaaggaacctttttactctgacaaaggacatttaataaatatttaaagatgcatccaggaaatgcaaagtaaaaccacaatgaagtagtacttcctctagaagtagtatacccactagtagtatatccagtgaagtagtatatccactagaataattaaaattaaaaattatttcaataccaaatgttgacaaggatgtggaacaactgataaaattgcttgtggtaatttaaaatgatacaaccactttttgaaaaatagttggaaattttcttgtaaaattaaacatagatttaatatatactgttgggaacaggaccccccaaaatctggccataaactggctccaaaactggccataaacaaaatctctgcagcactgtgacatgttcatgttggccataatgcccacgttggaaggttgtgggtttaccggaatgagggcaaggaacacctggcccacccagggcggaaaaccgcttaaaggcattcttaagtcacaaacaatagcatgagtgatctgtgccttaaggacatgctcctgctgcagttaactaacccaacctattcctttaattcggcccatcccttcgtttcccataagggatacttttagttgatttaatatctatagaaacaatgctaatgactggcttgctgttaataaatacgtgggtaaatctctgttcgaggctctcagctctgaaggctgtgagacccctgatttcccacttcacacctctatatttctgtgtgtgtgtctttaattcctctagcaccactgggttagggtctccccgactgagctggtctcggcatataccactgagaaatcccacttttagctatttatccaagagaaatgaaaacatgtctcataaagccttgtatacaaatgttcacagtagttttattcataatagcccaaatgtgaattaactttaatgtccatcaataaacaaagggatgaaaagtaactgctgtgtatctatagagtagaacactatatggttccatttatattaacttacagaacaagctaaactgacacatagtgaccaaaagcagatcagtggttgcctaggatttggcagactgattgcaaagaagcacaggaaacactttagggtgatagaaatatcttgattgtggatggtggtggttacctggctgtacacatttgtcacaatttaaactgcatattgcaaatgggtgcagttaacctggctggacccacagtctgtattctgtgtccaatttgggagcagtatctctacttatttcttaaaggttcaaactcctctttcttgggactctggagtctaactatacatgcatagttcagctgtcagccagagtttggagctaatcctctttctgagttctccttttcagaatctcctcctcaattttctgtttttcccccacccccattcctaaactctgtcctctgacacctcaagttagtaaggatgtcctctgcctgtgtaggatttgaacttgcccgtaggcaaagattgctaatatatatctcagcccttgcagtttttgtttttcaagagtagactttcctcctctttctgcctacttttggttgctttccagtgtcaaatagtacactcatgaacacacagagaataaaaatgaatgccatcagcagacaagaaattttcaagattttttaaaagatcgaatgttgacattcagtgttgacaggattggtggaagagtcaaaccagaggaaaacttaccaaaaaggtgttgaagaggaaagatttctgggtaatgtagtacgggtatcaaagtgattaactgagaaactatttgaggccacttggcctcctcttttccccatttctaattgaacagagggcagcagatacagttccctgcagaataaagctgtgtgttagggtatgtttgttgggggaagaactcatttttctttagcaatatgattatccaccttgaaagctcaaatgaatcatttggaaaactattataactggtaagacttagagctcaacaaacatcagtacctttttatataccatttaggagacatacaccaaaaaatagcaaatcacgttttttttaaaacccagattcattaaacatctaggaataaacttaagcaggagtgtcaagagccatatgaagaaaatatagaactatgcaggaagatataatagaaattatgaataaatagagacacaccatgctcataatgaggaatgctcagtattgtaaaagatgtcagcactatttcagtttcattggtaaaaccagtggtattgctggttagtatctgaatggaatttttggggagaagatttgacaataggatcctcaacttcctctggaagagaatctggataaacttagccagatatataaaatataatcaactcgtcctaacaggtataaaaatggaatatgatgacatagtacttaaaatagtgtgttcttagtatcgatataagtcaatggggtagaagaaacagcccaagtatcaatttttgtctatatgaaacatagtttattataatgatggtattcaagataggtattggaacaattggttaaagatgagaaaatatgtatttagattcctaacagataccatatataaaaataaattccaatgtaaatttaaatgtaaaacaatagtatagttgggtaagagttggaaacatttttaataatatttgttatgatcatcctaggcaacaatagttcmtgcatttgtaaaggaaatgttgatagatttcactgcataacatacagagtatacactgaggacaaaataccaactggagggaaatacttgcaacatatgtaacataatattaaaatctagaagagcttctacaaataataaataaaagtcacataacccaatagaaaaatgggaagatagcatgaacagaagaagagtaactattaataacaaacgtgacaagatattcagcttcactggttaatcagagagatgccaattacaatgataacactctttgcatactagattagcaaaaatacagattcacactacctgtttctggcaaaggctcgggaaatgtgcattctcaagacagttggtgagagtgtaaagtgaaaaagtgtttttggaaggcagatggcagcatatatcaaaatttaaaaattattgtatggaagaatttctcttgcaacactatttttaataggaaatagtaatggaaaaacctgaaaccctcataagagaatagttgaataaagtatgtgacatctgctgggcatggtggtgcatgcctgcagtcccagctaccggggaggctgaggcaggagaaccacttgcgctcaggagttctggactatagtgcactatgctgattgggtgtctgcactaagttcagcatctaacattattaaatgcttgtatgcaggtgtaccacagcattataaggtatacttgctggtatgtgaacagaggctacctctttggatggaagagtagaattggaagagccataataaaggacttttatgtttttttgctctgtatgtgtgtgagaaagagagagagaaaaaaaaagcttgaatgttttatattgatactgttattttagtaataattttattatagaaaacaaaaggataaacgatcattcatctaaacttggctatgcttccaaattccttgggaaacataaaaaaattgctgacaccctatgcctacagattcatggttagttggtctattcacctaaatatctgaagaaagtccctttgygagtctgatactcattgactcattcatagtcacccatttggttaaatcacctgattttataataaaatgatgaaagacttgagaggtgaaaggggagctgtagtgggaaaatattcagacgaggatttattgaaccccactagttctccagtattgtttttaattttattaaattttgttttaattttatttagccattgtttttgttattaattttattttatttagcgtagtgaaaggtaaagttgggatcaaatccaagttttccacaccttttctttctactgttttactaaaccctatgttttttactggatctagtgactctccagaattactttatttgggagatgctcttcctcccaagtttctaacttaatttctagtaagaaataggattgatttataagagaaacaaaaggttaatatcacaatgtatacagctaccattaagatgagtaatggcaggtattacagctaaagatttctaaaaatggatagaaaatggaatattttacagatgaaataggcagtacttgatctttgctatcttgggcataaatactttctcttcctgaaatatcttacctttaactcacatccttcactcccgtcacatcttttaccctacccctcttaccttcacattttttaagactcagagtaaaagtcactttccctctcaagcctttcctgactaccactactccccaggtacagtttacctctttcttttttatctgtagcagtgatgatactttcttgaggtgatatgtttcatgacttaccagtttttgaggatagggaccatgttttgaacttatatcaccccagtacctgacacagtgccttatagaaaataggcttcaaataatgaatgagttaagggaaaaaagtatacatctaaaacttgatactgtggaaaagaatataagctagaatttaatctccaaagtgatactgaaacagatgaagaaataaatatatggctgtaatttgtccaaattatattttctttaagaccaaggctatttacaataggaaccctgaacagtttggagttaaattactttattgattgattgaaacaaggtcttgctctgtcacccagactggagtgcagtgtgcagtggtgcgatcatggcttacagcagcctcagcctctcagactgaacctcaacctcctagcctcccgagtaaccaggactataggcatgcactaccacatctggctaattttttctgggttttttttttttgttgttgttgttgttttttttgtagagacgtggtcttgccatgtatctttcccctaatttgcagaaagatacagatatgcaaatagaagaagctcactgaactccaagtacaatgaaaatggtcgaaagagttttgaaagcagcaagagaaagagaaaagtgacttgtcacatagaagtgcacctcaatgaaataaccagtggatttcttagtagaaaccatgcagatctcaaatgtagaaattttattactacgttttggcagatacaaaaattaactttgtcatgtgaagcagtatatagagtaaacaagagattcttcccagggaaaagaatgggaaattggctttgaaaagattagaaaccatgagtcatcaggtaaccgattagcaatgtctaatcgctttgaaaggtttgaaaagattagaaacagagctccatccctaagtagacactccttcatgaatggggttgatgatgtagtaccgtctcttgttagctatcagtgttaactagatagttatagtttctaataaaatattakgacatttaaaattcatatatattgtattgcagacagttcagcttttctcagatgtagcacagtaatccagctagtacagcagttcttggcaaagaaaatgcagtctgtaactaaatataggtagtgatataaccccaatgctcatttatataagaacaaaattaagggtttatcatatgtgatttcaagatgtattaaaacagttactttaagcagttccactcccagatatatattgaagagacttgaaaatgtatgtccacacaaaaatttatacacagatgttcatagcaacattattcataataactaaaatatgggaacaatccaaatgtccatcaagtgatgactagataaaccaaatatggtatagctatacaatgaaatattcagcaataaaaaggaatggcataccacagcacactcattgggatggctataattttttaaagatagtgttgatgaggaagtgaagaaatggaaatctttatacattgatattggagatgtaaaaggtacagccattgtggaaacaagtttggcagtttctcaaaaagttaaatatacaattatcctgtgacccaacaatactactcctaggcatgtacccaagagaattgaagacatgtgttcacacaaaaatgtgtacacaaatgttcatagcagtattattcataatagtcgaaaagtagacacaacccagtatcagccataaaaaggaatgagttattgttacatgccacaatgtagatgaaccaagaaaaccttgtctgtgaaagcagacaaacacaaaaggcaacctgttgtatgattccattcttacgaaatgttcaaaacaggtaaattygtagagacagaatgtargttagtgattgttaggggcaacagggaagggtacattgagactgactgcgaataggtacaagattacctttgagggtgatggaaatattctggaattagatagtgatgatggttgcacaccgtagggaatatactaaagtataatgacacatacatgttaaaatggtaaattttgtggtgcgtgaaatatgtctcactaaaaataataaaaataatgctgagtcttggcatatgcattttataatttgataaattttgccaagttatcctccattgagatggtacaatttatactttcagaagctatgtatgagagtgcctgttcttctcacgtgtgtgtcatcaaacgttttagtctttgcccaatattactgttgaaaaataataacccaatgtagattacttttgtatttctctaattatgatcaagattgactatcttgtcatatacttaaatgccatttgtagttccttgattgtgaacttgcattcttattcattgcctgtttttctattagtgtcagttttttcttattgatgtgtagaacttgtttatatattatgttttttcctagtttgttttgcaacttgatggatttttacaatgaatgctatttttaccattcagtagtgcttgttatagcactgttccatcttcctggtttaaaccaagaaccttaaccctatctcactgatatcattgatgagagcaattaaatttctcagtgcttatctttgtacttctaagctatgtcagcttgacacatctgtgtatgtaaatgtgtttgtatttcttttaccagaatattttgaaggagaactgaatgaggaagacaagstttcaatagattaattgatctgaaattttgattgtagacagtcattaaagtggatataatttatgacttttcctagaagatatgaagaacaaaaatcactagattaatagatagatggatgggaaggtggataaatggtagatgattgaggaaagaagtttattaaacagggctgaaaaccctacccccagctattgagtcattcagcaggtttagtccttcagtaaattatttatttatttatttacttatttactttgcttactttcttattttgagacaggggattacaggtgtgtgccactgcttttgacagtatttttaactcatattatgtcaagccctgtgctaggtgctgactctacagtattgactgaaacagcttttatccctggtttcattataatctaatgaaggagtcagacaaaaaaagacaaaaggtgaaacaaacttaattgaggtaatgtaatgaagggatataatgttccttacttgttaaatgggagctgtacgacatacttttggtagggtggtcagttgaaggcctttctgaggtggcaggctttaagctgagacttacggataatgaagagtactgtaggaaatctagagggcattctgtgaaagggaagcttgaaattgagggccttatgatggcatctttcagaaacagaaaggaggccattatggctggaatttagtaagctgaggtggaagaggtaagaagagaccatacaagctgtagtgtaaggactttggatctagtactgagaaattatcaagaagtgttaatcaaatgagtgacatactcaaagttatgttttaggactattcttgcttctttatggagcatgaagagggacatggtgatgagaaaatcaactgggagagcaattaagaggcgatagagcttagactagagagataaggatgataaattgataaattctagatacagtttgcagatagactcagttggatttgatgtgttggatgttatggacagtggagaggaaatcattgttaattactcccagccatttatttattattaaaaatctatgtgttctgcctggatttaattatgggtggtagaagttaggtttataaataatgatacataaacttacttggaaaatactaccacatctagtacctcattttgggttctttgatttttttttaattgaaacatgttagcagttgaagtttttctgaattcagtcctaattgtccagaaatagagctaaactggccttcagaagtattgaaactgcttaaaatttctcacacataaaaatcaatcattctcaaaactaaacattatatctttaaaaattggtgggtttttttcaaatgggaggtattttatttttaaaggaatgaggcaaatgttataaaatttctcctcagtggattttcaagttctgtagtagaattttgcctgaatgagtataaagcccaagagcatgtgtgtgtgtgtgtgtgtgtgtgtgtgtgtgtgtgtgtgtgtgcgtgaagggtgaagagaattttgaaaacttgccagacttttaagaaatatagttagattaatgtgaatcacttcacattcacttcaggttgctgcaattattaactatctttacttatgaaatagaggttgttgcacattgtactgtttgatggaaaagtcaaatcaaaatcttaatattaacacattcactaatttctagcataattttattacatttgatatgaaaaatattgtctgtaatgcaatgatttttttcctacctgggccttttctgaaatgcagcttttagcattaatctccaaatggaacagatttgcaagaatcaatatagtagttcctcaaggaaaaaagaaatcagttttatttatttatttttcagaggtggctggatccaaacaaaccaataaggaagcagctaaagagtgagcatacatatttacttaatgttttgcaagtttactttataaagataaaggattaatatagtctgattaattagaactacttttattaattctaggaggatctccttacagtttgaactttagagtcaarttttttgtaagtgaccccaacaagttacaagaagaatatacaaggtgggtttatggatatatttttcttgaaaatattgtcaaaactctaatatgaaattttgaaattaattaggcaaaaagaaattactrtggtgtaattctgagctttccagtcagtacacagaataagttatggctattccaagataacgttttcctccttttttggatggctgggagagtgtaaggggatttagaacctcagggctgcccagtccagccccagcttcctgaaccatgtaaatattaaaaatttctacttgtgaacactgcttaagtgtggctataattaattgaggtcatcaaatgtgctgaaattgtatccaaaggatgctgtgtggtgagaaatttgggttttttttttcccatgtgaaagcatattctagtatctttttttattggggagaacatagaatttataaaatatataaccattatttgcgggtcagtaggtaccttttgtcccctatgtgtttttaatctttggttccaaaaaaatataatggagtttataaaggatgttgcagagagtgcactagcatgttgaggcctttacatgcccacttgactctccattttaagtctcagcttatgttactatctaattttatggtcatttcgacttgacagagtatatacacatgaatgatccagatgaacattttgataatgttcttgattatagggtgaaatattgaaggtagaaatggagaaataccaacagtgtagtaactgtcagtattaacctgaatgacaaccttgtgtgttgcctgaaagacagaattagtaatgagttattttacaaagacagttaaaaattagcatgttatactctctgtaaaattctcagatataagaatataggccagtgactacattcagaattactctaaaagataggtgtcaaaattaaaaaatccatacctaaaattacctatagatgggatgttaaattttaatgtattggttatcatttaggatactgtcttggagtagagaaacaaaaggataaattatttaattagctgcagctgccagttctaaggtgtttgcagagttttcagtagtaaaccaagtgagaaaaattagattgaaattctagagatttcttttcagtcagtgtgttttggggtgggtgcgcaggtgttcctttttttttttttttttttaacaaatgggagaactcagtaatgtagtctctggattatgtaatcctaatgcttgcaactattagtagaatccaagctaattcctcttgaaaaactaagttgtggccgggtgcagtggctcacgcctgtaatcccagcactttgggaggccaaggtgggcggatcacgaggtcaggagatcaagaacatcctggctaacacggtgaaaccccatctctactaaaaatacaaaaaattagccgggtgtggtggcaggcgcctgtagtcccagctactggggaggctgaggcaggagaatggcatgaacccgggaggcagagctggcagtgagccgagatcacgccactgcactccagcctgggcgacagagtgagactccgtctgaaaaaaaaaaaaaacaaaaatgaaaaacaaagtcgtgttatatgtatacaccttagcttaatattgtagcccttaaaatattgtcagttaaaactatgtttataatgtacttcacttgaaaaactgtctttgaatttctgaatggaggtagaatgtgttgattcttttatagcctgcattgaaaacataataaggaaataaatatgtttcactaataagttgaaataactgcctgaagcagaagaaagtaaaatcaagtttgatggtagtcaaggaattaatttgctctcagacccttttataatggaatgttatggaatctyataactggtattgtttggtaaaatggggtaaatgtctagttttttgtaaattttactaccatagtgtatatcagtgatttttctactctgattagaaattagaatcatttgggggagctttaaaaccataatgatgtcttggccacatccctagataattctgattgaacaggtcttagatgggacctgagcataggcatgcacaagttcccccaaatgattctaatatatagccaaggctacatattagccaaagctttaatgcttgagtagccttaatgtgatggttatgattagtaacagtgcaccttctgccacagctgctaagttttcagaactagtttagaccccaggaaacaggaaatctgctgcacctccttaccttgagatttcaagaatgtaaatagtatattcccaatatgcagatgaatctgctcagtaattctttctcagtttttagctatatgaaagttgactctgtttggtagtgagccaagaggagaaaataaactctatgtaatactaaattaatttttaaaatatccctttaactaatgaattagtttagtttaattagtgaaaaatattcctttaattttgaaattatgggggggtggggggcgggaaagaatggagtcaaacaggttcaccaggttaaacaccgtttacttttagcaggtgctagcatcattagaactgaatttttccaattcctgagatacatatactaggcaagttgatactactttcttcttacaaatgtagaaactaaggctcagccacattttaactaatttgcccaagatcacaggctagttttgcctaggacttgaattctggtttctacttttaacagttaagttcttgcctcttggttaaatgagtatgtaagtaaaatttggcaagtataggcattatttatgtcagatttacaatattatggcaaggatatgcatgacctttaaatcctgactataagattgtttcttaccaggaacctttaactttgaatttttttttttttctttttttgagatagagtctcactctgtcgcctaggctggagtgcagtggcgcgatctcggctcattgcaagctctgcctcccaggttcacgccattctcctgccttggcctcccgagtagctgggactacaggtgcctgccatcacgcctggctaatttttttttttttgtatttttagtagagatggggtttcaccgtgttagccaggaaggatggtctcgatctcctgaccttgtgatctgcccgcctcggcctcccagataactttgaattattaaaccaaaacaggcctgatagaaatatactgtcttggattgagtaaatagattatatttataatattatgcactaagcctcacaagaagttatatatgaagccaggatgtttgtattctttttttttgtaatgaatatctgattctctgaaaacctctttggtaatttgaatattgtcatggagctcttcagtgacttaatcagccaaactagaatttctaatgacttttgactcttggaatatgtactttttttagtttagtgaaataaaaaatcttaagatttcctggttaaacatttaaaaccaaaaagtttggtcttctgccacccctatacaacacaggtgactttgcccaagtattgacaaatctttgagtgggttacccactagcagagaccaaaggacaatgctatcttgtaagcaatgacagcaggcttgttaaagaaaacctaagtttttgttggtttcacaggaaattgaatacttgacaattctaacaatagtagacaaaagtattcttcccctgccccgccaatcaaagagagacttccttaattcacatggaagtgtataggtgcttttctgtaacaggcagcttcctgccatctgatgataaaatgatcaaaacgctggcctgtccttgtagctggctttctatctcagaccagcgaaaatcatcgctggtctctagtgcattgcttacaatgctcttccatgtttgtgatactcaggttttctatgcttcccacttctttctgcatataccaaccctcaagagtatttctccctctgtcatgtaactatttgaaatcttgagggcttctataatggaagctagtggaaacaagacattcgaaatacaaatttcatacatcaaagagttttaaagatttagattcatgagcttatgaaatcttatttttaaactactttacatgttttaatatgtaaattataaaagcaaatatttaaatatgtttatttgttaatgtaagtatacagtttcttagaattgaaattgttacaattctattaaatgctatcctttttgtttgtttgtttttaaggtaccagtattttttgcaaattaaacaagacattcttactggaaggtgggctctttaaatttcttaaaaaattttttgtaatggactttaaaaatactttttaaatctgtgttaagtaattcatggtcattgcaaacaaattatttaagaaggttacatgtagtgtgaattcctttcatcagataagtttatttcttaacagttaaaatcaaatcacatgaaacttcaagtgtgattgtttaacaaattatagcacttttgaaattgctatgtttaaccttcggttgtgtatttttgttttgttttattagattaccctgtccttctaatactgctgcccttttagcttcatttgctgttcagtgtaagtatcagcccatttttaggtcaaatagcatataactgtggtttgtgttgctagtacattggcttcaatgtgggagttctttagaaatgttgctatatagaaaatagtgactgcagtggaaatgtaatgaaatctccagttagttagcaattactatgatttttgaaaaaatttcctctgaaattgagaccaagaagaatgttaaatggattgctgtggcttgcttaagtggttatattagaaacataagtattttacatccagaaatagaattaatggcatcgctgatttgactataataatttaaaaatttgtttattaaaatgtgaatgttttcctttcattattagctgaacttggagactacgatcagtcagagaacttgtcaggctacctctcagattattctttcattcctaatcaacctcaagattttgaaaaagaaattgcaaaattacatcagcaacacatgtaagagttttttagttttttatttgataaacttcttaatggcattctttctagagaaatgtttgaaattctaatatgatggctgtatttaatatagaacaattactgttacctaaaataatattatcataaagaaatataggtgatctatgctaaaaaacgatttcatagaatatatgaagctcattttcatttctattcagagccattaagctatctgtaaacagatatttatttgctattgtgtaatagtctaaataattttagaatataaacagtatagtcacaatatagagatcagtctgcttagtaattctttctcagtttttaggtataaaggacttgattctccttggtagtgagccaagaggagaacaggaactctatataatactgaattaatttttaaaaaatatttctttaagaacagtacaggttgaacatccttaacccaagagtttgaaattcagagagctctaaaatttaaaactttttgagcactgacattacaccacagtgggaaattctgcacctgatcccatgtaatgggtttcagtcaacattcggtgaaaactttgtttcatacacagaattattttaaatattatataatattaccttcaggctatgtgtataaagtgtatatgaaacataaatttcatgtttagacttggtttctataccaagatattgcattaagtatatgcaaatatttcaaaacttgaaaaaatctgaaatctgaaacacttacgatcccaagcatttcagataagagatacttaaccttatcaatattcattcattaacaatattcattcaactttgatttttttgtgtgagtataattttatatattattttttcaaaagagatttgttgccttgaatagaaagtaatattgtttattggttcagaattcagttgtgcttcaatatacaattcagaatactcagggaaaaactaaggcagtgttgcgtattggctaagagtctgaactaaagagccagactgcctggtttgaaattctgtaagattacttactatcttataaccttggccaaactgttttatgcctcttcttctctgtttccttacgtaaactggggataataaaagtatctatctctggagttactgtaggtcttaaatgagtttatatacataaggttctcaaaaccatacatagcacattgtaggcactgaagaaatgttagctgttgttattattaagaaaacttactttcttttactaataactcatgtatctaaaacaggataacaaaccatggccattgaaayggagtctcgctctgttgcccaggctggagtgcagtggcgcgatctcagctcactgcaagctccgcctcccgggttcatgccattctcctgcctcagcctcccggtagccaggactacaggtgcccgccaccatgcctggctaattttttgtatttttaatagagatggggtttcaccgtgttagccaggatggtcttgatctcctgacctcgtgatccgcctgccttggcctcccaaagtgctgggattacaggcgtgagccaccacgcccagcccctattgcctatttttatatggcccacaggctaagattgttatgtagattttaagtggttgcagaaaatcaaaagaagaatagcattttgtggcatgtgaaattttgtgaaattcagtgttcatgaataaaacacttactggaacacagataccctcattcatttatatgttgtctatggctgttttcgcacaatggccaagctaaatagttgccacagagactgtatgtcctaaaagcctacaatatttactgtccagccctttgcaataaaaggtttgctgattcctgatctaaaatagactaatgactgagtttttaatggactacctaatgtggtgagggggctattttaatctaagtaaattccattcatagtgaaagttatacatacagcatatcagaatcaagagtttgaagataagccagatttttttaaatttaccgataatgaaaagactcttaaggaaaagcttattgattatatatatctatttggtttaagtaaatgattcatcagatctttaaatgaagaaaaacagaagtatccactttaactggagggagtatatatttaatttaattttatagaaattggaagtgtactgttttttttgaggagtcgtgttatgatcatgcattagcgggctgttggctcccttttctagtagcattagtgaatagaaagtttgtatctttgtttttgtaatttgctgcttttgctctgctgtagtctgataataacagataactaaggttgtaaaaactatatgtgaaataggagtaaatctatttttaaaggccttacatttagagcaatggttcttcaacttgtgtttataagaatcacttggtattcttgttaaatataaacagttttgacctcatcctttctaaatcagactctacagaatagtcttcttaaaccatctgtgatgaaagatgatttcttccccccagctgtcattattgtgttacttatattttgtagaatataataaaaattaattactagaaaaataaagtggagaaagaaaacaaagacgtaaaaaatacaagtcctcatttgtttgtttttttgttttgtttttttgctgttagatttaacagatattacccaggcagattgctatacaagcctccaacactcaggttccatactgtgaatcaacctctgtctgtgcaccacactctgagaagcactgccctggaggttggcttagaatctgcaagtttcagagataycctgtgtgatttaaatgcagatatggtatatgaaccaaattttgagaaatactgcttttaagttatatctaaaagtgaggggttttgttacagtcacccatataaatagtgaggagctttaaaaacttggtgtattcttgtatttctagaaaataagacagtattctggaaaataataattwgggttactgaaaatgtgccctccagataagttagaggagtagtcctgcatggtgtttcatagatttaattagactgctcagttttttcagataaatagcctttttctaatttagccatatttatttgattgattgattgatctcatttttaacttaatgatgtctttatagaggcttatctcctgcagaagcagaatttaattacctaaacacagcacgtaccttagaactctatggagttgaattccactatgcaagggtaagtgaagaaaacttactttgatgttgttgagttaggctccgttactcaatataacattttttaagattagataacaaatggaataagttatgattgctgctgacacagctgcactgaaaatttcctctgaatttaagtattttcacaataacttaagattcaattcccgaatgtgaaggatggttaatgtggattcttcaaggtagtgttttatatgtaaagataatttttacagaccgtaagatatagtacctttagaatatttattttaaaatataattgttaggctataggaaaagtggcttttgtatacttttataataatgatcattaaaaatgttctcacatcactgaggcctgtattagtgcacttactttgttttcatcatttaaaagcactattacgagtttttatttataaagcacaacatggagcatattaacatttttatctccccccatccctgtagtgaagtggaatttatagtcactgactttttctatattataccgtgtgacttcttttcccttgtgtcaaacattgctgcctttgaaaaactggtaacctcctggcataagcatatttgtgagtgtttatcctgtatttgtgtgtttcctcatgtttttcttgagttctctatcaaaagttcttggagtacagctattctatacccagtgaaaagtggaattataatcatcagttgagttggtgatagcgtttatcttctcttggaaatgaatagttgagcctaaaaaggatatcaacctgaaagagaattcagagccaatatttttcttagataattattttcaatcatgttaatactcagacactcacaggtacacagatagttgttgaagtactcaaagttctacttcatgtaatggttttatcctttaggaccttacctgaccatgttctgggagaggaacattagttcttatgtttcacaaagcttatgtcaatctttcctttaaaagaccagatgaattgctttcctcacatgattttatcttgtaattctgagtgttacttggaaatctttttgtctgattccatttaaaatgtgtctcttagaaaccttcagctttctttttttttttccttcaacttttattttaagttcaactttctgctttctttaaaatatgcccctttattttccttccttatttagggcctatatcttttgaacatgattcttaaaaatgtaatgtactggtcagtatttgtgtaactagtttgttttttattataataaagtttaaaacagatggaactttaaatatatgaattaaactatggttaaaaataaaaaggggctgggcataatgtatcatgcctataatccgaacaccttgggatggcgaggcaggaggattgtgtaagcccaggtgttcaagaccagcctgggaaacataatgagatcacatctctacaaatttaaaaaatgacctgggcatggtggtgcatgcctgtagtcccagctactcaggaggctgaggcaggaggatcagctgagcccaggagtctaaggcttctgtaagctatgatcatgccacttcactccagctggggtgtcagcaagatcctgtcctttcttctagtatttttatagtttcgggtattacactttagtctttcattgtcttgagttgatttttgtatatggtaagagctagatgtccagttttcttcctctgtatgtggctatctgattttctcagaaccgtttattgcagagaatgtcctttccccaatgtaagttcttgttgactttgttgaagatcagttggctgtaaatatttggctttgtttctgggttctctagtctgtcctattggtctgtgtgtatgtttttatatcagtaccatgctgttttggttactgtagccttgtaatatattttgacatcaggtaatttgatgctttgttctttttgctccggattgctttggctatttgagctcttttttgtttctatattaattttaggattgttttttctaattctatgaagaacgatgttggtattttgatagggattgcactggatctgtagagtgctctggcaatatggtcattttaacaatattagttcttcagatccaaaggcatgggattttttctatttgtttgtgtcatcttaaatttttcatcagtgttttgtagttttccttgtagagatcattcaccttcttggttaaatttattcctaggtattttttgtagctattgtaaatgggattgccttcttgatttctttctcagctagatcattattgatgtatagaagtgctgctgatttttaatgtgttgatttttactgaatttatttatgaaatctaagcatttttggtggagtctttaggttttttttagatataagatcatatcatcagcaaaaagaggccatttgacttcctctttcccaatttggataccttttccttctttctcttgcctgagtgttctggctaggacttccactactatgttgaataagagtgtgaaagtgggcatccttgtctttttccagttcttagggggaacaatttcaacttttctgtgttcagtatgatgttgactttgggtttgtcatatatggcttttattattttgaggtatgttccttttgtgcatttgttgagatgttgaagtttttcaaatgcttttacaatgtcttttgagatggttatatggtttttattcttcattctgttcttgtgatatatcatgtttattgatttgtgtgtgttgaactatccttacattcctgatataatgtattgtatctgattgtggtgtattatctttctaacatgctgttggatttggtttgctagtactttgttcaagatgttggtgtctgtgttcactagggatattggcctgtagttttcttttttctagtttttgcatctttgtctggttttggtatgatgctaatgctgaccttatagaatgagtcaggagaattccctcctcttcagttttttttggaatagtttcaggaatgttattacttctttgtgtgtttggtaacattcagctttgaatccatctggtcctgggcgtttctgtgttgggagactttctttactgatttcaatatcactacacattattggtctcttcaggttttctatttcttcttgattcagtcgtggtaggttatatgtttccaggaattcatttcctctaggtttcccagtttgtcagcttgtagttgttcgtaatagtctctgatgggctgggcacrgtggctcatgcctgtaatcccagcactttgggaggccaagacgggcggatcacgaggtcaggagattgagaccatcctggctaacgcggtgaaaccccgtctctactaaaaatacaaaaaaattagccggtcgtggtggtgggcacctgtagtccccactactcgggaggctgaggcaggagaatggtgtgaaccctggaggcggagcttgcagtgagccgagatggcgccactgcactccagcctgggcgacagagagagactctgtctcaaaaagaaaaaaaaagtcttgatgatctttcgtatttctgtagtatcagttgcagtgtctccttttcatttctgattttacttatttgggtgttctgtcttcttggttagtctagcagtttattaattttctttatctttttgaagaaccaactttttgtttcatttatccatcattttttttatgatcactatttcatttatttctgctctgatctttgttatttctgttctattaattttaggtttgttttgttcttgctattccaggtttttgagatgcattgttagactgttaacttgtaatctttctcctttttttgtgtaggcatttattgctgtaaacattcctcttatcagtgcctttgttgtatcccacaggttttgctatgttgtattccattttcatttgtttcaaagaatttttttatttccatcttaatttcttaattgacccaatggtcatttagaagcatgttgtttaactaatttgttgagacttgttttgtggccaaacatatggcctatcttggaagatgttccatgtgcttatgaaaataatgcatattctgcattgttcagtggaatgttctgtaagtgtctgtttggtccatttgatctaatgttcagtttaagtccaatgtttctttattttttttctagatttgtctaatgctgagagtgaggtgttagtcccctactattattgtattgcagtctgtgtctctctttagatccagtaatatttgttttatgaatctgggtactccaatgtttggtgcatatatatttagaatagttatgtcctcttactgggttgatctctttgtcattatataatgaccttctttgtcttttttttttaactgttcttgaaataattaaaatctgttttatctgataaaagctgaggtactcctaacttctcattttcatttgtatggagtatttttttccatccctttattttcagtctatatgtgtttttaatgaaaaagtgagtgtcttttaagcaacatatagttgaattatgtattttaatccattcagccattttgtatcttttaagaggagaatttgatctatttacattcaaagttattggtatgtgaggttttgttcttttcatattgttaattgttttctggttattatatgtattctgtgtttctttctttttctcttataggttgttgttttgatgggtttctgtagtgatactgtttgagtcctttctcttcctcctttatatttctttacccattaagttttatacttttgtgtgttttcatgatggtaaatgtcatcattttacttccaagtttaggactttcttgagcatatcttacagaactgatctagtggtatagaattcccacaggatttatttgtctgtgaatgatttcatttccctttcatttataagtgataattttgatggatatagtattctggagtggcaggttttttctttcagcactttcagtatatcattctattgtcttccggcctataaaatttctgctgagaaattcactgttagactggtgggattttctttataggtgatgagacacttctgctatttttaggatttgttcctgaagtttcactttagacagtctgattataatgttccatgcagaacacctctttacattattatctgcttgggggtacaagtaacatgtaaatttggtcaccttatcttgcctcaaatttcaggaaggctttgctcattcttttttcatctcttttctttatttttgtttgactggattattctgaaagacctgtcttcaagttccaagattcattcttcagactgatgtaggctattgttgaagttttcaaatgtattttgaatttttttcagtgaattctacagtttcagttttttgtttgtttgtttgtttgtttttgagacggagtcttgctctgttgcccaggttggagtgcagtcgtgtgatctcaggtcactgcaacctctgcctcccagattcaagtgattctcrtgcctcagcctccccagtagctgggattactggcgcacgccaccatgcctggctaatttttttttatttttagtagagatggggtttcaccacgttggacaggctggtctcgaactcctgacctcaggtgatccacccaccttggcctcccaaaatgtgggattacaggcatgaaacagcttcagaatttttattaggttctttaaaaaaatatctctttggtaaatttctcattcatatcctgaatagttttcctgacttatttgtattgtttttcagaattctcttgggtctcacagacctttcaagtcaataatttgaattctttatttcatgctgggattttgaacttttctttttgattaagatctattgctggagaattattgtattcctttggagataccatattttcttgctatttcatgtttcctgtgtgcttacattgtatctgtgcaatagttgctgctgcttatatttgaatttgcttttgtaggggaggactttttcctgaagatttatctgtggtttgggttgagtagggtacatagacttcgattctggctgcatgcagtaatatggtctcatttatagatatcgtagacatagcagtgagtaaagtagataaaactgaaccytcccaaagcttgcattctgtggggcaagaaacaaaactataaatgaacaattatgggtatatcagagtatgtactatttgattccattgaagttcagtaactagcaaaataccagcctatattgatagaagtcagaatagcagtcagttctggaggaatgtttattaactgggagactcatgagggagctttctggatttttcaaaatgttctatatattggtttgtgatggttatgttggagtgtaaataggtacgtgtatgtatgtgtgtaaaattttgagttgtacatttaagaaatgtgcattttactatacagtacttcagttcttttaaaaaattaagcaggtcatacatcagatattgatagatgctatgaagaaaagttaagctgagaaaggggaattaagacaaacaaatgagggatcagggaaggtctcactgagaaggtaaacagatctgaaagagccatgcaaacatctgggaggagattattctaagcagaggaaagagcaatgaaatagtgtatatagcagttcaaataatagctaagagtttagtgtggcttgtgtagtgcgaacaaggagaggagagtattagggcatgagatcaaagcagacaagaacttttaagactttttttttttttccttctttctttctttcttttgaggcagagtcttgctctgtcatccaggctggagtgcattggtgcaatctcagcttactgcagccttggtctcttgggtccaagtgatcctcccacctcagccttccatgtagctgggaccacaggcatgtgtcaccatgctggttgaattttttttttttttttttaagtggagatggagtcttgctatgttgctcaggctgatctcaaacttctcagctcaagcaatcctacctgcctcggcctcccaaagtgctgggactgcagacatgagccaccacatctttataaaacattttaaggactttggcttttaattataatcaaaaccattagagagttttgaggcaataaaagacatgttgtgaatttacatttttaaaatataacaatgacttttgttttgagagtatactataagatactaagggaagagactgttggagtgatccaggtgaaaggtaatggttcttgtagtattggggtggtggacagtaatcagattttgaatatattttgaatatggaagtgacagcttttactcatgtgtactggctatgggtgtgagagaaaaaggatttggtaattattccaaagctttyggcctgaacttttactaagttgggaaagacctgggagaagtagatttagtagaagcataagtcaagaatttatcttgggacatgttaaatttgaagagacgtaaatcctcacgaaagaggggtaggcaattcaatttatagacctggagttgagaggaaaagtctggactagaaataatacatttgggaattgttagcgtatagttaatagttaaaatcatgagatgagagcactgaggaagtaaatttagtagatgttgaagagaacaggtcctcaaagttagaacacttcaatgtttagaatttgaagagatgaagaagaaccaggaaagagaaccaagaaggagcagccattcagaaaggagagcctttctttctatcaaagacacaaatgtgtgtctctgaagccaagtaaatcaggagcagtcagctttgtcagatgatgctgttaggtcaaataaaatgaggacagagaactggattagaaaagtggaggtcactggtgacttttcaagagcagttttggaggtgcagtgatggccaaagagtgatgagagaatatgaaaaaaaaaacaaaaacggagaacagtaattttgagggcttttgctctacaggacacagataataataagaggaaacacctatatagcatttactgcgtgccagccatccttcttagggctttatgtatgttaatcccatttaatccttacaacagccttgtgaggcaggagtattattatctccactttacagatgaggaaaatgagacacggaaaagttaagtaatgtgaccatataatccctatttctgtattaagagccaatttatagcttctttccaaaacctcatttttaacctgcatgtatttgaagacttttcgacagatccattaaaataatgaaacaatttacaaatgtaatctcttggaacagagaaaggaactcttttctcagattggagctatacatatgactttatccatgtcactctactgtactcaaatcacatagtggttttccataattctgatgtgtgctttcacttattgtgacacagcattattttatttttagtcaaccatctttctatatcaagcatctttatgaaagcataaataggtcactaattgttttcattttcactgaataatttgtttgcattctcatactccattaggcctatataaagcatacaaacatttttttcatcattaatgaatgtataagcctttatgcctaactacattaaaaatagacatgaaaattttaaacaagtgatatattggaaaagaacatactgctacaggataaaagaaaataatttcaacatatgttacagaaaattttttaatattcatgttttataaagagttccccaaaggaataatttttttacaacttgtaagtagaaacatatggcatacagatgtaataaacatttcacaggagaaatataggtgatcaatattatgcacttgtcactaataatgaaaacaaggagataccaattttatcagattagcaaaagttcaaaggattaaaaataactattttttgcctgagtatgggaaagtggacactctaatacattgttgaaatataaatttgtagaaatcttttggggggcaaatatgaatataatctttgctcacttccattactgaaactccattctttaaaatatttatagatgtgttagaaaaagttgtataaagatagaggaaaatatacaccaaattgttaatagcggttatctctgagaatgagggaaggaggcagggaaggtgatgaggggagtctttgacttcttatttgatatttgaaattgttgtatattgttttgaaattgttttataattgaaagtaattaagaaaattaacggctgtctccaccgtgtaaaattaatgttgttcttatgtacatcataacattgagtgggtttgcgttatcgtactgttaacatgtgatagtagagaggtcagaacatttaagtaccctaggtaattagtttgtgtatagtgtagtagtctccaaagaaaggaggggatgttgggaggccgaggtgggtggatcacctgaggtcaggagtttgagaccagcctggccaaaatggccaaaccccgtctctactaaaagtacaaaaataagctgggcatggtggtgggtgcctgtaatcccagctactcaggaggctgaggcaggagaactgcttgaacctgggagcggaggttgcagtgagtcgagatcgcgccactggacaagagcgagactccatctcaaaaaaaaagaaaaaggccgggtgcagtggctcacgcctgtaatcccagcactttgggaggccaaggcaggcggatcacgaggtcaggagatcgagaccatcctggctaacacggtgaaaccccgtctctactaaaaatacaaaaaattagctgggcgcggtggcgggctcagtcccagctactctggaggctgaggaaggagaacggcgtgaacccaggaggcggagcttgcagtgagccgagatggcgccactgcactccagcctgggcaatagagccagactctgtctcaaaaaaaaaaaaaaagaggggatagcggtctatacaccacaagagaaagtgaaatgaacaattagggtatgtgcagaaaatgttagaacatctgttcatattcagtttaaatatcatttttttcctgctctttttaaacatactgttgtaaaataaaacacagacaggtatgtatatcttactgaattactgtaaggcaaacatccttgtaactaccacctagttcaagtggtagaatgttgccagttactccagaaaccttttcccaataacagctccttcctacatagtatttttttttwaataatttttattacccaaatgtgccttggtagaaactgtagcttggtcttgctgttgtttagttattttatttgactcacagtaactgagatctctctttttaatctacaggttgttgcttcttctcttgtgcttagaatttacctgtaaagcactggattattttacctgtagtttcttacagtctggattttacttgatcacatattcataatgtaattcaacataatttgctgtcctctctatttcctgcagattggcagcttaatctagcagcatgttcagattcaagattgatgtctgttatgttcttttttcaggtggtgcataatgcctgggttttgctcttattctgtgctagcagccatttatgctggatgcctagatccattaatttattggaagcagcaaaatggagatatcctaatatatttttgtttttatttatttgctggaatgattttataaagggtcgttttctttcttttactattcagttacccagtggtatagttcatatagaaaacacatggaaaagaatgtttgattcttttccttttatttacctggttttcaaggtaatgaatatgaagtggtggattagatattactgataagatttaatacagtataattattctccttattaaagctcaaattagcccatctttggtcaccagtggggagtgttcttcttttggctcgtaagttttgtttttgaaacagggtctcactctgtcacccaggctgaagtatagtggtgcagtctcggctcactgcaaccttcgcctcctgggttcaagtgattctcccacctcagcctcttaagtagctggactaaaggtgcacaccaccacacccagctaatttttgttttttgtttgtttgtttttgatagagacggggtttcaccatgttggccaggctgatctcaacctcctgacttcaagtgatccacctgcctcagcttcccaaagtgctgggattacaggcatgagccaccacacccagcctcctaagtccttttgacatgatcttggtctagctttgatagcttttatgctatctagtatttttaagatgttttgccacagacatgaaattagccatttctccaagaagcccttttaatggaaaatgatatttcaaaaatctcagtgtgggtgctaaggatgcttattcctactgggttggtcattgtttctaggctttttaagtgaacagagttgggcatttgctagtttctatatctatattgagatacacagaatattttggttcttagggctcaaagaattctacaattcacatatcctataattatttacttgcttcatgctatcctgtaattaaagatagtacttataattaccatatcagttattactagaacaatgaaaatttttaactttatctcccattttctttcttttttcatagttgctctgaatttacattttcaagccatatagccactgcatgttataaattctcccctttaattatcatttaatcatagttccaaagataactacatagttaaagctcatcacaaatctttataatctgattgtgtattaaacattttctagtaatatgactggctaagtgtaagcataaaattaccatcagaaatcaaataacgtatttgataagtaggctctttggaggagtgtgaaatgatgtaattgtttgttgatgttccaagtacgatccacagactgttgccagtctgtaaactgtagttggtccgtgaagagacacatgcagaaattaagtgtaagatttagctacttttatagcagtctgacataaagcatgttagtgtgttttgcaaaagcatcagtagctgacagattggaaacttaaacaacaaaacataactggtccttttccacatgtagtttgaaagacacggttacacacaatctcagcccttatctctacaataattaggtctttcagataagtggtttaagaaacagataaatatgagagaaacatgtagatgtgggctaataaaatttttactgagaagatggatgtaagctagactttggtttggtttggcttgatttggcagggagatatgatcagagatatgagaacatttttaacacggaattgtgggcacacaaaacatatcataaaaatggcctggctagagtagaagatttttaccagttagggaggagagattaaatgggaatagttgtataaaggccttggatcccaagctaaacagctaagacattttcatacagacaataatagggagccattcatgctgcaaaagagtacaaggtacttttttcaatgcctacgaggtacttttttctatgcctaagaatccaataaatagctctactctctgttacttgggttctagtgaataatttatttattagatttatagtacagtattaataagtgatatgaagaaaagcaaaataaggtattttaaattaaggtggtcaaagtgtatttttctagacattggaattaataacatttgtgtccctgaaggctataatacttgttctctcgttttatcttacccaactctaggaatgccttgggaactgccccttcagtctagatatctataatttaaaacttgagttcctacatatttctgaatatgttattttttaaacttgtttttctactaacattgtatcttgattggcttctctgtttattgggtttggtatatctctctaatggtattagctttccacaaatacttgatgatttttggttatgtactgtcttttgtatttgtgatttctggttcacttggttgcgaatgctgtttctctttactgtagcctgccttatgtgatggttaaggtgggaaggaatacaaagccagctacaatgtgcctatagtttgcctctttcagtttggggttctccattcattccttctgaagattacccttaattctaaatttttggacctactgtccacaattgctgttttagacaggcttcacactttcatttcctatagttgaatccagttggagtgggattatgggactgttcggagttaattaccacagctgctccctacctgattatcctgacagtaatttgcaggcctctcttaattattttatctatggtaactgaactcgtacctgaaaatttcttttctgttttttacctccacatagagcagtctctttcctacgtagtttgggctgtggttttatgaattttttttcctctcagtaaatctagtcttaccactttatatctttaaggattcctcaaaatgtctggtccattgataacatatgttcatatgttatagattgtttttaagtattacagattcttttgctttatgtatatcttccctaatgtatatcttctctaatgttttatgaggttgggagcagataggctaataggagtatatatttacccttgcatcatttaggctcagtcttaacatcttgatccaaacttctaattgatgtcctttaaaacatgctttttaatactctgataatagtgtactaaaataatgttgattattgctagtcaaaggcagccatgcaaattaatatacactgttgcatttgaccatttatgtattaccttacctaacagattaataagattttatttcattagaagttattgataytataaagtatttgttctaggaagacaatgataaaatctagtttatattttattaataagttctatcttctgattaaatgaatggtaggtggtaaaagcgtgcctcctgtattaggttacttgtagaatcttttaaataaagaagcaaaatggtttcaaggtaaattagcatctaagaaatgtatttttattctacccattctctcattagtgtaggttagctattcaaattgggtcatttagtttgaaaactctcactcattcttcaaggcacaattcaaatgttattctccggggtcttctaaactctctaagaattgttctctattatatactctcatgatgtttctaatgtattatattagttataggacgtctcattatgttgtaaatattgctttattgggttccttttcaccaaactctgaattmctccatgttttattcatgtttgtgatgttagcatcacagttacttagtaaatggattgtaatacttttaggaatggtaaaatgaatactaaggaaaaggtctctgatttctgaattcttggttcctattccaaagagtcagttctagtcataaattgtgggaaatcctgagatccattttactttagattaaagaattttaataagacatttcagtttggtttaaaatttgttctttatttttatttggtaataagtaccatttgggtttctaattagtattcggttctttgcaacctttgaaaatgcaatgtttagttttaaaaatagaatcctatttttaaaatatatctctaacaaagcccataaatttagatttatcatgtttttattcattttttttgaaggatcagagtaacaatgaaattatgattggagtgatgtcaggaggaattctgatttataagaacagggtacgaatgaatacctttccatggtaagaacatctattgatacttttatgtttaccactgtattactaaatataataatttatattaaaggcagtggctgttgaactattttaatgttgtcattttacttgtgagataaactttatactttatcccacttagttagcacctaccagaagacaccaaaatggtttatttcaaaattactttttaaaaattattacttatgagtttttcttttatggaatttttgaaagatgatcagagctttccagtctttttagcagagatttgcccccagggcaaattgttttaccagcatctaaccaatatgggttttatcagagtttaaccaaagtaggagaatggaaatacccaatttagacccctcctgctttcttgtctcacctaaggaggggttgacctgagaagcaccgaagatcgcagccaagaggcacagaccactaaaccactaagacctaattacaggatgaaagaatgattcctccctgtcccacaccttactgccacatcaacatggctcataaataataacagggaatcacaactaaaataactgtaaggctcagattgtttaggagtcccttagggaaacctgaagacagcaaggatgtgaaaaacaaagatagagaaaattacaacctctgacacctacggtttgtacacaaacattaaacatagtcttatgccttgccaggtctacataaaacttcacaccaaaggcatatttatttctttcttttacccagtatatcatatccagcatttagcaaaaaattacaagacgtgtcgaaaggcagtaaacacaatttgaagaaacaaagcaaggatgagaaccagacccagatatagaagaaattttggaagtattataccagaaatttaaaataactgtaattaatatactaagggaaaagtatatggaaaaagtgtgtaacgtacaagaacagacggaaatgtaagcacagagatggaaaccttatgagaaagaattaaacaggagtgctagaaataaaatgcattgcaacagaaatgaagaaygcctttggtcttatcggtagattatacacaagaaaaaaatgagtgagcttgaagatatgtcaatagaaacttcaaaaaccgaaaagtgatgggaaaaaggaatgaaagaacagtatttaagatatgtgatgggaataaagagagagaagatcagaagaaataaatatctgaaaaaatagtggctgatagttttccaaaattcatgacagccaccgaatcacagatgcagaaagttcagagaatacctagcaggttaaataacccaaaaatccacacttacacactatcatagtcatgctgcagataatcagaaaatcttttaaaaagcaaagcataaaaagcacatttaacctagaggaacaaggtaaaaaatatgttgtatttctcttcagaaaccatgtaagcaagaagaaactggagtgaaatattttggttaaagtgttgaaagaaaaaacccaccaacctggaagtctgtagcaaagttatccttcagaagtgaacgagaaataaagactttcacacacacaaacaaaaattgattgaatttgttaccagtagacctgccttgtgagaaatgttaaaagaagttcttcatagaaaaggaaaataatataagacaggaatctggatctacagaaagaaaagaaagcagagaggggacttcaagatggctgactagagtcacggaggcacttgtgtcttccacaaagaaggaccagatcagcaagtagataaacacacaatgaataggacatttaaaagagaacagaagaattcaacaaggaagtgacagggaacctctgagacacagaaggagagggaagcaaagtagccagcctagccaggatcacctgagagccaggaggaattgcccattgcaaggaaaaggtaagcaagagatcctcaatagttcacatttgcaccaaagattactgcagtccttcttatatgagagaggcccttgaccctcatgggccgtgagactagcatagggagctgcctgaagtccacaccatggcattgtttcagagagggagtttgcactccctctacacaccccctaagacccaggcagttgcaacacaatgccattttgagagctcagaccccatcagaatacatcctgcagtgaggcccagtagctcctgcatttccccactgacaaccctccatgtccacacagagggctgcaaagttgcaagacttaactgcacccaggatacagctaggtcctcgagactgtatctcgtgcagtgtccttcaccctggggaatgggcagtgcagtgtgccagggaggctgtacctgtcataaagggagatgaagcatgtgctcaccacagcctcagagttgcctgcacagggacattaccattgacagcaactcacatcctccggcagcaagaccactgtacagctgcatgtgcctttggggggctaagtaaggactggcctatctgagcacaccttccagggacatttatatgccctgtccaccgtcaccagtgataacatcaagggcctgaacagaggaccatcccagctgctggcacctgtatatgttattcatgaacctagagaytgacccacttagaactgtgagggccctcacgtgacatccaagggcctgacgatagatgtgcctcgccctcagctaccacctccagacactgttggagtctaggcattggctggccatacctgcagctgctgacacacacacacacacacacacacacacctttcaggggctcaataatggacctaccttgcctgccactggcacctgtgggcacttcccaggggcccagggactggctcgtccaccctgcctctaccactattgtcccccacatgcatagctcaggaccccaagggatagcccactgatactgctgacaccatgcataccacctggagacccaaggactggcatgcccagcytgccatcaccacagctggtgcccatgaaccagcctacctggcatttccatccccaatacagcttcaccacaacctctacaccctaagccactgaggaactcacagacacctctgacactgattagagccaaataaataatgtgaagactatgctactgcacccatccagaatcaaagccaaagcaccctatccagccaacactataggtacatcacaagaaaaagtttgttcctatgacagccaattcataaaattggaagaagcacctgttacaccagatgtgcagataycaacgtataaggacagaagaaataaatgcctgaaaaataaaataatgatattaaagaaatgcaatgatatatgacagcttgacaatacagagatatcaagaaaaccattcataatctgaatgagaaattcaactgagagatatttaaaaaaaaaagccaacaaattttggaactgagttcagtgaatgaaataaaaaatacaatagaaagcatcaacaatagactagattaagcagtaacaataatttctgaacccgaagacaggtctttggaaataacctagtaattttttaaaaggctaaaaaagcctgaatgacaaatggaacactgtaaagcagccaaatatttgaattttgaaaatttcagaagagttgggcaaaggcataaaaaaaaaacctatttaagaaaatactagctgaaagcttcccaactcttgcaagacgtagagacgttaagataccagaagctcaaagaaccccacagacattcaacccgaaaaggtctcctccaaggcacttcatagtcaaatttttaaaaatcagagacagaagtctaaaaagagcaagaggaaaggatcaagtcacacataagggaatctccatcagaccaatggcagattcctaatcaaaaaccttacaggccaggagcgaatatggtggtatattcaaactgcagataaaccagtagaaatgctgactgaggatacatcacccaagcaaatctacccttcagaaatgaagtagaaataaagtctttctgagataggcaaaaactgagagaattcatcaccactagatggatctcacaagaaatgcttaagggagtccctacatctggaagtgaaaggatgctatgaactatcatgaaaacacacaaaagtataaaattccctgacagagcagataagatatatctagagtagatgagaaaaagaaaggagtcaaaggttattactacaaaaaaaaaaaaaacaaataatcaagggaaacaataagaggatgaaaggaataaaggatgtacaaaacaatcagaaaacaattagcaaaataacaagaatagatctttacttaacaacattgaatgtatatggtttaagttcccrttaaaacttagacactggctgaatggatgtaaaaaaagaagaccgaattctatgctacctacaagaaactcaacttcacctgtaaaaagcacaatagactaaatgtaaagggaaggaaaaatcccatgtaaatggaaaccaagagcgtacagaagcagttattttagacaaaatatactttgtaaaaaaccataaaaagagacaaggtcaatatcaaatgataaagggatcaattcagcgaaaggatataacaattgtaaatatgtacctaatactggagcacccagatatatgaagtaaatattgttaaagatagagaaacagactccaatacaatagtagttggggacttcagcacaccagattcaccactggacagatcatctagacagaaaacaaacattggacttaatctgcacggtagaccaaaggaacctaataaacatttaaacaacattttatccaacagctgcagaatatgcattcttcacctcagcacgtgaaacactcttcagaaaagaccatatgttaggccacaaaacaagtctcaaaaaaatttttaaatagtaattatatccagtattttctcacaccacaatggaataaaactagaaatcaataacaaggaactttggaaactgtacaaatacatggaaattaaacaacactctcctgaaagactgttgggtcaatgaagaaattaaggcagaaataaaaaaaattattgaaacaaaaacrgcaacataacatactagaacctgtgagatacagcaatagcattgctaagagagctatttatagcaataaatgcttacatcagaaaagtagaaagagctcaaataaacagtttaatgatgcatctcaaggaactagaaaagccagaacaaaccaagccccaaatttagtcgaagaaaaagcaataaagatcagagcagaactaaatcaagtagagactgtaaaaataatacaaaggatcaacaaattgaaatttgtattttttgaagtgataaaaatcaactaacaacaaaaaaagaaaaaattatctaggtgtggtggcacatgcctgtagtcctgggtactcgggagactgaggcaggaggatcacttgtgctcaggagttcatcctgagtgacagtgtgagacctgtctgaaaaaaaagaaaagacagaaaaaaactaccagccagtattcctaatgaatatagatgcaaaattcctcaacagaatactagcaaagcaaattcaataatacgtgaaaaagaaacatttttcacgtatctacacgtgatcaagtggagtttatttccaggatgcaaggatagtttaacatacaaatatcagtaagtgaaatactttattacatcaacagattgaaaaccaaaaaccatgcagtcatctcagtagacacataaaaagcatttgataaaattcaacatcccttcatgataaaaactctcaacaaattaggtgtagaagaaacatatcttgacacaatcaaggccataagtgacagttccacagctaacatcatacagaacaggtcaaagctgaaagcttttcttctaagaactaaaagaagacaaggatgcccacgctgaccactcttattcaacataggactggaagtcctagccagagcagtcaggaaagagaatgaaataaaggccatccatataggaaaacaggaagtcaaattgttcctctttgcagaaaacctgatcataaagaaaagcctgaagactccactgaaagtctcttagaactattaagtgaattccgttaagttgcagggaacaaaattaatgtacaaacatctgttacgtttctgtacaccaataatagctggaaaagaaatcaagaacgcaatctcatttacagtacctaccaaatgttacacttaggaataaaccaaggaggtgaaagatctctacaacaaaaactacaaaacactgatgggaaaaaattgaagagaacagaaaaaaagtagaaaaacatctcatactcatgaattagaaaaattagtactgtgaaaatgaccacactacccaaagcattctacagattcaatgcaacatctgtcaaaatatcaatgacattcttcacaggcatagaaaaagcagtttcaaaattcatatgggtggggagccaagtggctcacacctgtaatcctagcgtttttggaggccaaggcaagaggattgcttgaggccaggcatttaataccagcctacacaacatagcaagacctcgtctctataaaaaaatatttttaaaaattagctgggcataatggcatgtatttgtagtcctagctactccggaagctgaggtgggaggatcacttgagcccagcactttaagggttacagtgggctatgatcataccactgcacttcagcctggatggcagagtgagaccctttctctattaagaaaaaaaaaatattgtatggaaccctaaaagatcctgaatagccaaaacaatactgagtcaagaggacaaagatggaagacatcaaattatcctgtgaagctacagtattcacaacagcatggtactggtattaaaatagacacatagacccaacagaacagaatagagaacatagaaataaatccacgtatttacagccaactgaattttgacaaaggcacctagaacatagagtagggaacagacacccttttccataaatggtactgagaaaactgggtatctattgcagaagaatggaaccagacccttatctcagtatataaaaaatcagctccaaatggattagagagttacaygtaagacctgaaactataaaactgctaaatgaacatagaggaaatgcttcagaatactgatctaggcaaagattttatgggtaggtctttaaaagtacaggcaacaraaagaaaaatagtcaaatgggactatcaaactaaaacgcttttacatagcaaaggaaacaatcgacagagtatagagacaacctatagaactggagaaaatatttgcaaattgtacatccaacaagggcctggtatccagaataacaaggaactgaacagcaaaagccagcccaataattcattttttaaaattgacatttctcagaaaaaagacatgcaaatggtcaaattgaaggtttgtggcaaccctgcatcaaacaactctgttgttgccatttttctgccagcatgtgctcacattgtgtctttgtgtcatattttggtagttctcacaataattcaaagttttttattgtgtatgttattgtatcagtgatctttgctcttagtattataattgttttggcatgccacaaaccacacccatataagacagctaacttaagtgatagatattgtattgtttgttctttctgccccactgactggccgtttctgtctctcttcctctccttggaactccctgttcactgagacacaacaatatagaaattagaccaattaataacccttcagtggtctataagtgatcaagtgcaaggaagagttgcacttctgtcactttcgatcaaaaattagaaatgattaagttcagtgaggaaggcatgtcaaagtcaagatagaccaacagctaggcctcttgcaccaattagccaaattgtgaatgcaaaggataaatttttgaaggaattgaaagtactactccattgaacacccaaatgatacaaaagtgaaacagccttattgttgatatggagagtatcttagtggtgtggatacatgaaaccagccacagcattcccttaagcttaatccagaacaaggccctaactctctttaattatgtgaagactgagaagagaggtgagaaagctgcagaagaaaagtttgaagctagtgcaggttggttcatgaggcttaagaaaagaggtcatctccatacataaaagttcaaagtgaagctgcaggttatacagaatatctagctgtctggctaagtgatgaatggctacactaaacaacaggttttcaatgtagatgaaacagccttctattggaagaagatgccatctaagactatcatagatgaagttaatacctggcttcaatgtttcaaaggactgactgactctcttgttgcggaataaagttgaagccagtgctcatttaccattctgtaaatgctaggtcctaaatctaccttacctgtgttctagaaatggaacgtcaaagcctggatgaccacacatctgtttacagcatagcttactgaatattttaagtccattgttaagtcctactgcttagaaraagattcctttctgaatattactgcccattgacaatgaatgcaccttgccacccatgagctctgttagagatggcaaggaagttgatgcttgctgtcacaatatgaattctgtagctgatagatcaaggagtaattttgactttcaaatcttttttaagaaacatattttgtaaggctgtagtggccattgaggatgatttctctgatggatctgggaaaagtaagttgaaaaccttttggaaaggatttaccattctagatgccattgagaacattcatgattcatggtagaaggtcaaagtagcaacgttaaccggaattttgaagaaattgattccaaccctcatagatgactttgagggggttaagacttcaggggaggaagtaactacaggtggggtggaaataacaagagaactattattaaaagtggagtctgaagatggggtaggggatgaattgctgcaatctcatgataaaacttgaatagatgaggatttgcttcttatggatgagcaaagaaagtgattttttgagatggaatctactattggtgaagatgctgtgagcattgtttaaatgacaacaaagaatatagactatttcatgataaagcagcagctgggtgaagaggattgactgttttgaaagaagttctagtgtaggtaagtgctatcaaatagcatttggcaatgtggtcttgccacattgtggcaagaccctccaccaacaaaagattacaacttctgagggctcagatgatcattagaattttttataaattactctgattttttattatacaacttgttttcattatagtatatcgaactcttaatagactacagtatagtgtaaccataacttttatatccactgagaaaccaaaaaatagtgtgactcactttatcacagtattcgctttagtagtctggaactaagccctcagtatctctaaagtttggctgtaccaatatccagaatgaaaggggatagcattacagaccctacatacattaaaagcataataaaatcatattgtgagcagatttgaatgtttgaatattgatatggtttggctctgtgtcctgccccctcctccactaatctcaccttgacttgtagtctccataatccccatgtgtcaagggtgggaccaggtggaggtagttgaatgatagggacagtttcccccattgtgttctcatgataatgagtgagtctcatgatatctgttggttttataatcatctggcatttcccctgcttgcacttctccttcctgctgccttgtgaataaagtaccttgcttgccctttgccttctgctgtgactgtaaatttcctgaggtctccccagccaggctgaactgtgagtcaattaaacctctttccccaataaattacccagtctcgggcatgtctttattagcagtgtgagaatggactaatacaagtaccattaataaatttcacaacgtagattaaatgtgcaaattccttgaaagacacaaattaaaaaatgacctgagaagaaaagaaacttgaatagatctgtatctattaaagaagttgaaattataattagaaaccttttgaacattagaactccaggccccttgttgtgaattctatcgaacatttaaagtagaagtgaggccaattttacataagctcttttagacaataaagaaggaacatggtttatgtgattattaccttgatgttaaaaccagacttaagaccttacaaggaaagaaaactgcagttactcatgaacatagatgcaaaaatacctaataaaagtttagcaaattctatccagtaatatataaaaatgacaattcatcatgttcaaatgggggttattttaagaatataaggttgctttaacatctgaaagtcagtcagtataattaaccatactgttataataacatagaaaaaccatttgagcatttcaatagatgcagaaaaagaatttgacaaaattgaccattcatgatttaaaaaaataaagacatagctaactataaatacaaggcactttctattttgattaagggcatctacaaaaaatctgctaatattatacaaaatggtgaaagtctcaatgctttttatataagatgaggaaaatatatgcttcatctcactacttctcttcagctttgtacaccaggtccttactagtgttttaaaaaaagaaaaaggaaaaaggaataaaaggcaaacaaatggggaagaaaaaagtataatggctttccttgtagataagaatatatatatagattggctgaaaataaagagataaaaaaggtataccatgcaagtagtaagcattaaggagactagaatgactgtattattataatatatacaatggtccaaccagtctagaaaactgttctgtagtttcttaaaaagttagaaatatgtctaccatatgacctagctgtttcactcctacctggtatttgaccaccagaaattaaagcaaatgtttgtacaaagacttgcacacatgtgttcaaagtgactttatttgtaatagccgaaaactagaaacaacttaaatattcatcatgaagtgatggctatttccatccatgttgtggtatatccatagaatggaatgctcctcagcaaagtggagaaaagatttagtgaaaaacacaatgcagatgaatctctaaataattaagcggagtgacaagacagatgaagaaaaatacatactgtatgcttccatttatataaattctagaaaattctatctgtagggacaaaaagttggtcagtggttacgtaggcrggatgggttgctgtgttggagttctagaggaggatcactgtgtggcrgaaggaatcttttggaagtgatagatatgttcactatcttgactgtgatgatggtttgataagtacacatgtatgtcacacttaccaaagtatatactttaaatatgtgcattttgcatgtcagttatacataataaaatgcttaaaagggaaaatgaaaagatgcattggtggtataatgatgagcctagctgctttccaaaaccatgtgaaagttaatcagtaaaacagtataaaatagttatatgattacataattggcattccagtagaaacagaaaactttggacaagtagcaaaaaaaattatggtagagataaatccaagtatgttaattattatcgaaactgtaaatatgttggatattcatattgaaaacatcaaactgaatttttaaatcactattgatataatctatgtaccataaatttgcctattaaagtatacagtttagtggtttgtggtatagtttcaggggcagcatcaccataatctaattttgaatcatttatattacccctaaaagataaccttgtaattattaggagccatttcctgttcttttctatgctttttatttgccagaagtcttaggcaatcactaatcactatcatatatctctatagatatgcctattctatatattctattaatattgaatgagatcatgtactgtgtggtcttttgtgattgatttttttcattcatttttgaggttcatccgcattgtagtatgtatcagttttgctttcccctttattgctgaataattttccattttatggttataccacattttgataaccagttcaccagttttttcccctttttggctggtgagaattatgttgctctgaacatttgtacaagtttttgtgtggacatgttttcatttttcatgagtgtatatatctaggagtggaatacctgggtttgctaaactgttttcaaacgtggctgcatcattttacgttcccaccagcattgcatgtgggtttaatttctccagattctcaccagcacttgttatctgcatttttattataaccattctagtgagtataaagtagtatctcattgtagtttttatttgcattcccctgctggctaatgataatgagtgtcttttcaagtacttattattgtttcatatattttggattattcaaactggatttttaaaaatcaatctgagccagatgcagtggcacacacctatagtcccagctactcaggaggctgaggcaggaggatcacttgagcctaggagtttgaggccaggctgggcaacatagcgaaaccatgtctgtaataggatacattttaagatggcaaaggcaaaccttaaactgaaatgtaaagtcattgtaaaacctctgatgtcaagtgaaaaatgcgtagtatgtctaatgatttattaactacagaaaggaattgttccagttaaaaaaaaatcaatctttatactgtttacaagagacatacctaaaatgttatacaaaatgacagaaacattgaaaaagataaaccaggcatatagaagccaaaaaaacggttatggctatattactgctatataaaatagatactgtttgaaagatttttaatttatacattggtatttttctgaaaaaactttgtagcaaatacaagtcacacacaatacatttataagaaaataaaagttatacaaaatatatattatgccacagagagcattcagtgaaaagatttttattcattgattgataccttcctgggaatttttgaaattaaagtgatttgaaactggcctagatttcctttctcttgatcatttagaaatgaacagtgttttttgttgtttaacttctgaaatatcagtgtgtcttcataagattttttgaattgaggcacctggcttttttccataaatacagtcaatagttactcaattttttttttttttttttttttttttktgcttctggaaataatgccctctctctatgacagaatatttttcccatgtcgagtgaaagctcagtatccaaaagtaaaatacaaagttttcaaatcagaaacctaaacatgtctcttcttccctattccaaacatgcatgcttgaaaagttgactcatgcatttgcctcttcaagtgattaaagtgtgagaagtttattctttgagaatgctgagagcttcttggatagatagggccataagccataaagattaagacttagaattatcatgaaaatatttacttagaagactgagacaggatcctgaaggacatttttctcagtaagaaagatcaaatctctttagccttattacccttatgtcttaaagtttacaaagactgtgtttactgtgttacttattttatggtttcaatgagacaaaatgacttggctcatattgattgtactaataaggctttgagaacgcttatggcattatgtgggttgcgtttaagaagaagggtggtgtacaaaggtaaatttttaaaatttaatgctttttaaaattaaaagtgtttttagggttgttgcataaagtaatgaaatcttacatttttccaaggcttgcttatagttttagagagtaaacaactaagttagtgatagtttttgaaattttaatttgtgacatctgtttttaagtatttctgtagatacaaaattttcctcagttgaacacaaatactaattattttttccatgaagcaagaaaaactttcaattctttatgtactatgtgtatgtatatatgataaaatgtttagatattactaaatatacacttaaaacattttttcataatttgttaatatttttatcattattcaatactttgaataatttattgtcttttgtccaggttgaagattgtaaaaatttcttttaagtgcaaacagttttttattcaacttagaaaagaattggtgagtacggatttaataattattgacataaatgaagccttttaagaaatacccattcatgacagaacttttctattattagtacaagtgaaagtgcaattaatactgtggataactgcccgctgaggtaatgaattcacttgttataacaaaatgtacttgtttttccagtgtgtatgtggttctaatttaaagttcttctagatattcctcttgctgtttctcgagcttagaaactgatttctcacacatgatgttcattgaaaacctcagggtccatttttgaagggcagcaaatgagcatttcatatatccctttttccctactaaatctatagtacttactttcgtatataagttcattttattttaggggagctgagtgttacaagttcatgaacttataacacattgcctccctttgttggagtggtaatggctttatatattataaataacaaattgagttgtcatggaaagtacagtgttggaaataatttcatcttgttaatgattttgtctgtttcattaaatcaaactaaccttatcctttgatgtacattatttcttagaaatctgagaagtcttggcaaattcatgcagatttcaagatggttgtgtgtgtatgtgtgtaaaatgtatttgaaaccataaaaatgtctttggggctgtcctcagtggctcaatcctgtaatcccagcactttgagaggctgaggtgggaggatcccttgaggccaggagttccagaccagccttggccacatagtgagacactgtctctacaaaaaaaaaatggaaaaaaaaaattggccaggtgtgatgatgtgtgcctctagtcccagctactcaggaggctgaggtgggaggctctctggagcccaggaattcaaggctgcaatgagctatcatcacaccattgcactccagcctggatgacatagggaggccctgtctcaaaaaaaaaaaaaaaaaaagcctttgggtacagtggtggcttctacctgttatcccagctacttggaaggctgaggtgggtggataggttgagcccaggagttcaaggctgcaatgagctgattgtgccactgtagtccagcatgggcaacagagcaggacaccactgcctcttgaaaaataaagaaagtctttgaatcagctctgttgtattggtctactacgtgattataaactatggtttatcgtttatgttcataaaatacagagggatttttttcaagagaatttttattgaaataaaacataataccaaaaatgtgcatattttaagtacacaacttgatgaagtgaacatatccatatcagcacctccaagatatgtagtatatgtaccgccttctaatatgtagaactttaccagcaccccagatgcttgaaatgttgctgctggagctgatgcccacttccagtcattaagcctcctggaaggtaaacattactctcatttgtatgaccatggattagtttgcttatatttgaactttaaaaattgaaattatacagttgttgtctttactgtctgccttctttcccttaatattttttgtgagattcatccatgttgttgcatataacattagttcgttccatttatgtatggtattcctctgaatgactatgccataaattattaattcattctgctgctagtggacagctttgccatttccaggttggggatattatgactaatgctgctaatggaaattattttacatgttttaaaatttaggtgattaaaatataatattgttatctggaaactagaggacaaatattttactttaagtaatcatagatggcactgtagaagtcaacttttctaattagacttataataatatcccatcataatactagtgttattaataatagttataatatccagcctttattgagaacttactatgtgcctggtaaaagaccagtcattttcatatcactgaatcctcactctcattttctgaagtagtgtaccagttaaaaatgtatttaccaataagtgataacagcaacaatagctaactgacaattgattaaagacagtatacagggatccttttgtggttcataagcatgatgattagattttcatgctattgggtgagatatgccttcctcagactttgttacagcataggcacattacaacctgtctgataggagaaagaaagtaaagatggtatacaggccaggtgcggtggctcacgcctgtaatcccagcactgtgggaggctgaggtgggtggattgytttaggcctggagttcaagaccagcctggcccacatggcaaaaccccatctctactaaaatacaaaaaaatggttgtggtggcacacacctgtatttcccgttgcttgggaggctaaggcacaagaatctcttgaaccaggaggtggaggttgcagtgagccaatatcgcaccactgtactccagcccggacaacagagctggactctgtctcaaaaaaaacaaaagaaaaaaggaaaaaaaagacagtatacaggcatactctgcaaaaggtggccttgttaatgttttctctctaaaacatctttgtttttaaatacccaaacttcatacgatatacttatctctcagtacaaatttttttgtgtgttgtttagaaattgggcaagaaaaatttttgttacatttcaaatataattgatagaatatggaaattacttatagactttttgaaaagtataccaagtgtcaaaatgggtgaatatgtatgcatcttagatgctgacagtgagaagcttcagtgcatcatagtagctgagacattttctgttattttgtgtaatgtttgtggcatatggtaaaacatatgaactatatatgttagtgcaaacaaaacaactattaaccataattaagacaattttctggcaatcaagaagtgatgttttaagcatattcccttctaatatgatagtttaatactttatacatgggcatttatttgtgtattagtcacaggaaatatcttaatgaccttttgatgggcaagaatttctttaaccggacatagaaggaaaccttcatacccttaaaagattgatgatttggactatgttaaaattaataactctgttcatcaaaagatatcactaagagagtgaaatagtatagaccattatataatacacacagaatccttggttgtatatgcatcctgatagaaatatatgccagtgaattgaacagacacttcacaaatgaggatatccacgtggccattaacattgaacctcaataattataaaggaggttcagattataaccaaaatgtgctacctctacatacacaacagaatagtaaggggaaagagattgataaaccagtggttggtgaatatatggcacatatgctactggtgggagggattgtatattgatctacccattttggaaaactgttgggcattatctaccaaagctgagcatatgtgtacaacatatgacccaacaacaaaaatgtgcatatgtgtacaccagagaacatacaggaatatgcatggctgcattcttcttatatccccaaactagaaatataaaatgtctgtgaacagtaaagtggataagttaactgttaaattcattataatagagtactatggaaattagtgaattactgcttcataaacgttgaatttatatcagaaacataatgctgaacaaaagccagacctaaagacacatatgtttgattccatgtatgtacaataaagttcaaaaacaagcatgactattctatggtgataaaggcagaagagtgattaactttgggaaggtaatctggtagaaaggggagacaaaggatacttctgtggtggtagtaatgatccatttctggaactgggtaaaggttacatggttgtatttattgtgtgaaaatcagagctgtgcaattatgggatgtgaatgttgctatatgtggtttactttaaggaaattatttatttagaaatttgtaccagttttcaagaaaatggaaaattattttagtgctaattttaaattttgaattatgtaatagtgttcagagctgctgaatgttctttatttacaatctagacagatattttaaattaggaatattgttaaaagttgtgatgatatattttaacatttaatttatggcctagaattatattttgaaacagagtcatagctaatgttgaaaacagatacatattaaaagtttgaactcatttctaactatgatctaaggttaaagttcctaagagttataatatgaatgaacaaggccagcacgggggctcatgatataatcccagcactttgtgaggccaaggcaggtagatcacttgaggtcaggagttcaagaccagcctggccaccatggtgaaaccccgtctctactaaacatagaaaaagttagctgggtgtggtggtgcatgcctttaattcctgctgctcgggaggctgaggcacaagaatcacttgaacccatgaggtggaggttgcagtgagccaagatcgtgccactgcactccagcatggatgacagagtgagactgtgtctcaaaaaaaaaaaaaaaaaaaaagactgagttaggtccagatttttcaggcttttgcatatacttcattgcctttttattggataagcaaaaaagatcctagataaaagatcccataggttctatctatatcattaacaagttcatgtttacaaggctagaataatttatctgtcaaaagtaaattaaatggagcattagatcctgacattttcctggtattctctgcattttgtcatttattacagcatgaatctagagaaacattattgggatttaatatggtgaattacagagcatgtaaaaatttgtggaaagcatgtgtagaacatcacacattcttccgtttggacagaccacttccacctcaaaagaatttttttgcacattattttacattaggttcaaaattccggtactggtaagtattgcttctgtgttaaggctttattgttggattttgtttcctttctttaaaataaagatgtagtttatggaaccatacaacctttgttacacaaacttaactgagtcaaaaatccctatggattgcagcctctatatcagtatcattaaaaagttctataggttcttgtgatatgctacaggcttgagaaaccagttctgtgttctgtatttgctgtcattattttctggagtaaattaactacatttacttatttacaataaagacagatgacataatttctattgtgtctttattagatatttgcttgaaaacttttctttgttctaagacacccaaggtatcttatgcctaaaactatataattattgttttttaatttagaatttagcatatttttgggttgtcaaaccctttattgtaaagtgtttaaaacagtcacgaggcaaaatcagatttagtcattgaacagtaaccccaggttccatttcctaaaattgttttattcttgatagcttttattttttcctgacggcaacaaatctttggggaataactaaatctgaagaagctctgattagttttacctttggaattcttaaaagacccatgcaagctagtttttaagtggaacctggtaagaatcatgtagaaagttattcattatcttttagtaaaacaaatgttattcattcttgtttgtttatgcttcacataataagatttttcatctttgataaataaaacccttggccagtcgcaatggctcacacctgtaatcccagctctttgggaggccgaggcaggcggatcaccagaggtcaggagttcaagaccagcctggccaacatggtgaaaccccgtctctaccaaaaacaaaaaacaaaaaattagctggctgtggtggygggcgcttgtaatcccagctacttgggaggctgaggcacgagaattgcttgaacccaggaggcaggggtttcatgagccgacatctcgccattgcactccagcctgggtgacagagcaagactccatctcaaaaataaaaataaaataaaatgaaaaacccttgaccattatgtgttaagattaattcatgttatatgttcatgagaaaaatgtttagatgttcccagaaaagatttaaattgtaaacctaaacatgtataattgcctaatttgtaatctccgtaaaaataacagtatgaagcttagtacaggatatgtcacttgaaatacatgactcccaccccagaaaaattagtaaaagtggctcaaaagttcagtagtaacaattaaacagaattagaatatttttaaccaaacaaaaggcacagtaatttcctaagcagtttgctgtcacgtttaactcctttttttttttttgccttcctaaaagcaattttgagtaaagtaagatgacagtacttgcaaatttaaaagcaaatagatggaaggagagagtatcagatctataatgaaagtcaaggaaaaagcaaagagccttacctactgttaataaatctcagcaaggacagaagaaatctccacggctttatgtgaaatgagaacagtacaaaccctaaagatattctttcaatgaatttaatttctgattggttaccagggtagttatacaaggactactcttaccctctgttcaaattcttttttctcctctttgtccttgcaaatgtgacataaacacacaccatttaatttaggtacaaagaaatgagtaggaccaataaccagtcttcaactataattcaagcaagtctcagacaagatgagaaaagaaagtcaaggaagttacccaaaccataccaaagcaaacataaaatttacatacggtgacttcaaatacaaaagacagttgaagaaacctgtttgggaggaaatcatcactgaaacagaaggaaatttgtaccataaatattaataaaagcaagttcaaggacaatctgatttaaaaaaaaaaaaaaaaaaaaaagatcggccgggaagggagcaacacctgccattcaraaggctgttactgcccttggggaagattggcctagtattgacaaattttacatgtttttcgacaaaactgggattaaggactattaaatgggatatgtacattttagaaagttgaacaattattttaacagctttattgaagtataattgacacataagaaatgatcatattcaaactttaaaatctgatgttagtatgatgaattactttgattgcatttcaagtgttaagccagccctacattcctaggataaaccccacttagccatgatatcctttatatatattgtttgattcactttgctaaattttgtttaggatttttgcatatgtgtttatgagggatatatctctgtagttttctttcgtacgatatcattttcagattttattgtgtcagggtcaaattggaatcatgaatgtgttgagaaagttccattttctggaagaggctgcatagtaataatattatctcatttttaaatgtttcatagaatttgcaaattaattcatctggggcagaagtcttacttataggaaggttttgaacattcaaattctttaatagataaggcaattaaggttttgtctttcttcctgagcaagatatggtagtttctgtctgtcagcaaatttatccatttcatctaggttgttgaatttattggcacagagtttataatattccccatttctttttaatctctctagaatatgtaataatgttgcttctctcattcttggtaacttgtgtcttcttttttccttgattagtctgctagtggtttatcagtttgaattaaatattttaaaataatgtaggccaggcatgggggcctgtaatctcagtgttgtgggagaccaaggtgggaggattgtttgaggccaggagttcaagtccagcctgggcaacataggcagacccctgtctctaccaaaagtttaaaaactagctgggcttttggcacacacctgtagtcctaactactcaggaggctcagggaggaggatcacttgaggccaggagttaaaagttacaggactatgatcaggccactgcacttcagcctgggtgacagagcaagaccctgtctctaaacaacaacaaacagtatgtattccaaataaaacttgtatcttcaggcttatgttacttgtgggccatcctttgtcaaccaagtcctaaagacaaaaacatgaccaaaaaatattaaacatgatcacattgccattcaagtccaaagtcaacatatagacattatccaatatgcaaaaactcagagaatataacatctccaggaccttcctgaaaacatttattaagtagtaaaattcagcaaaccaggagataaatcagaataatcctgattaaaaaaataactttttatcaggtataaaaaaataactttttatcaggtataaaaagttatttttatataaaaagccctgagagtgaagattaaatcctctctatatagaaacaattcttgacaaccgtgagaattataactgcagaataaaatttaaatggtataaactttgccaaagtagaataagtaatataactttaaaaaaatgaggctgggcacggtggctcacgcctgtaatcccagcactttgggaggtcgaggcgggcggatcacgaggtcagcagatcgagaccatcttggctaatgcggtgaaaccctgtctctactaaaaatacaaaaaattagccgggcgtagtggtgggcacctgtagtcccagttactcgggaggctgaggcagaagaatggcgtgaacccaggaggcagagcttgcagtgagccgagatggagccactgcactccagcctgggcgacagagtgagactccgtctcaaaaaaaaaaaaaaaaaaaagcaagggactagtgggaggaagtatttgaatccttaaagtttgaaacaattttagacattaacacagcagttcttaaggttttcttcatcttttttccttttttttaatatgaatggcagtcttttttatcttttatttcactggaaaccagtttaatttttttcgttaaaagtggcatatataccatagtttcattgtaataaaattattgtgcctgtatgtctagcctttttaatgtttatatacatgaatttcagaatgatttttacctgctcataatggtgatgatttctttatggataggactgtgggtaaaaacaatttttttgttctttttatatttttctatgttgcttgaataacttataataagcctatatataaagagagagagaaagagagagaactttctcattgctcaaaagataagtatcttactgtgaaagtttagtgttctgaaactggaacagtttttcattttgttgtaatgataatactaaatccctaatgtctgtattatggacaatatgaaatataagcctttctttcattaattttaaaaaaaattgtttctttattatgaaatttaacttgttactccagccttttgagtaatagtatcccatttgaatcttcttcactggaaaattaaggtatcagtcagagttcagtcagggaagcagaaagcccttttggtatttcaaacaaaagcaatttaattgaggaaattagttacatggttgttggaaatgctgggaaaacaaaagggtggaaacatggttatggagaaaaaaacaagaagaaggggtaatgcctaaaattcagatgcattcaggactccctgggctggagtccacaaactacacctgctactacactgttagagctctgtttccctgactgaactctgactgatacattaattttccagtgaagaaaaatcagtctgcatcttgcagagaagtactgctttaatcaaggatgggaccatctacaggatgctctttctcactataccctatccccatgactattaaagcagctgccagcagctgccagtttcctgctctgcctttctccactttctgatcttccaccagtaccttctaaaagcagaacctaaggcaaaataatctagaaaatggaatttgtttatcatagcccctgcaaaacatagggcacaggacaggactgggcctatgacagctcgcacattaaattgtatatacataattgtgtatatttatagttttaaaaagttaagctttgcgtttgtagtccttaagaactttaaaacatatccaaagcactttttaatcatcaaagtggttagacatcttgtaaatgaagtaggaatgggagaactttaaaacttatccaaagcactttttaatcatccaagtggttagacatcttgtaaatgaagtaggaatgaagtaggaaatgaagtaaaaatgttaactggacacagtcctgtccctaatgagtatgcactaaataaactttttttcccttcataataagcagtggtggagaatactggaactgttgtcatacttaaaatgttgaaatactcttttgactgacasatggtactgggactatcagatctattactttctccaccagtctcttcatgtacatatccttatctctgttccaaagtatccagaggattaacatcattattctaatgtggaaatacaaaacagtgatgaactttaatttattacctccctcttagaggaaatattttcttaggaaaattcaacttgaagtttaaaagtcatggtagtatttctcatttttccgttaaaatctcataaaagtgccattcagttcatatttactgatatttatccatggaaaatggtcttaaaattgcttgcttaactatggaaactggcatttggctgtttttatatgcattagatagctatatttgtatatggttacatttgatatacygcaaatttatgttaattcacagttaagtaatgagaatgtctcaaataaatgctctgagaacttttattaacaaacttcatctgaacacattggtgtacttcagaagaagatcagtttctctctatcaacaatttccctctagacaaatcagcttgaaaacaaatctcctagtgccaaaaccccaccatttttctgccttagttccttcctctaaacaaaaatctggagctgttctgtgtctggacatggagggagttgaacacatctttcttcattaatgggagaaatgtaactaagcttcattcatccaggtagaattggaatgttgtccagtctttttattctctgcttccttttctctgctagaaatgtcttgtctcttaggaagttacactataatcatgttatgtgttgtcattttatcttatagttctcttaagactttattgttgtgcatatttatatatttcagtgggagaactgaagtccaatcagttcagtatggcaaagaaaaggcaaataaagacagggtatttgcaaggtaagccaaatctgtttcattgtttgaatttttttaaaaagatggattgagtttactaaaaagtttttctaaatattttttctaaagtttttctaaatatttcaaatttttgattacagaattatcacaattctttaacagtaaataatgttgagggaatgataaactagcttgtctagtttattgattcattttttatattaatagtgtgccaggcattgcagttctgaataggctgatcaaatattatgttattaatataatattctgttcgaggttgctccacttttttaaacatttttgagaaatatagtgacttatttcatgttatcaagccatttccatatttatttaaattataatgttaagagataagttgttttattttttgtttttgtttaccatttattgtctttatttctttagggtctgtcatagccaatttgcttttttttttttttttttgagacggagtcttaccctgtcatccaggctggagtgcagtggtgcaatttcagctcactgcaacctctgccttctgggttcaagtgattctcctgcctcagcctccctagtagctgggattacgcatgccaccacacctggctaatatttttgtatttttagtagagatggggtttaccatgtcagccaggctagtctcgaactcgtgacctcaggtgatcccccccaccttggcctcccaaagtgctggcattacaggcatgagccaccactcccgacctagccaatttgctttttaacaagtgaaatgacatgataagatctatgttttagaaaatagtattatgagcaatgatagagaatggattagcgaggaaagcctyggtacccagaaactataaggtaattgcagtaatccaagtgaaaataataaaggcctgaacaaaaacattggtaatggaatggaaaatagggaacaaatttaaggaacgttttgtaggcagaactagcagaagctgatgaccaactggatacaggtgtgttagagacaagagtttgttttcagtgaaaattactttgagaggctaagtcttttaattagttatgtgtttggcatctactgctattagaggcttgagttttaataaagagaactagaaagtttgcttttgatttcactttgtttaaattttgttcttaagtctttatctaagagaccttccttctttgtgtttctggagtaaagggagttttgtgttcttggtttttttcttcctccttccaaaagtggaaattgcttttttcccctagtaatataagtgatagctcattatgtttaaaaactccaacagtatcaaagagcataaagaaaatttatcatcccaagacaactttttaaaaaaattttgatactcattattcaggatttttctatgcatatactcatagagacatttttatatatgtgtgtatatttgtttccaaattgttttaaactatttgttgtttgtttttatcatctagcatatcgtgcacattttctttgctgttcaaaaatctagtcatttataatggcaataaatcttttaacagttaaattctttgattgtaaactgtaaacttaacttttaggattcctccctttactgagccacgtccctgcctccagagtaggagttgttgctaagactttgtaaggatgtcacagtaatatgtgacatacagcttacatttagtagtctactatatgaggaaataatagtttattacattatgaattaacattaatagaagagccataaatggtaagttaatctttattttaaaaatcaaatgcatgagataatatactttattttcattctgttgtgactgataggaaaatttgcactgcaatatgagggggttggaccaaacggtgtcatgagttgtcttctaatcaaaaaatcctataatttaaacctgtgataatggaaaatcttcacacctaaattactttgaattcacttatggaaaatgaaatgagtccatgtatttttttaaaaacgaataacatttcttaaaatatttttctgattcttagtgttgtaacagcgtagcaatatacttaaaactttcctttcttaacaagtgtcttctttctgcttgacttttataaacagtgtagaacgtgcgatgtggtcactagttgtatgcagcatatcctcatacgagtaccagatcgtaggcatatttatgtattaagttaatatcacatacaaatggtttctttataagtgttaatgttttcatgttttgatcctatcagattttagaaataagcagagttatacctgcatcttagttgttcattttgtgtattcattattaaaatgtatagttgtttaataggttattttataaaacaaatagccatgattccgtgaatagtagaggtaaaatttcaatattataagcctcagataactctcttccttttgtttttctggaattgtgtggttcctctgaaataataaggtatcagctacaatgaggttgtaatagtactgggctgtttaatgatctctctttctctgaaagataagcttttctgggattgtttttctaatatgttaggatctaattgtaatgaacagatatgtgtctaccaaaattctctaatggttttagtaattattaagttattttattaaagtaccagataacctagagttctttttttttctttgggttttagttggcaatatgagtagatagaaaaggctcctccttaaacttctcatataataattttttagcaatcattaaatgttttttcttttttctgattatcacctctttgtgttcgcctcagcagcacatatactgattatcacctcttcaaattgctttcacattttgcagttgtcatataatatatctaagaaaagagaaaaacaatgttctcatacaacagaaaaataaggtgccctagacagaaaagaagcttaccacatcgcaaacacactgatgctgtgtggtatttttttctctgaaatttccacactcaacaggaaacatagacagcaagcttgagtgggtgggtccctgaggttaaaactgttaataaaataaaatacatgaagtttggttttaagttcaaagtgtccagccatgtttagtccattaacagcaataaagtgttctgacgcttcagactaggtgagtgtgctggaattttttttcttcaaatgactttttccagcttttagaaaatgaaagtagttgatctattgattacagttagtgaactttcatacagcttacatttcgtagtttaatatttgaggaaataatagtttattacattatgaattagcattaatagagccataaatgttaatctttattttaaaaatcaaagttttatgcatgaggtaatatactttattttcattctgttgtgactgataagaaaatttgcactgcaatatgagggagttgaactaaacggtgtcatgagttgtcttcaaatcaaaaaatcctataatttaaacctgtgataatgggaaatgttcacacctaaattactttgaattcacttacggaaaatgaaatctgagtcaatgtatcttttttaaaactaataacattccatgtcttataaaatgcctacaagatttttgattaaggaaatgtcattaggccaaactaaaaaagttttagctatgaattgctgaaatgacaggacacttctgtggtgtagattcataagtaacttaaatttttcgtggtttagtaaaattaataggctaaaatattgccctgaaaatttggatattcataaatcataaaattcaggaggtagggagagacctatgggtcatattatgctaataaatttatacatttagatacagaaacataagaggtctgtctaataggaagccacatctagaattcagagtccttatcattattttaatgcttcctactgtacacataataacaatttgttcagttctctttggtcagtgttattgtgcgtgttagtccgacatttctttttacacgtttaacatattggaaaggaaattctagcaggcagtgaaacttcaaacttcatgagatcattatgtatcagaattctaatgttattaagttttaatgtaatcagatgagttaatattgcatttgctttgtgccttccttggtaattgtttttttttttttagccatacagaagtgtatacatagtacatgatgagagaaaaatatcccaatgagctaaaaaagcaagtccaatactacctgcaattctttatcaatataagaaaatctgaaaataaatccaaagtcacacaacaaaggcctatgattcttattaactataaccaaaaatagtcttcatttttaaattttactcaaataggtatttctacctaaatttttatgatctgatttttgtaggaagacaacaggatgtttcattttttgtaaattgtgctggaatggaaaatacatatagtttttatatgcttcagttaattactgaaatataaaactgtttacaagatgatttattatatactttatatatgtagcttaaattattcgcctccacattaactctgcacttcataaagccaggcatttaaagaaataacatatattttcagctaattttgtctattatctgaatttgcatataaaaaatactttatttgttaacattcctaaaattctaagggtttatgatctctgcatagatcagtatcttttgatctgaatgaatcaatatgaagatctttctttctttctttcttttttttttttttttttttttttttgagacagggttttactcttgtcacccaggttggaatgcagtggtgctatcacagctcactgcagtctcaaattcctggactcaagttgatcctctgacttcagcctcccaagtagcttggactacaggcacttgccatcatacccagctaatttattttttgtagagacagagtctccttatgttgcccaagctggtcttgaattcctaagttccagtgatcctcccacctgggcctcccaaagtgctgggattgcagcactgagccacctcgcgcatccaagatctttttttaaaacatcacttagttttcatctttatcattaggatagctgataatatatagattggtaacaaaacatatccttttactccccaccaatagacagaattattaaccctccaaaatgtttttggaaaaaagggaaaaatccactaacctactatatgtaaacaattttttaagtagataaaatgtaatatgcataattatttttgttctgtcttcattgaggcagaggattgggatttagttatagaagcattcaggagataatgtgcgaggagttatttaatacatcccaagataagctagtgttccagatactctggaatagaagtaggtagtatctgtcttgtcagtaacatctgagaaaacatttggtagcaaacccttccctttttacctttgtccttccttttcttgtttcttctgtttttctcatccttcttattgtctatcttactcttcctagcctgtcttacctttattcttcatataaagccaatgtacattcttaggaagttatttggtaaatagcctctaaatgcattaattttttacaagtaaactctttatgttgctcatctrgaacataatctctgaaaacaaattgtaggatttgattcatggtttggggtataaaaataaaacttttaacatattatttaatttatttctgcagatccccaagtaagcccttggcacggaaattaatggattgggaagtagtaagcagaaattcaatatctgatgacaggttagaaacacaaagtcttccatcacgatctccaccgggaactcctaatcagtaagtgtgaattttgtgaccaacatcaggtgtgaattttgctaatttctaattattggctgtatatttttatgcctgaagacaaagatacgcaaaaattgaattcttttggtgaaacatgatttttgttgctccagagcattattttctctttgcctgctgctctttgcagaagtaacatggtatagacttgcggaatgagagtagcgcattgaataaggaccctccactctcactctcctcaacagttaactttcgcagttaagagtccctgataaatgaagatctgttagacttaaaatcttgtatggttgttgttgacatactcatttttcatgtggattcccagcagaatttctaggggagcatatattgtttgaaaatgctttgcaagtgattgggattctcttaaacccccagctcaaccatggcttcagcacgttctatggcctaggaaaaggggtttccagcaccagtccccataagcttagctctccctgagctaaaaagcactgtgtgattcagcacttaccgtatatgtacttcagtctgacattgctcacaaaagttgtatgttttggtataaatgattataagttcataaactagccaaatgcaccagccaaagatgttgattatcttaatttgataatattacaaatgttgtatgtaattaagataatggtaaacaattgtgtgccaccatattaacatacttagttaacccataaggttcacttataaaatacttgaattttggtatgaaatataatatttgaagatgtcttttttcataaatgttttacacacattaatgtttaataaatttgtataaaattctaaacgtggctgggtgcagtggctcattcctgtaatcccagcactttgggaggccaaagtgtgtggattccttaaggtcaggagctcaagaccagcctggtgaacatagtgaaaccccatctttacaaaaacatacaaaaattagctgagcatggtgtcgtgcacctgtcaggggggtggggcagggattgctagaacccaggaggaagaggttgcagagttgagatcacaccactgcacttcagcctggaccacagagtgagaccctgtctcaaaaaaaaaaaaaaaaaaatctaacagctagagcattgaaggctattatcagctgaagaataaagttctaccatatcagaacagtttatacataaacagtttggttcacagagctttaatacttaacgtgttaaagttactcctagaaaaaaatggacttagtaatttctgtcttgccaatttcaggttgcttttatcattttttcttataaatgattrcatatattcaaagcctcattagcttgtctgaagaaaattcagaccttgtttttctcttcccttttgcacaaacagccatttctccatttgtaccagcaacactaaacaataatagcaagttatagaaaataatagcaagttaagccaaagtactcaagtaactaattaacagtagctctgtttaagttttctggttaatgaaacaatttcaggtataatctaaaaagattttttaaaattctgaagagatagtacaaggtggtggttaagagcatgggccctggaatcactgtatgcttgaacttgggcaagttaatctctgtctcatttttctcatctacaaaattatatttataataatgtctttcttatagtactgttatgaggattaaatgaaatgcttagagaaatgtctgacacatacataaatactgaaatattgtaattaaaaattgtaataacactactttgtgtgactgtcaagaggatggcaatatagtattcagtatctactctaaggcttcaaagaaagtcccataaataaaaacatttataacaattaaaaaataattcagactagaatatatttctaaatgatttattctaatccctttattttataaatgctgagtaagacaaaatcgtagtgactaacacctagaaacatgaaggcacttagagatagtaggtaactttatgggtagaatccttggcagattgttgattgtaactcagatcactgacttcccattctctgttccctctgtttatatcacactgtctttttcagagattgcttagtcaacatggcttgacttaaaaacacataccccctttctgatgtaaccatatattaagaaacttggaaattttgaattgaagcatatttttattcagtttttctccctctttatttagtcgaaattctacattcacgcaggaaggaacccggttacgaccatcttcagttggtcatttggtagaccatatggttcatacttccccaagcgaagtgtttgtaaatcagagatctccgtcatcaacacaagctaatagcattgttctggaatcatcaccgtaagagcttttttattttgcttcctctgtattttcaaatgccccaaattgctttacttaaaataatctgggaaattaggatattcgatacaagattttaattatgcaacttttcaaaatgtgtatgtttgcaattatgctcatttgttcctgagagttcttgttgcctctccctccccsacccagtcactatgttgttattttgttgacttagacagttcttcagtttttagtatataaactcaaatatttctgcagatgatgtagcactctggtcaaggaggagggtagttaaagcagagtttccttaatatttttaaaggaaaagaaccataagtatgagtaaaaagtgttgagaaaattaaaatacttacaagatatgtagataggtaagaagattttttaatttacctatgtagataggtaagaagatttatttcttgagaaggagaaattggtgtaagatatagtgagtgcgatcaggggtaaagagtgggcccaagagtggtaggtggaagagagtacaggtgtagggtcatgtttgtccctgggtagggtaaaccaaggaagactggctgagctatcaaaacaagtaggagttcagcctgcgtgatgtatatcttggtaaaacattttgattgtgtgtatatattattaaaaatggagaaataggacagatacacactgtacaatgatacctgtggggaattagttggcaagaaataggattgatgggagatttaatattttattactttagaagttataattctaaactttccagttgatttttaataattatatatgttctaatttgaaaactttaaaaagtatagtaattaaggacatgattgaaatattgatttgatttttaaaattacatacttctgtgacataaaaatgaatcatatgcaggaatcaaaaagcctaattattacaaaccaaaaccaatataattcttgaggcctaacaaaattatctttatctatttttaaagggccttttccaaagaaagacatataaacgcaattgaatatttccacatgtaaattttttttttttgagatggagtctcgctctttcacccaggcgggagtgcagtggcgctatctcggctcactgcaagctctgcctcccgggttcacgccattctcctgcctcaacctcccgagtagctgagactacaggcgccagccaccactcccggctaattttgtgtatctttagtagagatggggtttcaccgtgttagccaggatggtctcgatctcctgacctcgtgattcgcccacctcggcctcccaaagtgctgggattccaggcgtgagcccccgcgcccggcctcacatgtaaattttatagattcacaaacccccaaatcacttgctgatatggtttggctctgtgtcctcacccagatctcaccttgaattgtaatctccaggtgtcaagggcaggaccaggtaaaggtagttgaatcatgggggtcatttctcccatgctgttcttgtgataatgaatgagtctcacaagatctgatggttttataagtgtctggcatttcccctgcatgcactcattttctctcctgccgccctgtgaagaggtgccttccaccatgattgtaaatttcctgaggcctccccagccatgtgtaactgtgagtcaattaaacckcttttgtttataaactacccagtctcaggtatttcttcatagcagcatgagaatggactaatacatttgccatctcaaaacacctttattctactttcctgacttgagtggagaagcgagttcagggtagcttggaactgtgaagagtttttgcttcttctctcttgtgcacaagaatataaaatgcttggagccttctccttggacatatattttataaggtttatgtgtttgtattccattttgaatctatattactgcatttgacattcaaccagtttttaaccttaagaataatgagagagttctgaaaagataagcttaataataataacttacttagttgcttacagtcacttttacataaattatctcactgttctattcaggagaattcagtgaaataggaaagatatgtaatatccattttatagataagaaagccacacttagaacacttgtcccaatttacagaacagaaactcgggctttctgtagcatgagaatcagccaggagaactttgtatccccaacaagatgttatagatgttttttgatttgcaatttagataaaatactttgcagcttggaatccatagatttcagtttttctgttgtccaaatgtgaaaagaatttaaatgatgtattggattaagcacagaacatttcaacatgtaatgaaatagattttttttaaggtttttcacatatacctttttttaattgtcagataaaatcatcttaccaattatttatttaagtgagtacaggaggttgcttatactgtttagaataaagttaccatttataggctaaggataaagtaaaggagaccacagtctacaacacagcatgtgaattggatggttaaatttattagcatacaaatttctaaaggcggcaacagagagctgcattaactgcaaaataagctttttttcactgctgttgttgaagcatttataagaaaatttaaagctcagtggactgaaataaattgtgcacattttttcacacatcttgattgacatttctaacaaacttttgctactatgtgacaatatattgctctgctaccagcatagtacactcgaatataacattttcattatttaccctccacttaacattttccaaaatgtcagattgccaagtgtggtggtgtgcacctgttgtcccagcttactcaggaggctgaggcagaaggatcactagagcccaggagttcgaggatgtattgctccatgatggcgcctgtggatagtcactgcacctcagcctggacaatacagcaagacaccatcttttaaaaaccaaaaccaaaaaaaaaaaaaggtcagagtttaagataagcaagttatttttggtaaaaagccccaatatgaatgttgggcatttggaacacttttagaattatattgccatctttcctttctcttaacaaccgaaagttaacacgaatagtacttttttttaaatgtgggataattttttttttttttttttttttgagacaaagtctcactctgtcgcccaggctggagtgcagtggcacaatcttggctcactgcaagctctacctcccgggttcacgccattctcctgccttagcctcccgagtagctgggactacaggcgcccgtcaccacacccggctaattttttgtgtttttagtagagaccaggtttcaccgtgttagccaggatagtctcgatctcctgaccttgtgatccacccacctcggcctcccaaagtgctgggattacaggcatgagccaccatgcctggctaatgtgggtaaattttttatgtgggtaaactgtgtacagtatgtgttttgagccctggtgccccctcctttagtacattttaggcaaattattggttttaaatatgttaaaacaattgagttagaaatgttatcaattaaagttaaatatggatgtatataagccctgatatttactaatcttgctttctgttcattaaaatataagtgatttgtgttagaatttaaaatatagcagtattaccatttataaccaaaaaaagggatttaaaatagtcatattctggatatattctgataagttctgggagttctgttgaggcctcagatactgacaggggtgggggatgcttattagcatttatctgttttataaattggcttctgagaaacttttttttttttagaaaaagattccactgccacaaaaagtttggaaacctctgatttaaaacaactttcctcctttttgcagttactttgttttagatgcaactatatatcatagtgtttacgagcacaagctctggattcagactaggtttaaaacgtggttccactacttctaattaggtgacctttggtgagttattttatctccgtaagcctgtttcctcactgttaaaaaacagggtgataataatatctacctcaaagagttgctataagcatataataattatatagcttttttcagttaagctcttgggatatattccaacaacttttaatatattatcaacagtttgtctggatatttgaagtgtgagcatctggttgaagacagtgaagaattctccagattctcaactttattcttacattcctaatcacaagatattctagacagacttcataatccagaagtggctttttgtttgtttgtttatttagggacagggtcttgctctgttgcctaggctggagtgcagtggtgtaatcaccgctcactgcagcctagacctcctgggctcaagtaatcctcccacctcagcctcccaagtagctgagactgcaggagcatgacaccatgcccagctaatttttgtatttcttgtggaaacagggttgcatcatgttgcccaagctggtcttgaactcctgggctctagtgatccacctgcctcagcctcccaagttgtttgggaggattacaggtgtgagccaccgtgcctggccatcctcaagtgttaaatccagttccccgagccattctttcctggactattccattctagtcttatctaatgaatctccgcagctttgtctatacctcttcagttccttttgcttggtcttcaaagctttgcctttcctccacccctctcagctactggcactgatgatttccatctacaactcagttgtccccaattcctattccagtcttgatcaagtctagcaatatattgtgaactcttcaaatactaggctattctaggacaaggaagtaaaaaaatcgaaggtttgaatagaaggagatatcaagccatggggacttagagaatgtaacatattagatgctgttgtattcatggcttcaagactaattacaggtccccggacactgtagctgcagtatgcttacctaccattcatctctggctaaaggctctgtcacttgcacttgggagctaagggcagacaccttgagtttggttgaaaccaagaatctcaggttgctgggaggcttattctggaatagattcctactgttaaaatcacatgacattgtcagttctattcttagatattactcatatccctgatagtttacacgagctttttaaagtgccttgtgcgttaattggtaatcaacctgaagtgacatttactttgaaacactgtcattatcagaataaagtagccaaagtgttaagaagcctgaattttgaatcagaattttatctgtatctaatgtaatataagtagagtataagttgggttaaatgcgtaattgaagactagaataacagtagtggttatagttaaataagacatgttctcttgatctacatcttagaaaataagggtttgtttttttctttaagagacagggtctctttgtctcccaggctggggcatagtggcgcaattatagctcaccacagcctcaaactactgttcttgaatgatcttcccatttcagcatcctgagtagctgggactacaggtatacaccaccatccccagtttatttttttaaaaaaattttttgtagagatggtgtcttgctatgttggccaggctggaaaataagagttttttaaagagccatcaatttctggcacatttgtattagtgtctaacaagaatatagtttttgttttctagtctattggaataaattttatgcttctgtgacagatttctatgtacaattgtgcctttaccgttttttaaaaaaaattcatgattttcaagggttgttcatttttcttttttaaaagtaataaaataatcccttcaggattgcatttttttctcactttccctaactcagatcttttccagctcccttccttaaagccagtaaatgctggccttctttgaaaattaaaggtctctttcttgagggtaccagctgtaatttctgacagggctgtgtttcactatgctgcctggttattctccaaattgcatcatgtctcttcattctcttatacttggcagatttttgtgtgtgtgcacttagaaatagtattgtttttaagaattggactgtttcatgacattatttttaatgtatcatttctaattataatgcaaggtttacctatgaaaatcatcttcctagataactgtttaagtaataaatatatatgatagctgtacaatagaaatgaagaagaaagttattcattaaagtaaattgaattaatattcttggagtatgtcttttaaaaaatgtaattgataacctttgcccaatatttgaatttcaggagtctgtgttgacatccttgattacttttatagacttcagagtgtgtgtgtgtgtgtgtgtgtgtgtgtgkatagagtttggttgtgtatgtatacagtttggttattgaaattagaagtatagaaaagggaaacagttacagggattactgtgagagtacataattaaattataagagctccctagactaacctaaccctctgcagcagtcaggcatatggagagcctgtctgccactctctgaaaagttactttaataagaaagttacataagacagtgagaaggcaggtagctctgtcctgaaatccaaagttttactgtcctttcgtcttcatcttaatctatacttcattctcctcaccttttccttataatttggcttaaatcccaacctcagcatttatacttgggctcttttcctatctgtatcttcctgcttgatttgattgtttaaaaagaggttaaaagaggttattctcaaatacctgtagtcttgcaagtagcacgggatggagatttgtgtagattatagagctcatgctgcatctaaagacagcagctgccacttggctttatacagtgtttgacaactggtactgcaggcccattctttccggagcttccagatttttcatcttgaaaatctagatttgtatgcaattttaaaaatgtaattgtttaactcaattatttttataaaaacaatgaatggtccaaatgtatgttggccaaaattggcccataatccatgaatttataactgctcttttaggacaataatgtctaatcataattgygcaataaaaaccacctctggaggtgtttcttgtaaccccagaagtagagattcaacagttttagcaaaatgtaccatagaatcagtgctgtccctctcatgtaactgagtattgccactgttaggcccatactgagtatgccactgttaggcataactgagtattgccaccgataggcccatacaggtttggctcacttagatataccactgctgatcaggcttgagtttctcctgtatattttggtgctgtatttaaactgatagctggaccaagaataaggaaggtttccctgactccattttcatatgttctccaccttactccctttcccacaggcttttagttttaaattttttttctcagcttttaaatttagcttttaaatgtttcctggttatgacaactgtatgcaaagcagaaagagtttctaattatattgcctaagtggttacacttaggtccaagtaaggggtgagacctgttatatatgtcgagtccaattacttctggtatttgtaaagttttagagattcttatcaactgccttttaaaaatgttgcatctcttaagttctgctaagggatgtccatctctgtgtgctctaatcctatgtagtaggccgtggttgagttacatatctctattctaatccatggaaacatttccctagacaagcaatacttgaatctatgggcccttagaagcttgtattcttggcagttgaaagtaacataagaactaccacatttgggagctggaagccctggccattaaggcagacctcaatgaagctttggctgaaaaagagggatgtatgctctgatgcagtctttgtagacttggcagaatttagagcatttgtgccctgaagtatttctatgcagacatctaggctaagtgggcattgctgttcacttgcttcttttgcagttatattttataccatgttataaaatttcagaaagactctaatctctcctaggagaaacttctctttaagaccatacaatcacatcattcattattaatcccagctgacttccttggcactgatcatactttctttcagtttcacaacacttatttactaggtgtctagcagccaacctctcaataagcttacacctcctctacaagggagaacagatgtatccaagggtcactctggcagtaaatctctgtatcagttatcttgttatgcttgatcacaaatgagcctaacttaaagagacataacaaaagttctttctttcttacattgtatgtacattatgtgtcatctgtggctgtgctctaccttatcttcattctgggtcccagactggtagcattccctgtttgggacatggctagtctcatgggcaagggaaaaaagaagcataatgaaatcataagctgtttcatttttttcytttttttttttttttttttttttgagatggagtcttgctctgtcgcccaagttggagtgcagtggcgcgatcttggctcactgcaagctccgcctcccaggttcacgccattctcctgcctcagcccccccgagtagctgggactacaggcgcctgccaccatgcctagctaatttttttgtatttttagtagagacagggtttcaccatgttagccaggataggatggtctcaatctcctgacctcgtgatcckcccaccccggcctcccaaagtgctgggattacaggcatgagccactgtgcccagcccataaactgtttcttaaagcttcctttcaaaagttacacattccacttctacccacatgtcattggccaaagcaagtcacatggccaggcctaatgtcagtggggggaagaagaactttttttttaatgataatatcatctaatacattttccttatctccagaccttatagcttggatgttaggtgtcccgttagtcaacagaagagcagatactaggtataaaatgtgtgcttcagtgccacatcagcagccatgtggcttgacacagtagctgtcatctctcttatacctgtccttaggcaataagacagtaattcttttatcagataataaygccaatagtggtcagtgttcttatcaagaacaattttccgcttacctatttaatcttttacttctcccaaatccacgacttctgtggatgcatacttcttaagacacaagttgaaccacaagtttctacttttggcctttgtggaatgctcacaagtaatgtttttatacattttatgcttgttaaaagctagagtttctgacctgaagttacctttatcatatctagctctttttatcaattcctgttgccacaaattgaggcttatgctctctaatgttaattggattttgttttctcaccttaaatcatatgttctgacaatatctcaaccagttttggctctggtgatgatctcagcactcttactcagatttccaatcctcactgcatcattgaattcattacttccatgaatcgtattttatttctaaatagattaggccaatctcttaagctatttaggctggaatagttactttatctgtggaactacccaattatcagttctggattttcttgcctaccttattcctggctacccgtgactcctctgacaaccttaaaaaaatttttttggaaagatgtttactttgttataatagattaataggtatcttcacaggaataccttgataatatattttattatataattgtttataaatttgataaagtaggaaattagatttattacttcaaagttaggaaaattttcattaaaaagtggcacttccaaataaatatggtatttagagcctgtctcctaccagacattgtaaatatgtgggttgcttgaccctaacttttaaaaaagttatgaaacaacttccaaatttgttttcttgtctagatcacaagagacccctggagatgggaagcctccagctttaccacccaaacagtcaaagaaaaacagttggaaccaaattcattattcacattcgcaacaagatctagaaagtcatattaatgaaacatttgatattccatcttctcctgaaaaacccactgtaagtagcttcttcagatattctcatttttatttgaatttttaaaatcctaaatgaaatttcttttgtactttggcagtttttagttgtaagttgtattacagtaccttctctttttcatcatattctttggtcctgaattgtgccatgatgtawctcaatataagttctataattagaagtgatcatggagtacatagagtatataattaaataagctgtggggttaagggaagattcctataagagatcatctctgataagaactagtcagattttttccttcaaagagcaggcatagaacatactgaacaaacctgcatgttgtgcacatgtaccctaaaacttaaagtataataataataaaaaataaaaataacaataaagaacatactgaatgaaagaagcccaggacaaatagccatgtgttgtaggatttcatatatgtgaaatatccaaaacagtcagatctgtcaagagacagtaagtagatttgtggttgactaggctttggaggatggcaggtgggaaaatggggaacgactgctaatggatacaagatttcttttggaattgatgaaaatattctaaaattagataatagtgatgtttgtacacctctgtgacaagagtaaaaattatggaaatatacactttaaataggtgaatgatatgtgaattatatctcaataaagctgttttttaaaatcacatatatcaagcagtggaagtatcatttgaattcatgtaacacttatgagcaccctctgtatactcatacatatgaacctggcttgctatgagccagattctacggatatagcaattaataaagacagacatggcccctgttcctcctgtcacttaatagtctagcatatgctcgtaagaatgcatgagaggatatatctggttgggctaactgcaagttattagtcaaagaatttactcttctgaactaaaatttttattagaattatgattttttacaaactatgcataatataagcatacaaaaartatgcttcctatatatctgaagaatagattttaagtgaagaaaattacaagttatttaattttgtctttttaagcctaatggtggtattccacatgataatcttgtcctaatcagaatgaaacctgatgaaaatgggaggtttggattcaatgtaaaggtaatctggaatttattttatactcagtttttaaattaagatgttcttattttggtaatatttgactaacattttacttattctctttttaagggaggatatgatcagaagatgcctgtgattgtgtctcgagtagcaccaggaacacctgtgagttatctaaatgkttcaaataaatcctgttttcaagaatatgtacttattttataattcttactagtttaaataaaacaaggaatttcatcatttcttttatttatcaagtgtcaaatgttggctgaatctctttaagttgctgggaagttagttttgacttgttctctgtaagtatttaaaatccctgtttttataaagaagctatttatgactttcattgcttctaaagcattaacagattctatcaaaataacccccttaaaaaacaaaatatagacagaggtatagtttcgtgggggtttttgtttgcttgtttattttttattagagtaatttaagtacattatacttgcctatgcactcctttaaaattttactttaaatggaaatgatactacaaggataatttttaaaactttttattatgaacattctaaacaaaagtagagaaaacttatatatccattatgatgaatctcctattactcattgttcagcttccacaatcatgaactttctgttcatcataggacaattcttaactaattgtaggtacatcatctttattactgttttatataacaagtattgctttcaaattcctatttatgttgtctactctgtttactttcctttttcttacctaaatgatcttcaagcaccttttatcatttaactgtctctctgttctaggaaaggtatgaaccagcagcctgagagagggaggccagctatgctttttttggtgctttgcagcaacctcaaagttggtttgaaaatcacaattgagattgatcaaggatatcatgttatgtggttttggttctggtttttaaggaccttgttttttgcgaaaataacagggtactcatggaatacccctggcatgagcataaacacagaatagtttatttaaatataaatacatcagatagctattgaggtgtcacacaaaactaaagagcatgaatgcaatcacacctctacaggaaacttttaaaatcatcgacttttctgcttttcatctgtttctttttatgtgattgtttgattcctctcagtgtgaatgaatttgtacattgaatcagcctacctctcaagccactccagataaacactccagtctaagtaaaaacagtgtacttagtagcagcttcaagcagagttttgtaacaccactaccacacacacacacacacacacacacacacacacacatcagattgtgactcctaagtctccactaaatagaaattgtgtaactacctactgctattgtgatcctcaatccatgtagtaggatgtgactactaataacttccaggtttgtatattaccagctcagtagcccacagggacctctcagtctaaattataaactcctgggatgtaaacccttaatagacccagcgtggatcctatttccttatttgaaaaaagtccgttgtgactgggggacaagaccggggatattatgtataaaatgactcctggggacatactattaatatgtatgtaaaagatggggacaaagatggtagagataatccaaaattatttattttatatatatttgatgggaaatatgaatatgattgggactgcagatgaagggatgaaggattgatgaattatctatcatgtacaaagttaatagataatatctaaaacagaaaagaataacaatagagagatgttagagatgcagaggtaaatacagaaagatatatctaaagtgttgaaaaaagttgcctctagagatggggaggtggtagggaggaacacaaatagtttcttaacagtcttataaacctagtcaaatcttttaatggtgtgatttataactttgctaaaaacaaaaatttaagacttaaaaaaaaagcagttgtatatcttttggcctgacagtttcacatttaggaatttctcctaatgaaatagtttgactagggaacaaagagtacttacacagggatattaattatatggtttataacagtttaaagtggaaaaataatcaaatgtggactagggaacaaagaaatacaaggatattaattacagtatggtttctaacagtttaaaatgaaaaataatcaaaatgctcatcgttaaagttggggaaacaagttatatgttgctttgtgtctattgagatggtaatgtaactatataaatatggaaatatatccatacgatggcattatggaaaaatatataatttcacatatatgtttgaaccagtttattaaaatattagatacatagaaaaattctggaaacgtgctaaaaaagttaacagtgggtaatggaattacaggtattctgtatttttttaattgtctggatcatgacaatgagcatatattgctcttataattagaaaagataatacacatttctttatttacatgacagttgtaatagtcaatgactcacacgcataaaaaaagtrttcatttttctgagcaatgaatatggatagttttcaattaagtcaaggattcagagaatattctatagatatattcatttccaaacagaattctaagactgttaagttctctttttaatctgtacatattgttggtaatttttcccttctgccatgtagaactatgttccataaatattggctggaatttagagcaaattaaaacatagtcattctattgggggaaaaaattaaaacaataggaatttattatttttgtattattttgttaatttagagatcaccacaaccttctaattggaaaccacagtttaggcaatcgggggaaaaggaaaaggtttctgtttttgtatgaatacataatagttgtacrtgtttatgggattcaaatattttattgtcattttttatattggacatcttctgaaatggataaaacaactcccaattaaagttatgattctctttctgtttgataatcttagccaaaagccgttgctgcaacaaaactcattttaacgtagtttattggccgggtgtgatgctcatgcctataatcttagcactttgggaggctaagatgggaggattgtttgagctcaggagttgaagactaccctgggcaacatagtgaagctttgtttctacaaaaaaaatttttaaattcaccagatatggtggcacacgcctgtgatgccagctactccagtggctgaagtgggaggatcacttgagcccaggagatcgaggctgtagtgagctatgatcacaccactacactccagcctaagcaacagagcaagaccctgtctcaaatatatagcaagaccctgtctgaaatacacacacacacacacacagagcaagaccctcaaacatatatttgagcaagacagggtcttgctctgtatgtgtgtatatatacacacaaacagtttatttagacttgtcagatcagaatgaaatggaaatgaaaaattgtaacatatctgacaaaaggcatattaactataagagagttccctttagtgataatggatacagtaagagattcatagctatcctctttaacacatagaccacctctttttttctgccaactacactatgcacaaaataatgtgaggaaaagctctgtctgctatagcccattattacattttccccagtaccattggctcccaattcactatacttcaggtatctcaaagacatttacaaaaacttggaactaattggtatacaaaagcatcatactgctagtgcacagagggaatatatgaatgtctgtcatctacttcactacataagtagacaaaaaagcaacttgagagaatgagcataactctaaatttgaacgttccagattttaaagctttgggttgaattatctcatcttcacaacaactctaagaaacaatcagaacttttcattttcagatgtcttttcagaacttcagatgtctaattaatcattcatttcagaagcagcagagtaacttctagaccagtgttttttccactaatgacagtgccttattggattttattgactttgtgttgataaagaatttcagtagttgtgcttttatttcttcatgcctttaccacaagcagttcccttttttgtaagatccaaccccatcatttccttctcaacctggcctatcattcctcaaaattcactctcatatgttttcattgctatgttcccagaacatgtccatatttctatttcttttgtctcttttaccttaatcgctgtttgtcttctcactttgtgctatagtgcaagactataaaaatgaccatgcaagatgaaattgtgcaggatcttgatgattaataggaaaaattatggttgttcccatgacctttaaatttattgtcaaaacattaagaatttcctttactgtctcttataaaggtaaaaggaaatgaaaaaaatagtaaagctaatataggattttgtatcctgtaattcaaaacattagaaacactgagaatttaaatgttttattttcttgtgaaaactcattatgagtagtttaaacggtgcttgcctcctccccgtggtacagcttagaataccaaatgagcttcatttcttgccttggcaaattgtcataatactgtctacttgacacactttcagtactttgtcctctgaacttttgatgttgtgaaatatctccaaaagttcctttggctgcatatctagagtctctccaacaacagtgttaacattcccatggtcatctattgcttctctgactctatttatggtccattcaaacttcacctccagcattattcactttgctgcactttcatcttttgtgatcaatttcctctttagatttaggttattcattttaatatgggtttatcactgggagactaggaggcagcccaactacatgctttcctgtctgcacttgaactgaaaacagatgaccatcagactttggaagaactgatgtgactggccactgatgatgatgtgtgtctattatttatgtagtgatttttgtgtactttttacagttattcacggtaaatgcactgtggtaactaaagtttgaattgtattgttgggggactgctgttatttaattaaatcatggtaactgaagtttgtatgtatctagacagtgtaaagctaaagctacttgtgtgtatgtacttggaaatcatcagtcttatttgtakgtctaggcacataataggtcatcaggaaagaaattgttgcatgaagaaggaacaaaaatactctctctggcaaagctagatttctacattttttaaatagataataaatgaaagatgcttttctatatgtagtttagttctcctgctattgggtctattaaaataaattcctgtgctctactttcagaaagttgcatgccaatctgaaaccttatctatattatattacaggctgacctctgtgtccctagactgaatgaaggggaccaagttgtactgatcaatggtcgggacattgcagaacacactcatgatcaggttgtgctgtttattaaagctagttgtgagagacattctggggaactcatgcttctagttcgacctaatggtgagtactctatgtagtaccagataatttatagtaatttattactgttcattactgagcacagcagccagatttctgacataaaacataagtcacctaagtttcctgctcaaagcacagtggctttcattgacacgtggagcagaattcaagttctttgcccccccaccccttgctcccactcagccttgcttactttcctctattctacactagctttcttgcagttactcagatcttccaatctaatcgacttattagggtttttatccttgctgttccctgtgctgacatactctttttgattttgttatgacttatacctatacttcattcaggtctctgctcagatatcatcttcagaagggctttctctcctgactaccatagctaaaatggtctcccatttcccctaaatggtaatagttgtagtactagtactcaataaatactagttgaatgaatgagtaaatttgaactctgttccacttttagaaaatgccataacaagctatagttaaagkgtttttaaaatactgcctttgttttcagtatatgatgtctacttgcctaatcatgtcatctcccaatctggacagctgacttgttaattcatagtcatagaattccaggtttggagaaaacttgaatgccgtaagctctagctctttggctaattgcacgaatttcctccacaacaacctcaagaacattctaccaatatagatagagcactttgtggctcctgaaacaggtcattccatctttggatagctcaaactataaattgaactaaaagtccatctttcttcagtcctgctcctaagtctgtcactctgtgctatgcattataagtttaaccccctttccttcagttttttgacaatagctaattttaccagaaacccacctccctttctccagtttaagagtcctagagtcttcagccagtgttcatatggcattgtttagagttccctcaacactttatcagtctgctctaagaaaaaagttttatatgtctaatatcccaggattagacatattcttctggttttgttctatacaatttactattaatcattattttagccacagaataattattgttaatgccatattaccacttgaatatgtaccataggaaagtgaaatatcattcgaattctacttgtcaccaccacacccaaccctgcaaaattttgcaaggatatttcttttttgtaaacaaaaaataaaaaatcctctttgtacctcttgttcacaaataggcgttttcattttatcttctccactttgtgttcttttccattaatggtctagaattggctttctaggaagattaaaaggacttcaacagaacattctattttgacttttcaaggaacttgttcatttagacttgatacttaggtgagtcattaggtgttttctgtcacatacagctacttaaattttaaaccaggaataacatttttttctgtatttattgtattatattttctcttgataatagatcctaaagaactcaataatattagctaatagttattaaaaactttctgtgcacctaggctcttttgtatattttcatttaatcctcatagacatccaatgagattgatgaattatccccattctagagctgaagatactttgacaccaagacattcagttacctgctcacagattcatgacgccacagagccagaatatgaacaaaaatccatatgatggcaaagacccagcctttttacaattccagatctcatccttttgctttatagtatgagaggaacccaccagggtctacttcttgcaaaatatctttctaaattgtttcatagtcaaaatacggagcagaacctgcatctgttttcagtgtgggtctgtcttttccattcttaaagtttcatataattaaaatttaaaactgtgtttgccaagaatatatttttgtttttctgatcttttctcctttaattcttatttcttcttaggcaaaatgttgtcatacctttttgtcttttcattcttcatttcagaaatttatttttctaaaaaaatgtatagatattcaaggaggaaccagatctcttaggcaagggtaaagaggcccctaccttggctccatgttttagaaggccctgctttggctctctttcttctcccagtggagtcataattttataggaccaaaaggacatgccaagctgtaacctcccttccctttctataccactttttttcaaacctcagttctgggtccagataaccctgagcctctccagatcttcatgggtattttccacacatccgttctctcaaggtgggttcacatggtgtgtgtatcctagcccagaaggtggctaagaggctacagtttgtggagggacaggtatagatatatcttgcatgtgggctgggatcttcacatgtatgtttataagcccctatgttaaaaaatgggactgagagtgggtaacggtagaatacaggcctaggatctagggtctgaatctcctcacattaccatgaccatgaattctggcctagaattctcatttatagtctggcctcccaggttgttttgtagatacatcacagaaagaggatgaagcatattttgtttagcactgtgttcaagttttttgtaacttctcatagttaaacatatggtatataggtctctatttgtactcttgccctaggtcccctacaaattaagagcgggtgtattcacagctgcttctcagcagctcttctttcttactgtctcttcaagttatagacattttcagcaatgtagccaagaacacttcttccctccaaaggtacagcaaagcccctcaactccacaactagtttctgtccccccatagtgacaccagactcagatctggtgtaattcttcacaaatgaattattttttgaacaaaacattatacagtgtatctggtaaattcctatcgtgtgaattcattaagatttccacgttttggggtttgtttgattttttttttttagctgtatatgatgtagtggaagaaaagctagaaaatgagccagatttccagtatattcctgagaaagccccactagatagtgtgcatcaggatgaccattccctgcgggagtcaatgatccagctagctgaggggcttatcactggaacagtcctgacacagtttgatgtaagtaatatcattatatattaaaagcattttgctgatatttgctaactagtttcatagtttcttaagtgcctaatctgtgcattataatttctaaactaaaatgatattctgagaaatgtttgacataaagagttctaaaatgccaagttttaaaaattgctcccaaaatactagctatggttatataaatagaatatgttttaaaaagagggataaggaaattttatacatatgtcatcaaactaaatttttttctatagttaaatagctgtttttttgaaaggtggcagatgaagataggctattatatactttaaaatcctgagcttggccaggtgtggtggctcacgcctgtaatcccagcactttgggaggccgaggcgggcggatcacaaggtcaggagatcaagacaatcctggccaacacggtgaaaccccgtctctactaaaaatacaaaaaattagccgggtgtggtggcaggtgcctgtagtcccagctactcaggaggctgaggcaggagaatggcgtgaacctgggaggcagagcttgcagtgagctgagatcgcgccactgcactccagcctgggcgacagagtgagactccatctcaaaaaaataataaataaataaataaataaataaataaataaataaaatcctgagctaaaggaaaataacttttatttttgaagtttataccttgtcatttaatctttgtttatttttcattggtgcaatcttgaaaactggaaaaaccaaaactttcagacagatcattatatccaatgaactagaatgcttcttcagtgcttataatgtgcattttgacccacgatcacccagtggattttgaaatgttttattcagactatatcaacctaatttgtttaaattaataaacctgaatttttttttttttttttttttttttgagaagcggcctctcactatgttgcctaggctgatctcaaattcctatgtccaaacaatcctccagcctcagcctctcaagtagctggaattacaggcatgcacagccatgctaggctccctggatagtttttaatgtgtttttagaaatgaccatcattaatatttgttgttctgacatatatgttataggtaagtgtttaactataaaacatttaggatatgtctgtttttgttcaaaagttcttagttcatagactgtaaacacctccaaactaaatgaaagttaaatgttttctgcagatttgctactcacaacttcaggtgctcctgctgtaagcagaattggtttcactagttttaccacttttcaaaatatgacacataatttatgttagaaactgaagaattcagctttgcaaatctggttcagtactctactagactatggtatatcattgtatagatgacctattcaaaggcaaagaaacctgtttcctgttagtgtagaaacaagtctggtaaacaaaagagaaattgtttatggcttttgttggaattgtaccttttttttttttttttagcaactgtatcggaaaaaacctggaatgacaatgtcctgtgccaaattacctcagaatatttccaaaaatagatacagagatatttcgccttgtaagtatcttattgtctctgttaaatttaatcttttaaacataactttactaaaacattatttcttttaaatttttttagatgatgccacacgggtcattttaaaaggtaatgaagactacatcaatgcgaactatataaatgtaagtttattcttattatgcctttgccatttggaaaaatacgagccactatgaactttgaggttctttttgttaaaatcctgacctggatagaatattaaaactttcagctatgaaaaatattattgaagtaatattaaagaaaatattttggtacttgtgtattaatacaggtagagcagtggaatggaatagtccagttcataaatagacttagatactagaattttgtttatggtagaggtggccttttagatcattggagatagactatccagtgaatgggtggttgggtcaactgtctagaacaggagcccccaacccctgggccatggaccagtaattgtctaggttgcatgctcattatgaaaatctaatgcctgatgatctgtggtggaacagtttcatcctgtaaccatccccacctcccaccctcccaaccccactccatggaaaaattgtcttccaagaaaccagtccctggtgccaaaaaggttggggaccactagtctagaatacgtcattgtaaagaggcatttttttttcttacctggaaaaaaaaattactatttttttcttaactctgtaattagaaaatttcaaatgtacaaaattaaagcaaaccgtaaaatcaaccttcatgtacacatcactcagtttcagcacttgtcaactgatgacaaacttggtttcacctttaccaggttcttttgaagcagatctttatatcatatcgttcatctataaatactttacctctactcactcttgatgccaacatgtatttcaaatatatcaaaatgtaatttttaaagtggaattatgaaattatttgaaggaaatatgtgaaaattgtttaaaatctcaaggggaggttttttaagcttagatacatgtctaagcttaaagagatgaatttgacaaggtaaaatttgttatttttggtatgcttaaaaactactaaaatcaaatgacaaatggaattttttaaatactagaaaaagcttatttaatatacaaagagcttcataaatgaataagaaaagtaagcctcggcaacatattgagaccccatttctcgaataaaaataaaaatataaaaatataaaaattagcagtcatggtggtgcatgcctgttgtcccagctactcaggagactgaggtgggagaattgcttgagcctgagaggttgaggctgcagtgagccatgatcacatgactgtcactgggtgacagaacaagacccgtctaaaaaaaaaaaaaagaacaatgaaaataatggatgaaggacatgcaaagacaattcatagaaaaggaaattatgcaaatgacatttttaatagtcatttttaaatttatacaaaagtagagagaatagtataaaagagtccccccatacctcttacgcagtttcaagagctatcaactagtggccaatcttagctaaatactaacctccaaattatttttaagcccaaatatatcactgtatatgtcagttgagttaattctcaccattcgatgttgtcatgctctagaaagtctttgtacatgctaaattagagactatttaatcattgcttctagggaaaatacagggttaggttcccccaggccaaaagtcacaacattttaattagctgatcaatacatactgttgtttctgtttaaagacactttatttaatatatagtgctgattcattaacatttaactcatagtcaacagcactataactcatgcctcaaggaagcttatctaacacacatattttctccatgaggtatatcacatccttcttgcacttagaaacactagtcagcactttaaaactacacttgggggtcagttttaaacagcaaaatcaccagtaaaaaaacccaaaaggtaaaaagtaaggcactacatagaatgcaaaaaggccacttgtttacagtatgagagctaaaacaaaatgagttggtttgtttgatctcacctggaaatgtgcatgtcttcagatgactcaaatttttcactgctctaagtatgtctactagatgaccaagaaatccctgcagctgttttgagggttatgaataaattttagcaagtagtcaaatttgcaaatagagaatccttgatggaggattagctacttaggaatatatctctgataaggcctttttttttttggtagcaaaaccacaatactattttaacacttagaaaaataatatcagagttaaatgaaaaatacgtgcagtttacaaaaagaaaagtgcaaatgaaaacttcaaggaattactatttcacctgagattgaaagagcaaaagtttggtaatactacatgtaggtccacatcctttatgtgaaaccttaggttaaatatactatggggccaggcgcagtagcgcattcctgtaatcccagcactaaagagaggcataagctggaggatagcttcagcccaggagtttgagacctgcctaggcaacattaggaagacctcattctccacataaaggggcagtgagtgggagggtgtagaaaaatatgctttgggattccgaatttttggaattttgaaagggtatttagtacatatactataataagtagcatcgctggcaggctatgggacaagtgctccataatcaatatatctgaatagttaacagcaaactatagatattctccctaagtaagactaataaagagtgcaaatagtcttaggtcagttcaggtcagattttgctgtcaaatgagcacaggttggggcaagtttacagaaataaaaaacatgagggccttaaatctgcattaaatattttcttgtatatttatacagtagagccatttaaaagaatgaaattttatttactcatcaaacatcatcttgaagatgaagtaaaaaagacaagcagaacaacattatatatatagtatactaccatttttaagcaacagttttacagaaaagtgggaagttgcatatatgtttatatgytgtatatagaatatccctgagaaggctatatgacaaacagaaaaagattaccttcctggctgcaaactagaagctgaaatgggagaagagactttctttattcactctttgttattctttgaattgtcatgtgcatatatcacctttttaaaaaaaatttaatctcaaaatgtagtaggataatgactgatgactcaactttcccaaatactatcttacctctttctgaaaattatgaatttaaaatattctgataccctctaaagttactttatatgtaaaaattcaagctaaaaccaatggcagaatttttgttcctcacaaattttaccaataaactatttacagataagtattttttatttctttaccaagtctctgcctctgaaacaaaattctgtgttaagctgcttttaaaaatcataatcggccgggtgtggctcacacctgtaatctcagcactttgggaggccaaagcaggaggattgcttgagcccaggaaaatatttaaattcttatttccactaattaaaagataaatacatgtaactgttgaacattgccatgaaatttcttctacagataaaataagaaattgttaataaagatttgttttactgacggcagtttattgaggttagttgtattcactataacagttagtggatgattttcctrttcctgattactgtaaaaagtaatgcaaaacattttattttcatgcccttttctttttagatggaaattccttcttccagcattataaatcagtacattgcttgtcaagggccattaccacacacttgtacagatttttggcagatgacttgggaacaaggctcctctatggttgtaatgttgaccacacaagttgaacgtggcagagtaagtcatagttgaatcttacacattgcttggacttttttcaaattatactgcacatatgtagtcaaaatattcatatttatttaagcctttgtaacctttaatcttcttttcttgtggtttcttgttttaaatcatcatggttaagtgcataaaactgtgactaacacataaataaatgtgacataagtgttagccattactgtcattgttatttaaagggattaatatacatttgttaagggtcttgtgtctaacgtatatacagaactctttacaactctacagtaaaataaataatgcaatttaaaaatgggcaatggatctgaatagacagttctccaaagaagatatacaaatggctaagaagcacacgaaaaggtgctcaacatcattatcagggagatgcagatcaaaaccttaatgagactttatatcctagaggatggccaaaataaaaaggacgtataaaaacaagttctagggatgatatggaaaaaacagaaccctcctattgtgggtttgtaaaaccatccagccattttggaaaacagtcttgtagttcctcaaaaagttaaacgtcgagttggtataacttagtacttccattcctaaatccaaaagagttgaaaaggtctgtccacacaaaaatttgtacatgagcattcataacagcattatttataatggccaaaatgtagaaacaactcaaatatacaaataaaatgtggtatagtcttatggttggatattatttggcaataaaaaggaacgaagtagtgatacatactacagcatgggtaaacctggaaaacacttagcatagtgaaagaggtcaaaaagaccacatagtgtatgattgcatttatatgaaatgtccaggataggcaactctgtagagacatgaagtagatcagtggtggtctagatctggggtaaggatgggggaacggatgaggaagaatgaacaatgactactaattggtatagggtttattttgggtgtaatgggaatgttctaaaagggattgtggtgatggttgcacagttctgtgaatatactgaaaactattgtatacattaaacgagtgaacggtatggtacatgaattacttgtcattacagctgttttaaaaaatcttaagatttaatgaggatttttgctgcctcaaaatatagccagattacttactattaaaaagggaaaaaagtgacaaagaaaaaatgtcggctgggcgcagtggctcacacctgtaatcccagcactttgggagacggaggcaggtggatcacctgaggtcaggagttcgagaccagcctgaccaatatggtgaaaccccgtctctactaaaaatacaaaattagccaggcttggtggcacatgcctgtaatcccagctacttgggaggctgaggcaggagaatcgcttgaacccaggaggcagaggttgcagtgagccaagatcgtgctattgcactctagcctgggcaacaagagcaaaactccatcgcaaaaaaaaaaaacactagtcagcagatcgagatgaaatttattaaatttttcttgtaacttttatatgtttgaaatttattaaaaaaacatttttaaaaattggagaacatgaatccatatgtatataattttatttattatttatttatatcaatatcaggttaaatgtcaccaatattggccagaacccacaggcagttcatcttatggatgctaccaagttacctgccactctgaagaaggaaacactgcctatatcttcaggaagatgaccctatttaaccaagaggtaagaaggcaggatatctgttcattagaactgttgtgttcagggtaaagactgaaagctgaaaatgtttttagtttgagtattggttgctaggaaatactataagaattattgaattatttatctgctttaatggggtactttggaattttattaagagtattatcctattctattataaaattaatgtttttctttagtttctatgactaaatatgaatggtcagtgaaaaagtagtctggtaaataatactactgttactactttgcttattcagaacaactgtttagatatgtttcattataaaaaaaacttttactccaagtagtatcagtacagtatttgggtgtgtctgtggaaatggaaaaaacaattgaaagctattaaattattttccttttttaaaagagtagaggagagcaacttcacagtcccctacctattaagaaggaaaaggttgtaaccaggaccttctgacagcagatggggtgtagatttctaattgccagctcttaattttgcctgagtcagtcctcttggcttcaaatgaaactgattaataaatgatggctcagtatcccaattggaagatgtatgtagagagcgtcatgctgccagttctgtcaggctgctagagacagtgcaccctactttctctgcctgcagctagctatccccctgccaccatctttggttttgaaagggactaaaagaataactgctagagaagagcaaatagcccaagctatgagtgcccaggactatcccatcaatggtcaagcctttggaaatgagaactcccctccaaccccaagagcatgattaaaggaaaccagagagacagagtcttactgacgaaaagggaagaagccagaagttgtgctgatttatagaaaaggaatctggcattgaataaagctaaaatgacaagaattttaaaatttcaaaattttatgggctagagtccatcagaatgaatttagggtttggggacatatactgtgtagctcatggtctaatgtaacaggtcaagccaatatgatatttcttcattttctcaaatagataatgaaagataggctacgtatgtttatataaaataatgtctatctttagcatagtctctattatactccacctgtagattatccatgacagttttatataccatagtggcttttctttacacaccctgagtacattagaactaagacatgagttagtttctaaagtttgagccaaacataattgggaaaatgagttcgctcccataaatacatacatacatggatggattaatgatagcagatactacctcaagtcttgaataccttttacttttactcttcaggaagctctcttcagtgtaaatggcaataaccatagttataattatagtgttgaatgactatagcaaccatttattgagtatatggtgccaagtagctgatggggtgatttacaggtcctctcatggagtctttttagcataagactgatcctttaaagtatagatgttatttcatttttcagttgaaggaaattattttctgaaacactgaatgctgtaactggcagagtcaagatttgaaccaagatgtatctaaacgcaatactcttactgtctccgttataccaaccttggctctccaaaaagaattaatcccactgatttgactttgtgtttttattaactccaatttttaatatacatttatcttgagattttatttttctgatttccataatttcatctgcattgtgtgaggattaggtcagctttgttcacaaaaaatgttttttactttaccatttttgctcacccaagaattcattagttttttttaagcatttctctgggtcttaatttgtttctacctatgtacttgattatcatctttaaaatactttacacatatagaaattgagttataaaaagagtagtaatgtaattagccatacttaaatggatacaactatttctgtaaaatagtttctttcctttttgttgaaattttgcattttaatgagtttatacataacttttggtggagaagaggagtggttggttttgctttccttctaaaattccaatgacatgaatatattttaaagataatgtcatagtaccaacaggttcatattcctgctgtgcaataacagacgaatacactgagacagcagggatgcagcagataaagagtttaatgatcgcagggtaccgagcaaggagatgggaggagaccctcaaatcatctccccaaggagatgagatctgggatggggtttttaaggggatggtggagagcaaggggctgggaagttaagatcgttgattggttgggataaggtggatgaaatcatcaggaggtgcattctttggtgagttagcttacctcagggtcctttagaccaactgagtcagtagtttcatcagtatgcaggacccaaaagaatgtctcaaaggggaaatctaacatttcataatgtcccaagttgttatctgtagagcagttaaggggaactataatcttgtaatgggtctgtgggattctgaggcaacaggcaccaaccaactatgaggacgcgggtcagagagcagctgacctagtgatcaatgctaagtgtgctgcaagctgtgtttagttttctatctccccctcccttctttcctgatgaattttatgaggtttgtagggacaatttcaataatacataagtcaaggtgcataatttttcatttgttcttagaaaaatgaaagtcgtccactcactcagatccagtacatagcctggcctgaccatggagtccctgatgattcgagtgactttctagattttgtttgtcatgtacgaaacaagagggctggcaaggaagaacccgttgttgtccattgcaggtactctgttttccgtcttttatgagtgtatagctgaacagatacgtcatttttaaaagagagtacatattttgtccttatggtgttattgtcactgtaataattagaactcaaagctatgctctgaaggtaggaggcaaaggatatgttctaacatatgattggcagtaactttatcataagatataaaaataatactgattgcactgattcttagatgctcctccttttcatattttaacacctctgaaattggtcttaacaatttacaatagatttgatgaagtacagtactgtgggctgtcttagtccatttgtgctatgtaacaaaatattcgagactgggtaatttaaaaggaacagaaatgtatttcttatacttctggatgctgggaagttcaagatcagggtacacacaggttctcatgagggtctaatgaggactgctctctgcttccattatggcactttgttgtgtcattctctggacgggatgaatactgtttccccacatgctagaagggacagaaggggtgaacccactctctgaagtccttttatataagcgctttaatcccatcagccctcatgacttaatcacctccaaaaggtcccaccttttcttttttttcagtcggagtctcatactgtcacacaggctggagtgcaatggcatgatcacagctcactgtaacctctgcctcccaggctcaagtgatcctcctgcctcagcccccggagtagctagaggtacaggtgtaccaccaagcctggctaatttttgtatttttttgtaaagatgggtttttgccacgttgcccaggctggtctcgaactcctgggctcaagggatccacctacttcggcctcacaaagtgttgggattacaggtgtgagccaccgcgcctcaccggttccacctcctaatattatcacattggtgattaagttttaacataggaattttatgggacacattcagacaacagcttaggcattaggttacagcctaatatttagattcccttccttcttccttgcctgtggctcctcttaggacattcattgagtactcctacctctcttgaagtgaccctaccaaaggctttgctacttctaaaagctttaagtaaacagcaggctactctttctttctttgagacccaagtccccttctgccctcaaagggccaaatacagtgacttcagtctttactgctactgatccagagattaggagacagttgttcctccctattacggccacctttgttaagtgatttattcagaggatatcttgaggtatctctttatacttagactttccaacacactttaagagtagagtttcaaatcttcaaaacagattatagaccaaaatttgagaggtaaagtagcaagaatggtgaaacaccattttatatcccaagtccctgataactactgcattcgtgttcacagattagaagttaaaaagttgttcttggctatcccagtggtaaagtttaatttaaaatcagaccgggagcggtggcccatgcctggaatcccagcattctgggaggctgaggcgggcagatcacctgaggtcaggagttcgagaccagcctgacaaacatggtgaaaccctgtgtctactaaaaatacaaaaaaaattagccaggtgtggtggtgcacgtctgtaatcccagctactcgagaggctgaggcaggagaatcgcttgagcccaggaagtagaggttgcagtgagccgagatcgcaccactgcactccagcctgggcgtgagcgagattccgtctcaaaaaaaaaaaagatatatttgagtttaaaatattgttgtcttttgtgcattcgttgatggtttattattgtcattctatcattttgcattttaaggagttgctccagtaagcttctattccttgttcagattttaaaaacttaaatttaactcctttaaaatagtatttttccaactaacgtggtagatggaagatacagaacaagtaattgagtcagtgcattttttttctgttttcaaaatattctgtatttggcttactacttttataattaaaatattaaaatgatattgttcttctgtgttataattcagttttatgcacaaaagccacaagtagtttaacagaatagtatcggtaagatcttgcctatatttgtcttttttagtgctggaatcggaagaactggggttcttattactatggaaacagccatgtgtctcattgaatgcaatcagccagtttatccactagatattgtaagaacaatgagagatcagcgagccatgatgatccaaacacctgtgagtactgtactttatatacaagtgtatattcttaacatgatgatttttgttgccaatgcatattctaaatcatatttttatccttttttatcttttcaattccttgccatggtcaaataacctctagcacaggggtaagcaaactactgcccactagtcaaatctggcctgccacttgtttttgtaaataaaattttagtggaacacagccatgctcatttatctatgcctgctttgatattatagctgcagagtttagaagttgcaacagtaccatatggactgctatttctaaaatatatttaatatctggccttttacagaaaaagttttgctaacatgcaagttgcctggcatattaaatcttgagtgcttaaacaggcacagaggaacttgctttgtattatttagtcaagctgaatgctgagaatgatagtatccctgaactggagagtcttgatagacctgctttctgtgaaatagctgtggtgaaattgtttttctttttacataaaaacttgcattgcagcggccgggcgcggtaggtagctcacgcctgtaatcccagcactttgggaggccgaggcgggcggatcacgaggtcaggagatcgagaccatcctggctaacacagtgaaaccccgtctctactaaaaatgcaaaaaaaatagccgggcatggtggtgggcacctgtagtcccagctactcaggaggctgaggcaggagaatggcgtgaacccgggaggcggagcttgcagtgagccgagattgcgccactgtactccagcctgggtgacagagtgcgactcagtctcaaaaaaaaagaacttacgttgcaacaacaaaaattacagaaattaagttactttttagtgcattctacactgagtattaattatgcttcaggagccaaaagaagaatcatggaattttagtgttaaaattatcttttgcactgattaagacactgtgaaataatagcattgttggtggaataggttacttgaaggaaattgacctatgtgatccagtaagtgcctataatttttttgtttttgttttgtgagacaagagtctcactctgttgcccaggctggtatgcaatggtgtgatcataactcactgcagcctcagcctcccaagcttaagcaatcctcccacctcagctgggactacaggcatgagccaccacattgggctaattttttttattttttgtagagaggggatctcactatgttgcttaggctggtcttgaactcctgggttcaagctgtcctgccacctcagcctcccaaagtgttgggattacaggcatgagtcaccatgctcagcttggtttttaattacagaaaatttcaaacatagacaatataatgaatatcatgtttatactcagatcccacatttgccatattgtttcatctggatagctgttcactttccctgtatttgaagcaaatcctagatatcatatcattttgttcatattttagtgtgtatctctaaaagataaggattgattttccttttaaataaaaccgcagtacaattatcaagaaatgtaatcaatttcttttttttttttttttttttttttgagacggagtctcgctttgtcgcccaggctggagtgcagtggcgcgatctcagctcactgcaagctccgcctcccgggatcacaccattctgctgcctcagcctcctgagtagctgggactacaggcacccgccaccatgccctgctaattttttgtatttttagtagagacggggtttcaccatgttagccaggatggtctagatctcctgacttggtgatccacccgccttggccttccaaagtgctgggattacaggcgtgagccaccacacccggccatcaatttgttaatattatcaaattggcagtatttaaatttctagttgtttactaaaaaccgtctttttaaattttataacagctttattaaaatacaattcacataccataaaattcagccgcttaaagtatacaattcagtgggttttgtgtattacagaggcttgcaactattgctactatataacttttatttttattttattttttatttttttgagacagagtttcgctcctgttgcccaggctggagtgcaatggcatgatctcagctcgccgcaacctccgccttccgggttcaagcgattctcctgcctcagcctcccgagtagctgggattacaggcacccgcaaccacgcccagctaatttttgtatttttagtagacacagggtctctccatgttgactaggctggtcttgaactcctgacctcaggtgatccacccgccttggcctctcaaagtgctgggattacaggcatgagccaccaggcccggctatataatttttaaaacatcttcattccctgccaccaccccaccccaaaaaaccccaagctcattaacaattattcccatttcccctcataccctctctaacctcccccaacccccaacctccaatctaggcaatcaccaatctactttctttctctgtagagttgcctattctggaccttttatatgaatgagatcatacactttggtcttttctaactggcttcttttaagtagcatatttaaaggtttatctgtactgcagtatgtattattactttattcctttttcttgttcaataatatttcattgtgtatatttttaccacattttgttcatccgttaatctgttgatggacatttatttggtttgtatccactttttggttattatgagtaatgctgccatgaatttttatgtgaacatacgttttcatttatcttgggtatacccaggagtggaattgccaggtcatgttttcattctgtttaaccttttgaggaacggccagttgtttccaaaatttctgtaccattttgcagttcctctagcagtgtatgtggcttttgttttcttcacatcatcatcaacacgtgttactgtctttttttattttagccatcctgctgggtatgaagtagtatctcactgtgaatttgttgtgcatttccctgataactaattgtattagtctgttttcacactgctacaaataaacacttgagactgggtaatttataaagaaaagaggcttaattgactcacagttccccaggctgtacaggaagcatggctgggaggcctcaggaaacttacaatcatggtggaaggcaaaggggaagcaagcaggtcttcacatggccggcgggagagagacagagaaagaagcaggaggtgctgcatactttcagacaactatgtcttgtagagaactctatcacgagaacagaaagggggaggtctgcccccattattcagtcacctcccacaaggcctctcctccaacactgggaattactatttgacatgagatttgggtgaggacacacagctataccatatcactaatgatgttaagcatctttacatgtgataattagctatttatttgtatatattttttggagaactgttcaaatcttttgcctgtttttgaatttggccgccattttattggcgagttgtaagtattttttttatgttttctggataaaagtttctgatcagatctgtggtttgcaaatatttgcttccattttctctttctgttttcttgattatagtagttgatgcacagaagttttgaatttggtgaagtctagtttatctgtttttcctttatcacttatgcttttggtatcatagatgagaaattattacctaacccataaatgagtctacaagttttatagttttagctcttgcatttagcattgatccattttgagctaattattgtgtgtggtttgaggtagggttccaacttaactcttttgcatgtggttacccacttgtcccagcaccatttgttaaaatgactgttctttcccattgaattgtctcagggctsttgtcaaaaatcagttgagcacaaatataagagtttatttctagacttccaattctattccattgatttgtatctctgttcctatgctagtactacactgtcatcattactgtagctttgttgtaaaatttaaaatcaggaaatgtaaatccgtaactctttttcattttccagcttgatttagctattctatgccccttgcattttcatatgaattttgaataagtttattctttctgaaaaaataaaaaaaaaaaaccagcaaccagaatgttcatagggattgggttgaatctctagatcaaattgggaagtattgtcataatagtgatatcacatcttgcaaagcatgaacacaggatggtctttctgtttatttaggtattctttaattttaattgtagttttcagcatgcaagtcttgcgtttatttaaatttattcctcagtattttagtatgttttggtgctattgtaaatggaattgtttcctttattaaccaatagttttgtgtgtgagagagtgaatttcttaggattttcttttgacaagatcatgtcatcatgtcatttgcaaatagatatgttacttctttccaatctagatgcctctttcctttttctttgtctttcttgtataagtatcctggatagaacctccagtacaatgttgaatagaagtgatgagaccagaacacttgtcttcttcctaatcttagagggacagtttttagattttcactaattatcatattagccatggattgtttataaatgccctttatcaagtagaagaagatccctttgttacttgttcattgagtgttttcatcctgaaagtgtgttcagttttgttaagtgcttttcctgcatctgagatatcatgtggtttttggtcttttattctattaaggtggtatatgacattgatttttagatgttaaattgaccttgcattcctgagataaatctcacttggacatagtatgtaatgctttttatatgttgcctgatttgatttgctagcattttcttgaggtcttatatctatattcttacataataggatttttaaaaagattttaattatggcaaaatacacataacataaaatttaccagctcaaccatttttaagtatacagtttagcagtgttaagtatacttacatttttttgcaaccaatttgcaatttcttgcaaaaccaaaactctatatccattaaaaaaaactccccattttctcctctcctgagcccttggtaaccaccattctactttctgttcctatgagtttgactactctagatactttacgtaagtaaattcatgtatttgtctttttctgactggcttatttcacttagattaatgacctcaagattcatccaagttgtagcgtaagtcagaatttccttcctttctaagggtgaacataccacattttctttattcatttatctatcagtggacagggttgcttttgccttttgcctattgtgaataatgctgctaagaatatgggtgtataaagatctctttgagaccttgctttcatttctttcaggtatatacctagaagaggaattcctggatcatagcacacatgggcttttggttttgtttttataatttgtttaaaatcagaattcagatatagtctacacattttgattggtttatatgtctcttaaatctcttttaattgaaagcttcctccttcatttcttgtttttttttttttttttttttttttttggtaatttacttgataaacgaatcaggttgtttgcaacatatttctgacggcgtgaattttgccaatttacatcctcaaggtggtgttctctgtgtttcctaaaagtggtacatgtatggcttgagcatcttaggtcatatattctttcttcaaacgcacataatgtctgattgtcttttttttgtgaagttagcacccttgagtaatcaatccctgcattcattaattcattggatttgcaaaataatgatattctaattctatcattctgtctttattagctggactacttctttaaagagaaacttcatatctactatttggttagcaagtggtatagcatgtgtaggaaaggcaagaaaaacatttgattctttccctttatctataagctttcaatataatgaatcatttactagcttcctccaagggtgatgacttaaatttatttgggtattattttgaaatcaaggatttaaacatagttgatgtgttttagcccattgtagtttttgttgttgttttgttttgttttgttttgttttgagatggagtttcgctcttgttgcccaggctggagtgcaatggcgcaatcttggctcactgcaacctccgcctcccaggttcaagcaattctcctgcctcggcctcccaagtagctgggattgcaggcgcccgccaccaggcctggctcattttgtttttagtagagatggggtttctccatgttggtcaggctgatcttgaacttctgacctcargtgatccacccgcctcgacctcccaaagtgctgggattacaggagtgatccaccgtgcctagcctgtagttatttttcttagtgatatccagattgtcctatttttggccagtgggagcctgttcaccttggcttctgagtccttttgtcaagaccctggtaactttgatagctttgttgctatcagaaaatatatccaggcccagcttgtacatcttgtgcccctgatttagaatcagtagtttctccaagaagcccggttctttttattgagaaactattttaggcaccaacctctgagcactaaggacttttatttgcttgggttaatttttgtctctcaaaatgataaatggcacaaccagtaaaatacatttatcataggttaatgcttatgcttccaatacaaattcaggaccacagtgtttttacttagcctcttttacatctttaacaagaatactggttctttacaatattagcaatgaaagacttagaatatcacaaatactccacattacacaactgtttcagaataacaacactaccactataaacagtatggctaatgaaaagagttttcctttttttcacagctctttttgccctttgagtatattctcccacagtatgcagtcaaattactgaggtgtttgtttgtttgtttgtttatttgcagtatttttgagacagagtcttgctctgttgccaggctggtttgcagtagtgtgatcaccactcatcgcagcctcaacctccttggctcaaatgttcctcccatctccacctcccaagtatcttaggactacaggcacacaccacagcacccacccaatttttttttctttttttgtagacacagggtcttgctgtgttgcccatgctggtcttgaattcctggccacaagtgatgctcccaccttggcctacgagagtgctggtattacaggcatgagccaccatggccagccaaattactgttttaaagtcccttcagggatgggtgcggtggctcacgcctgtaatctcagcactttaggaggccattgcaggtggggatcacctgaggtcaggagttcaagaccagtctggccaacatggtgaaagcctgtctctgcgaaagtacaaaaattagccgggcatgatggcaggtgcctgtaatcccagctactccggaggctgaggcaggagactctcttgaacccgggaggaggaggttgcagtaagtcaagattgcgccattgaactctagcctgggtgacagagtgagactccgtctaaaaaaaaatgtcccttcaaatagctctcctctatatggttgtcatcaactagatacacacattgattagttttatgatattgtcaatgcttagggattttaagatttttataattatatgctatatttacattattccaaagtataaatctaaaaaggaaggtatatttaatgaagtctagtctagtctctgtccctctcctgctcccatttccctccatccctttataagaaactatttttatttattttattttatttttatttatttatttatttttttttttttgagacggagtctcgttctgttgcccaggctggagcacagtggcgcgatctcggctcactgcaagctccgcctcccaggttcacgccattctcctgcctcagcctcctgagtagctgggactacaggcacccactaccacgcccggctaattttttttgtatttttagtagagacggggtttcaccgtgttagccaggatggtctcgatctcctgacctcgtgatccacccaccttggcctcccaaagtgctgggattacaggcgtgagccaccgcacccggccaagaaactatttttaaaataatttattcttccattgctttttttttcttaacatacatcaagatagatactgtattttcttccctttcttttataaaggtaatataatatattatacgtactttacctaccttgctttttttacttaataaaataacctggaatcattctctagtagtttgtagacttttatcccttttcttcccgactagctagtattccattttgagaatgtacagtagtcacctggtccctgttgatggcaattaaattgtttccaccttttctgttataaataattaggcaatgaatagccttgtttgtgaatatgtgttttcagtttctttttctggtttattttttggatagattcttagaagtgggattgctgggtgaagaggtaaattaggttaattttcttatatgctgccaaattcccctttatagaggctgcagtattttaacatccctaccagcaacatataagtgagttttgccaacaaaatatattgccaaactgtattttttaaccagtctagactgttagtgaaaaatggtatctttatgcagttttgttttgcattttttaagtaagcaagccaagtgagatgtttgtcttttttggggggagaggggacggttttctgacttttctgatcagttctgttttttatattttatttttcagagtcaatacagatttgtatgtgaagctattttgaaagtttatgaagaaggctttgttaaacccttaacaacatcawcaaataaataagaaagcaaaaagatctgggatatgtgttggaaaactgctttcccttatgttcactgtgccataatgctgctcgcaggaaatggcattttacaaaaaaaaaatgaagaactcaaaaaaactttgaaaacttcagcactgttgcactttatgttttaaaaaatgtcactctttcaaaatctataactcatgtatttgaagactgtttcatgctttgctccgaacaaatagtaaataactgagtatgttcagggtaatttatgaaattttgtggtggtgccatgcaatccccttttggtagaattgccacaaacaaggctcaaaattctcatcatctctgttatacacctgtatcatgaaagcaaaaagaagtaaacatcaggagtcagctctggtcttttgcagtggtttgcgtacttactatactgattaccagattttatttttaaaattttagcaatatcgttcttaatattagccaatacactgcctatggatgcagcacatttttccctgcacaccccctgtagagacctgcctgctgctcagaagaagaaagatggaatttgctgttcccaggaaatgctgcacattgtccatttaccagcatcttatagaaaatataaatatgaatctacaaattctcttggatttaataatgtaacttatatttatcataaggttggcttattccaaatcatgtgatttcacatacttgatgtaaaggaatgcatgcattgtgtcttaaccccttaagtgccttgagacgtccttgtatgtctaacgaaaaggcactcatttgaccccactaggaggtatatatgtatattgtacattcgtatatttttatgcattttgaataagttcacattttaaaaaacagctatattgagtgttatacagtcaaagaagggtaaggaaattctgtttcttactcagtactcgtgatttgctataagaagcaaagataatttgtgttctactgagtgcacactgctgctatggaattgttcaaaatctgcacattcctttacttgagggactgaggggttacggtttagcagctcaactttaaaagatgcttttatgcttcaaatttcatatttatttcatccctaactttaggaagacatctaacatgcagattaatgttaaacatattgataatctaagctaaagttagagcaaataattgtgatttattcatgtccataactaaaatattattctttagcactcatttcagttaatatcaagctttgttcacactgatatattgattgggattcttcaaacgaagaatgaaacattattgacttatttctaagtgtaataactcaataactaaattgagaattttcttgttttttgtgtacaattaaattattccattttatatatacttattaagttataagcatgttaataaggagacttttgactgtccagcctaatggaggatctgattcccattaaggatgtgggaattcccgtattttcctcttcaggtttttttgtttttaagtctacagagagatagaaccttaacattgcccagtttgataaaagtgaaaatttgctcacctatacaaatgttattttacacaattattttatgtggattggggttttaaaagattcatttcctagcagtttctgaatatttctgtaagatcttgataaagtttagagtcaaatggcagatattttggaaagccatttagtatgaggggaagagtacacattttaaatctttggtataatctaaacgatgtcatttcagacattcaaaactcataataataaatttcaggaaatcaagctcctaaacattaatagccaagataccaaataaattatcatattaaaatatttaagtttatttaaagagagaagtaaacataaacttatgtcaaagagaaattctcttaatctatttcctgacttcacagtcaaaacagtataagatagtgaagtaacttataatcttatttggtcattctgttctataaacagacaaatataatttaggctgctatatgacatgataaattaaaaactgagaaagtaaaattatgtcggggtctacacattaaatgactgttttggcagtttttcacctgaatttaaaaataaaatttgtctgttctatctgtatggacagaatatgacaaccatagaccaaaagatatcattgtatagatgtaaagagacaaaagtcatggttggcatgttctttaatttagggccttgtttatacttgtgagtttaataatttcttggcaatgagcactgctgcctttttaaatcatcaatgcctgtctttaaatgccaatcattagaagtttagaattacatttaaatttctcatatatgaatttttcatctgggaactacccactgtcgtcatttttatgtgcagaaaagatcctttttgaaaaccatatttattgggatcttatttaaatttaaattatcctttacaacttcttaaaatgaatatgctaatagataagactttatccattacatctaagaactttttaacctgtatatcaatctaaataggtttctagaaataatcctagctttcatacaccatgtagttctagactccgtccatatcagtgtaacattgtgtgataaaatgccaaatgtcttgtatctaagctacgctcccactcttccagccacccctacctcccaccttgacacccttaagaaagcaatgctgacttttattctgacaagtggaaatcaatagtggttaatcaagtggattttgtaaatgctaagaagtgtttgtgaaaaccttccctttctgagttaggattgttttttcctgttcatttcaggtgttttattgagcatctgatttgtgtcagcaccatgtaaatatgatgaggagtatttggaatagactttacattcaccagaaaattgatagtatttgttaaaccaatgcatccattcaaaatagaggcagagtaaacagcctaagaaatgatttcctttctacagtctgctaggagaaagaggtgagaggggagtggttgatgattttaatcaagagtaaagggaacatttattacatgaaatctgacttcagttgtgcaaaggtatgttaagacattaagacaattgctggaaggtttcaaatatgtgtacacacacatagagctacttttgtgtgtttatttatatgtatatttcacaaaggctaatgcccacagaggaaaatgattattttaacttctgggttatcatctgctggcagggtctgatcaggtctagagtatttaaggaaaagtctcctgtcttctatctccactagaagtactgcagcttgagagctgaaaggaacttgaaaaatgttatccagtcttcacttagcccatttttatcggcattaggaaatagggttcagcaatggttattgatttagcagtctggtcttatatgatctgctttctaattatctatctagtattcctatattatactggaacttcaataaattataacctatgtgaatatcataaattcttgtgaatttttgtctatttccagtagagaagcatactcagccaatgttttcacttaataactatgacaaccttaaaggatgtcacttaagttagaaaataagcaggcttaagaagtgattctaattaggacccccactcagtttgctagtcatgcctgcctgacagaacataagcttttgtaaagtatttagactgataacacatgcagtatgaaaacattatagactgcagttagaagactaattttttaaaagcactcaaaacatagaactaagatttagaatatatgtccatttataatgaaataatttatgttcataatgtgaacatgtaagataagtaaataaagcattacttgttttataatatcaggaagagagaaggaaacattagtttataacaatgtgctatttaatatctgtattttgaacatttaaaatactctgatggtaaggttgccaaagtaattttgaattcataaaaattgtttataccacaataatgtgggatatgtttacaggctcttttattttgtggtagttactttatagttcagatgaatttgcatttcagtcacttatagtaaataaagtatattaaatatttgttggaataaaaatctcaatgtaataggacatagataaattatgcaacagcctgctttgatgaaagctggtgcattatgtgagctgccacagttaatactttgtattaacattgcttacttcccccatttgcttcacctatctgactacaattgctggaatcattctttttgtggtgcttcctccaagtgaaataactatgttattaaaacctactggattaattttatcaaatatcagacttactgatctcttggcagagatttattggtgtctcagtgtgatcacaatacaagttgtagcaaccattttataaaactcttagagaattatgtagataaaatggaaattacataatcctaaaacatttttgagggctaattgataataatttcagcaattttattaagaacccagtaaattaatccctaatttgtatgttttttgttcaacttaccgtgtctgcaaccattatatagacttcattgatactcagcaattactacagtgtgtcttacaatgttataaaaaacaaacagcaatctctgtttctgccagaagttagatatttttttatagtcctgatgaatttgttgtgagtagacaccacatagttatttctgtttgcatataaatttgctgctatttatttgtatgtttttctactgtagtatgctattgatttctgaagttataatcataatttttattttagtaatccaagctaaatgggcaaccagaagtaatatctgctagggtgcaatccatcagcattggttcagtgcatatacataagtaaaccagtttaaaaaaattttactaagcaaaaggtagtagcaatattgctagttaaagattaccattttaggggaaagttcaaaggtttaacttcctgaaaccttttaaacttttcagtgcaagaatgaaaatgtttgaaagccttgttaagctcataaaagtttcatttaaacactgtagagtttcctacctttgttgtgtaaaggatatagaaaatatttttctatggacagaaggttgaaactgttaacttctttaatttcattgtttaaaggagataaaatgttatttgtgtgtctttcatgctgtaaagaaaatgaatgtatctttcaaatgtcattagaattatggcttgattctaaggatactctatttgttttaaagtctacacgggattgaaaagaaagggaagagtattacacttcattgtacaaaatgtaattttagaagaaaaactaattttcattataaacaagagcaatcattgaagcattttcagatataatgtacattctttttcattttgctttgcctctagaatagaaacttttcagaaaatttgcacatactgtttgtaagtataaaataattgaattctagacttttggagtgtggaagggtgtttgtgtgtgaaggtaataaatgtgttgctgcatgtgtttaccatagagaacgttgccaggctttgtcaaatgaggacattgttgtgagggtgtgacttttgtgaagccagaaaactgtgcctaagattcattacagtgagtatgtgcagaggcccctgacccagtaaatgctttttgcctttttattcccaatgtcttggacagttgagacaacttggcccaactctgaattgtagcagtgatgtcttatatgcttacgagtttatattaattcagctgaacaagaactacatcttaaaccacctttgtaggtatgattaatacgtgcaacagctgctttaaaaggtggtatttattattcatcactcatgaaacttgactcagtgaggacttcattatttttatttctctttccacgtctccaactttttaaaaatcactaatttaactctttgttaagtactcaagtacaaagtgatctcttctttcatgaactttgctataactgttgaaaggattggtgtcaggctctctcaaccctgggagtttccaaaatttagcaaatattacttgtgataagcttaaatgccacatcgctaagtacaattattaccaggaatccgtcaagggggagatagccccgctcacacccttagacccaaacaggtgctggttcatgctttctccacaaattggcagttgggtacttccccactgtcatcacagttgagctcattttaacatatattcaaagaagctttttagtttctactcctgaattgtagtgttcaagttatttgccttcctgggtaagaaaattttaacccaagtctgggattctctggcacctgtcttttcccatctttcaatgagttggcaagattaggtcaaatttcaatgctaaatttgattttttgaattttaaatagttgcactttatttcatgctgaccaccaacttaatttatacattttaaaataaaattatcctagaagtgttgtaaacgtgggaaaattttaattagtgttggaggtcattagattggacccaggtttaaatataatgatctcttcacagcttatttgatgtttaagagcaacttgtgtgatcttagctttgcaggttttctgtaatttatgtagcacaataaaggataaccagttgactgtgttactggactctgagttctcacagctagtttcatctaagcttggtttattatcatttctgctttggatttttttgtgcatcacatgaatacttagaaatccatttgttttcagtgtagtacctagggtgaagtagatgctgcacaagtaagtttaagggaataaaagtcccgacactttatatacatgttgaggggcacgatttaagagactgaaacagtttacattaaactgtttttattttctgccagtagactctatctgcttaaaaaaataaaaattgttcaacccagtgttctccagcatcaggacattacagttgtaatctatgttgtaatcttttcaaataagaaaagctactccttattctctacagtgtaggcttaattttagaaccgataatttactatatctgcattattgatatttttaagtagtagttttaaaaataattatttctatgtggagggtgttttaatttgggattttttttttcttgtaacaggtgctatttgtaaatatgaaggggaaaagtcacttagttaaaagtctagcttatgtcataattaagatacaattattcatttcatgtttgattctattaaactagtggcaaaacagaactggtcccttagttttttagattacctttccccctatatcacaaaaatatctctttccatatgatctcataattgaggcaaagaagctaagggtttatttaaaatgtgtataagcttgaatttggtcaacactgcataatttgaaatcactctgcatttgtcactgcagcttactgtatgcttgaaaggccttgtgtgtttgtcttaattttagtgaaaaaattagaatttctgccattcatgtacaaaaaaattacaactacagcaaacaagataaaaatgctggtttgcattaatactg

SEQ ID NO: 93685 - DNA, 16815 bp, Homo sapiens
ggtggcgcatgcctgtaatcccagctactcgggaggctgaggcaggaaaattgcttgaacccaggaggtggaggttgcagtgagctgagattgcactgttgcactccagcctgggcaacaagagcaaaactctgggaagaaggaaggaaggaaggaaggaaggaaggaaggaaggaagggagggatggaaggaaatttgttgggctttttcaggaaaacctagcacgtgcagtcaaccctactccaaagctggcttttcagatattgagctgaaatgaaattgcttttgactagatgagaaggtaggtgaaatgcaattgaaggtggaagtgtcccccagggcattgacctgaggatgctggaggtagaggcagggggtgggggaagggcgctaagcaagggggctgctagcgaactgcctgtgggggcgggtctgcacatttttataggaagggacattgctggtgggtgttgaaggttaaataggagtttgttaagaaaagaggctgagcacagtggctcacacctgtaattccaacactttgggaggctgaggtaggaggattgcttgaggccaggagttagagaccagcttgggtgacatagtgagaccctgtctctaaaaaaaattaaaaagttagctgggcatggtggtgaacacctacagtcccagctactcaggaggctgaggcaggaggactgcttgagcctgggagttcagggttgcagtgagctatgatcataccactgcactctagcctgggcaatagagtgagatctcatctcaaaaagaaaagaaaaaagaggaagatgtgttgatacagtatgacagtgatgaagatgatgacgataactacagacccactgcagctgacaaagtgcattcacattttggatctctggctgccctggctgtggttttttggggcccattggacaaagattttcgcctttgtctgatggagaagaaatcacgggatcaagggaaataacaaatccgaagtacacagcagcctgtgttggtgccgggtgctcaatgtgccctgcttgttcttccctctgtgcccttacaccaggttgaaatgttcttcctcttcttggaatttccccacagactcctactcatccctgaaaacccagcgcagattcccagctcctagcctcaaacctgcgagggtgggtcctcaccactctcctacctcagaccctggagtccggacccccaccccactcccttctgaaacacagagccccaggtgtggtgtaggcccgaggccgggcgcaagggcagtgggtcggcggagcaggatgtgcggattcagttacatttatctggcctcagagcgatggcagagggagaggcagggctcttgtgcggggaggtcctgtgtcttctcactgctgagcctgagagaggaaaacagggacatatacagagatgtgggagagaaagagagaccaagatgacagaactggaccagggagacagagactcagcccccacctccgctcttctcccgctcaccttgttgaagaaatagatggaggtcaggatggtgaacaaggccatggccagggtcacattctgggggggagatcagaggtcaggacccttcccctccctgccctctgcccagccccaggcctcccttccctgccagacccctcctcacttcctgaaagttcatggccttgggactccagccaccccttggttggtcttctctctctttcctgggcctctgagccagaggggggagaagccactggaactccgagagggggttgtcggagagaccagaatggtggccatggcaacggggaaagggcattctggtagaggggacaggcaggggcatagggcagatacagaccctggtgtggcccgccacatgtggtgtctgaatgtgacatcgggacgtgtgagattggagagtctcaaccctgaacaccatactgaggtgtttgggttttgccccggagggtgctggggagccatgagagggttgagagcaggggagggaccaggtcagttctgggtatagaaatatctcaaaacaggagcctgcaggccaggagaacagtaagggaggcccaggcaaaatttcctcctccagatgggaggatcacttgagcccagggggttgaggctgccatgagccaagatcacgccactgcactccagcctgggcaagagtgagatcctgtctccacaactaacaactaagaaaaaataaaataaaatacatatgatacatttgtgagatacctatttacctatctatcgctaccacaaaaatggggactatacaatctgctactcaggtagctatttgcgttatttgtggcagatatagtctcgctatttttggtagttatgttgtacaactgtgaacacttattggggaaatatatgtgtgtgtgtgtatatgtatacacacacacacacacacacacacacacacacacacacaaacacatatatatagggttgggtgcagtggctcatgcttgtaatcccaacactttggttaagtgagacagtagaattgcttgagcccaggagttcaaggccagcctgggcaacattgtaagaccccatctctttaaatatatataaatataggccaggtgccggtggctcacacctgttttcccaacactttgggaggccggggcgggaggatcacctgaggtcaggagtttgagaccagcctggccaacatggcgaaactccatctctactaaaaaacaaaaaaacaaaaaaattagccgggcatggtggtgcacgcctgtagtcccagctatttgggaggctgaggcaccagcaacacttgaaccccaggcggaggaggttaaattgagccgagattgtgccactgcactctagcctgggcaacagagcgagactccatctcaaaataataataataaataaaaataaataaataaatagaaaataaatagaaaaatatatacttttattaatgaagcaatgggtccttatttgctgattcagtggtcacagttatacaacatcgctactatgaataacaagaattgattgtaaacacggtacctcacggcactacccagaacattccagaaggcaacacattctgcagagcaaacggcaccgtctctccaacaaatccatgccacagtgcaaaacaaaagcaagtagccttgctatatttgaaaaaaatccgttaagagacacaagaccagctttgaggggtgatcctggaccgggttttggcttggacaaaacaagttataaaggctctttgtgggtggaggccgaggtgggcggatcacctgaggtcaggagtttgagaccagcctggccaacatggtgaaaccctgtctctactaaaaatacaaaaattagccaggtgcagtggtgtgcacctatagtcccagctactcaggaggctcaggcacgagaatcatcagaacccaggaggcagaggttgcagtgagccgagatcgtaccacagcacaccagcctgtgtgacagagtgagatcctgtctcaaaaaacaaaacaagacaaagtctctttggggagaaacggagggacatttgaatagggaatgggtatcagacaagacgaaagcactactgccaaggagaagaggaggttaactgaaagacgcaggttacaaaattgcaggttctgtatgatctcattttggtaagaagtacatacatgaaaaactgcatttaaacatcaggtttcactctgtcgtccaggatggagtggagtgacagaatcagggctcactgcagcctcgacttcaggctcaagcgatgagtggctgggactacaggcatatgccactacacctggccagttttttggtatttttagtagagatggggtttcaccatgttgcccaagctggtctcaaactcctggattcaagtgatctgcccaccttggcctcccaaaatgacaggattacaggtgtcagccaccatgcctggcccagttatattgattttagacttccaacctccagaactgtaagggaataaatgtgtgtcattttaagccactgagtggtaacttgtcacagcagccaatacatcagtagataggaaagtgctgacatctccaggggctagaacgtggtttctagtttcttaattttgcttcaggatttttttctcttttctgttttttttagagacaggctcttggtttgttgtccaggctgtagtgcaaaggcacaattacagctcactgaagcctcaaattcctggactcacgtgatcctcccatctcagtctcttgagtagctgggactacaggcagatgccaccataccgtgcctggctaatttttgtttatcttttatagagatggagtcgggtgcgggggggtgggtctcaccatattggccaggctggtcttgaactcctggcctcaagcaaccctcccaccttggcctcccaaagtgctgggattacaggtgtgagctgccagctcctggtctggcttaagcctccagcccttctacttctttattccaggggcctctaccctatttcaagtacgaggagagacagagattcacaaaacttttgtatctggtgcaggggctcacacctgtaatcccagcactttgggaggccaaggtgggaggattgcttgagcccaggagtttaagagcagtctgggcaacacagcaaaaccctgtctcaaaaaacaacaaaaacctaggacaggactggaggctgactgtgcgcagtgaggcaggagagccagccagccccaggtggtgctgcgaagtgtagattttattagcattgtgggatggtgaggccgcctgagcagcagacgattgccattgaaagatgacttgttggctgggcatggtggctcatgcctgtaatcccagcattttgggaagccgaggcgagtggatcacctgaggtcaggagttgaagaccagcctggccatatatatatatatacaaaaattagccgggcatggtcgcgtgtgtctgtaatcccagctactaggggggctgaggcaggaggatcgcttgaacctgggaggtggaggttgcagcaagctgagactgtgtcactgcactccagcctgggaaacagagtaagactacatctcaaaaaaaaaaaaaaaaaggaaagaaaagaaaaaagaaagaaaggaagatgacttgttatactcacagcttccccagaggagggggcatgccacaggggccacatggggacgcaccaatggtgcccaggaggtagaccacgagcaagcggcttccttgtgttttctgtgggataaggtagggtaaagagtggctggttgcgccatttcagcaggctctggggcacaggggctgtcctgagttgtccgataccctgccccgggtgatcagggcaggtggatggtggcctgggtggtgggttggctggtttgtacaggagaggcatgcgcttgggccagtccctgactatctccaggaactggtaaccctgggaggggtggtccttctacgatcagcaaggcccctgatgtcaaagcatcagagtacagaaaatcaagcacatagttactatcgtcagcctctgcaactcagggggtcaagactgttgctgagacgaacaatgtggggtgggggtctctgtccaagtctgcaaccaggttaaaggcacctgtgttcaaatcgcagctttgtctgagaaatctgtgttttctcaggccagttagggaacccttctgtgcctcagtttccccatcggtacaatggggatggtggtaagcacatcagtgtctcctggggcagcgatgaagatgaaacgaagatgaaacgggttaatccaaggctggcagaggcgctggggaatgggatctgtggcccctgggggagcgtgccagggcctgctataatgggggtgctgagtgcagggctgggacaggcggggctgcggcccagacagtgggctgagctcagcgtctgggctgggtggaaatggccggcctggggttttggggccaccctgctggacctctcctgctgctgctgctgctggtgctgccaccccgggccctgccagaaggacccctggtgttcgtggctctggtgaggcgcccccaccccggcctgcccttagctcccccagggctagccctgaccagtcctgtccccaggtattccgccatggcgaccgggccccgctggcctcctaccccatggacccacacaaggaggtggcctccaccctgtggccacgaggcctgggccagctgaccacrgtgagaagcgggtaggcggtgagggcaagggtgggaggggtggggagkggtaggctgaggctgttctgtccccaggagggggtccgccagcagctggagctgggccgcttcctgaggagccgctacgaggccttcctgagtccggagtaccggcgggaggaggtagggccatagtgacccccacctggccccctgacctcccacctgtgacctccactgactacaacgctctctttgggcctccacctctggcctttgacctccatcaacctgacttgccctctacctctaatctctgacccccgatacactgactaacccacactgacttctgaccccatctcaacctgtcacatctcgacctctgacctccatcaactctgactttattttctggcctccatctctgttttctaagtcccattgactccagtcagacctctggcctctgacatttgaccccaaacttgatttcgatctttgacccttgttgacgtaacttgccctcttgacctctaacctttaacctctacgctttatcaattctgacctaccttttctgtctcctcctatgtcttctgacatcccccagctacagacagtcctcctaacctctgaagaacatgtattgaactctgactccaagtcctccaagctgccctcctaaacttgacctctaacctccagcctctactgattctgatcttcctttttgaccctcattgactcaattgaccccctaaatccaacatggctgtccagcttaggacgtccagcccaactgctcctgacattagcctctggacccttgatcccaacttccaacttcgaaggccacatgattctcagtgtctgacccctactccaaagtgaatctgaggcttctgatttgccacgacagctgacctctgtccccaaccacgaccccccgcgtgccctctctccaccccgctccaggtgtacatccgcagcacggactttgaccgcacgctggagagtgcccaggccaaccttgccgggctgtttcccgaggctgctccagggagccccgaggcccgctggaggccgatcccggtgcacacggtgcccgtggctgaggataaggtcagggggctggacccacgtgtggcgagggagggagcgggtggagagagaggcagctctgggtctggccgcctgagctggctccgagaagcaagactgtcctcgagctggtctgtccagaccagggtgagccccrgcccacgctgctctcctggatctgggagaaactgcgacaaagacgcaggggccgagagcccgggttcccccgacccgctgtgagacccaaggcaaggcacacggctgtcctctctgagactcagttttccccagctgctgaggttccccatgcgcagctgtccccgataccacgagctgctgcgggaggccaccgaggccgccgagtaccaggaggccctggagggctggacggtgagcagggcggcggtggggggcgggatgcaggggatgggcctgggctcacccagccccgcgcatccagggcttcctgagtcgcctggagaacttcacgggactgtcgctggttggagagccactgcgcagggcatggaaggttctggacaccctcatgtgccaggtgagccctgccccttcccagccaagggtttaaggacacctgtttccaatcccagcttgctactcactagctgtgttccctcaggcatgtagttaatcctctgtgcctcagttttcccatctgcacagtggggatggcaacaccggtatcaacacctccccaggacgctgtgaggattcaaatgggttaatccacgcactgtgcttacaatagtgcctggtgtacagtgagggccttgccagggtttgaggctacacatttggcaactcctccccacagtcctataatcagaaaacccaaaacctgggcagcgggagctgacctgaaatgatgcaatgcttttttttttttttttttttttggagacaggatctcactctgtcacccaggctggagtgcaatggcattatcatagctcactgcagcctccatctccctggctataggaattctcctgcctcagcctcccaagtagctgaggcaggcaggggcacaccatcatgcctggctaattaaaaaaaaattaattttttgcagagatggggtctatgttgcccaggaactcctgggctcaaacaatcctttcgcctccccaagagctgggattacaggcgtgagccaccatacccagctagtactcttgctagtctttgctcactccagctcacgggaatgttctgaatcgcagggtgggagcagtgatgtgtgtgactaagggggctgccccggcccttgctgtgtgtgttccatgctgtgtggtgtcagcaccatcagacctttctaaagtccagaatgtctgagctgtgaaatacctctggccccaggggtttcagataaagccttctgggctgtgtaatgacgatgtctattattaactaataatcgctgttggctgggygtggtggctcacacctgtaatcccaccactttgagaggctgaggtgggcagatcacctgaggtcaggagtttcagaccagtctgaccaacacggtaaaaccccgtctctactaaaaataaaaaaaaaaaattagccaggaatggtggcacacacttgtaatcacagctacttgggaggctgaggcaggagaatcacctgaacccgrgaggcaagggttgcagacagccaagattgcgctactgcactccagcctaggtgatggagcaaggctccgtttcaaaacaaaaaacaacaamaaaaaawcactgttatccacatcatgatttcccagccagatccagatccggcccatgggggractcagaagagcagggggcagcacaggcctgcggggccagaggcaaactcgagggctcaggatggtccatctgtcctgtctccccacagcaagcccacggtcttccactaccagcctgggcctccccagatgtcctgcggactcttgcccagatctcggctttggatattggagcccacgtgggcccaccccgggcagcagagaaggcccagctgacagggggtgaggtgtgggtctgggaggctggggtgccttcctctgggagagtctaagctcttttttcccatcctcagggatcctgctgaatgctatccttgcaaacttctcccgggtccagcgcctggggctgcccctcaagatggtcatgtactcagctgtgagtccttgggaagcagtgccacatggcactgaggcacagggatgagggtgacagcgatttaggtgaggaagagcctgtggtcccagtggatctcagcccactgcctggggtaacccgtatctccaaaccctactctcaggctctaccattagtctggaaagagggaggtgacggtgttatgggaggaagaatttatgaataaatataattccttgttttctttaagaaactatgattggactaagcagtctgtccttccggaggagaaaggctgcttagtccaatcatattttgcacctacttgagcaatctttattaagtggccgcctgcaaatgttggtactgccttcaggatgggaggaaggagtagctttggggggttggttctaagaagcctgggggacatctggatgcgcaagtgtagtgctcaggagaaaggcctccagagagaagtgccgtctcagccctcgggtccacctgcagcatgacagcaccctgctggccctccagggggccctgggcctctatgatggacacaccccgccatatgctgcctgcctcggctttgagttccggaagcacctggggaatcccgccaaagatggagggtgagaatggtttggtgcccagggacatgggtgggacagaactctcaaagcaaggggtgatgtgtcaggcagagggcatggccaggtggggagctgcatgggatgrtgctgggaggatgacaggtgggagtcagaagcccttttctccaggctttaagatcaatgacaggagggaggaggtgccaccatgtcctctctctccaggaatgtcaccgtctccctcttctaccgcaatgactccgcccacctgcccctgcctctcagcctccccgggtgcccggccccctgtccactaggccgcttctaccagctgactgccccggcccggcctcccgcccatggggtctcctgccatggcccctatgaggctgccatccccccaggtgacagtcctctgtgttggggtgggagtggagggttgccaagtcctggcactcaccccccgcgtgttctccctgcagctccagtggtgcccctgctggccggagctgtagctgtgctggtggcactcagcttggggctgggcctgctggcctggagaccagggtgcctgcgggccttggggggccccgtgtgagccagaaaccagggcttccctacccccagctgacactggaccccaacatgtatgctcagtagctgctctggcttctgtgacttactgtgcgcctgtgtgcatggggagcgagggctgtgtggagtctccggcctggaaactagtttgtgtgtgcatgtgtctgtgtgacggtggcatgagtgtgcatgcatacgtgtcacatgtgtgaacagtttctgcacttagacgcgtgcacaggtggtctgtacgtacatgctggtaaaaaacatgtctgtgacacacattcaagcacaaatgtacccatgtctgaacaagcaggcatgcctgcatggcacttttcttgtagagacaaggtctttgtggcccaggctggagtactggcatgagcatagctcactgcagctttgaactcctgtctcaagtgaccctcctgtttcagcttctacaggcgtgcacaatgcctggttaattttgttttcttggtatgttggccaggttggtctcaaattcctggcctcaagcaatcctcctgccatggcctcccaaagcactgggattacaggtgtgagccaccacacccaggtggtatgtttatgcacctttccatatgagcactggaagcaggtaggctggctgaggacatggtggaccctgtacgtacctccacttgcagcttgtgacaaggccttactcagtgagcctcaatgtggaccatgtgctctgtggagaccaggctcacaggagttggaccctcaagtctggttatttggtgacctccatagctctcaatgcaaccatgaacttgggtagagtcagagggatctggcagcagacctgagaaaggtgcacgattcaaagcctggtttccgaggctgtgcgcctctgggcaagtgataggccctgatgtgtctcacttggcagaaccacgactctaacccagtggactccacaactccaaaaattaacttcctagggacaggtagagagcagggaaaaccgatgacactctcggctgtgcactgtaactgctacaagtaatgtggaggcgctggccaatacagtagccatgaccatgtatggctatttaaatttaggttaaataaaatggagtgttcagctcccaaccatcacatgggccacacatccaccactgcaatcatttctcagatgctgatgagagctactcctcccacactcatgcagcagcaggcgctgtggagcacctgcacgggtgccctttgagcccctggccccccaaggggaggctcccatagtgtggcctagagcagagcgcccgcccctcccaggccttgccccacacccatggctgtgtggcactgtctaaccagggaacccgtagggagccctggtacagtggatgcttaataacagccacttggcccccattagatggggcagtcggagaaaggttcaaagccattcccagtgacccaggacctaaaaaaggcacaggatccagaaacgccagggagtggaagctgggacaacccttcctccacacaagggccacctgcatactgccctagcccatttcttcccagggtgctgagggcagcctctcatgcagactcatccctggggagtccccagacctgcctcactgccctacccggcattccctagaggagctgggtggtcatgggccaccccagatggatgccaggagccacgaccctgggaaggctgaggaatgaacacccctcacactttctggccctgggagggagcctggcttccttgcaggttcatggagaccccaagtgccaggtggggttacctgtggctgtgaccaactcccacctggtggcaagagcccaccctttcccagcagcctgctggaaggacctgttcagagctgggggcctgctagtgggcagaggcctgggtggctccccctggacgcagctcagcagctgaacccacagaggatgaagcaccagagtttggagtgttctgtccgctgtttaacaggggcccctgtgcccaaggcctcagctgtgaggtcagaactgctagggctcagtgagtcctcacagagctgtcacctgagattccggccccagcacaccctaaacccagaccaacacagaagccacacacagcaaaagcagacccatcagaagggactggctgcccacagcacacagccaatgcacgctttcagagaaggcatagcaacagagaccttaagagaaaacccgtgacaggccaggcatggtggctcacacctgtaatcccagcactttgggaggccgaggtgggcggatcacctgaggtcataagtttgagaccaccatggccaacaatggtgaaacctcatctctactgaaaatacaaaactagccaggcgtggtggcaggtgcctgtaatcccagctactccggaggctgaggcaggagaatcacctggacccaggaggtggcggttacagtgagctgagattgcgccattgcactccagcctgggcatcaagagcaaaacagtctcaaaaacacaaaacaaaccaatccttataaaaacggagtaaaagcttcaagatgcttttatgtcaagggtgtggggttgccctgcttggcctgcagtgctttggggccccatgtggtggaggggtgggcacccatggtacccacccaccctgctgcctgggcagaagtgcaacatggcacacgatgcctgggggatcactccccccagggactcatggtcagtgtccactcacaaggcctgcttccctcatgacatctggccagtgacacccacaggggaggttgggggcagacacccttctcttccrgtacccttgaacatggtgtcagggtgtggctagctcgacggacaccgaacagctccacagggagggtagtgcccaaggctttttgcctcccctaccatgtcccgcacttcctgaatgcagctcaaaccaggagcagctcccccaggattctggcctgcttcacccctggagcaccaggccaggcggtgtctgtccttgagagccaggcccaggtctcacggtggcgtatggacagctcctccccataggcctggtcacaatagggaagcgggggtggctcctcccctagcctgcaggaagcccttggtagcccacttatccaccttctcctgggtgtgtggctcagcagccaagtccttgtgcactgggttgggtcccagcatgagcctggtggcctggcgggccctggcaccatggagagcagcctgctgccagtgatggcctggatctccaagacggcctccagcactgtcatgcccttgaccagctagtgctggtacaggacctgggtaacaggcatgtccttgggcgtcactggctcaggggcagaggacgaggttgaggaggaagctggatacccctgtccatggtgggctggggctggaagggtggctcagtggcctcgaagtgccgggaggactcccagctggcaccaggccatcagcagccgggtgggcagtgccgtgctgctgttgccctcagggccttgcagtggtagctgaagatggcaccttatcaggttggatcaggtcacccggcagcagcagctctcgagagctgaggcacaaggcaggggcccggctgtacacctgcaggacccaggagagcctgttgcagttcttgcccgaagcgccgagatagccagctcagtgtccctgcagcaggagcagaaccagctctggcccaggtgggtgggtggcagcgctttcctagccatggctgcagccacgcctaggcaggaaacagcagagtgtctggagggatgctgtcaggggaaggacacagaaaaggcacgaatgggggaaacagccacacccccaccatcacctcccggagtggggcccctcagaaccccggatgtcaaaggttcccggggtgcaccgtgtcctcaggggcagtcagagcccagtgctggacatcacggggtccccaagtgcagccctttcaagaaccctggacactggacatctcactgcaacccagccccagcccccatcccacctccgccccccaacagggttactaagaaggttaatgagcccagtgcttagggcagcgcctggctcagcacttgctgggcacctgtctacatctgccttctcaccaacaccaggagtaacaggcagcctcctctgttcttaatgagtgatggtcaggcccttcagcacctggaggcaggagggcacaggggaggggagaaggtcagtggggtgcagggcagccaagatacccaccagccctccccagagccagggcccctcagacccccrggtgtcaaaggtcccggggggcaccgtgtcctcagtggcagtyggagcccagtgctggacatcatggaggccccggtgccctcaccccctcctgatgtgggtcccaggaccacctactgtcctaagggggacatcacagaagagtgctgagagatcaggcaacaaactgaatgacacttggtccctgggggtgccaggctacctcccctccccatccagctcagcctgggtatggctccttgtatgatctaggcccactgacctcacccctccccgccccccagcagcagtgtttctctggaaaacgggactagagatgcctgcagacaggcacatctgtggggttcagtgagaggacggggccaaacccttctgcttgggcctcccatgcctaacgggatacccctcaatcgcctctgctgcccccggcccagctcttctaagctgctctgacttcaccagaaccttctgtgacatggggaaggggcagctgcctctcactgggaccctggcaggataagttcagtttattctccgcaaaagcactaacactgtgggtgctcgctcagtgggtgctgctgtttaacaacctcagaaacaccaaaagccccattttgcatagaaatatgctttgtaggaagaggggggtccttgtttaaactaatcaaggaaaattaaaaacccagcccccagccacaaactagccacattccaggtgtccaagagccacccgtggccagtggctgccagactggacaaggcgaggaacatttctatctggacagtcgtaaggaaggcgccggcccagaatccacaaatgctacgtgtcccttctgtctccctatcccgcatcagctctgtcgtctcacctctcacacatccctacccaactggcaccgacaccactcatgtccccaagaatcccctctaagccagccatgacaaacgctcagctccattcactaccccacagaggatctcggattaagagcacaggacccggccgggcatggtggctcacgcgtgtaatcccagcactttgggaggctgaggcgggtggatcacgaggacaggagatcaagaacaccctggctaacacagtgaaaccccacttctactaaaaatacaaaaaaaaaaaaaaaaaaaaaattagccgggcgtggtggcaggcgcctgtagtcccagctactcgggaggctgaggcaggagaatggcgtgaacctgggaggtggagcttgcagtgagccgagatcgcatcactatactccagtccaggcgacagagcaagactccctctcaaaaaaaaaaaaaaaaaaaaaaaaaaaggcccaggaccctcagaaagatactcaggggaactgcaatcccagccaaccctgcccaaaagccagcttccttgccagaaatagctgaaacctccaagaacccggagaacacactttcagttctatttcgctgcagccacggttccagctcctgacacctaaggaacaaatgaaaatcttcccagagctgagaacacctgtctcttttctgataacacacactcatgcttgtctgattttgctctttgaaacaattctcctgataaagcctgttatttttattgtgaaaataggagttccctgaattctatcagtttatgtataaacggttcactgcaggctaagctgtacttaaagacacattgcattcaccctacaaaacccatgaagtaacgtgacaggatcacctggtagttactgtctcttttccactgctgagttt

SEQ ID NO: 93686 - DNA, 373600 bp, Homo sapiens
  misc_feature (1)...(373600): n = A,T,C or G
gaggctgaggaatgtgaggcttgggaactgttggcttctgtgctttctggctggtggaggagttagagccctgacacctgggcttgtggagatggggggtggggggtggggggcagagagagagagagagagagagagacaaagagagagacagagacagacagagacagacagaggaaggctggtggattttggagttggagcagctggccccagttgtctgacaccagccacactcctgaccttctgtagttaggacatgcacgtcttccctgagtttcatgagccaatacatttccattttgttacagagaattcagattggattttactacattcttgcattgcttaacgatggagatatgttttgagaaatgtgttgttaggtgatttcgtcattgtgcgaacatcacagagtgaacttacacaaacctagatggtacagcctattacacacctaggctacaaacctgcacagcatgttactgtattcaatactgtaggcaattgtaacataagagtaagtatttgtgtatgtaaacatagagaaaatatagtaaaaatacagtgtaaaagataaaaaatggtacacctgtacaggacactttccatgaacggagcttgtagggctagaagttactctgggtgagtcagtgggtgagtggtgagagaatgtgagggcctaggacatttctgtacactgctgtagaccttagaaacactatagttaggctatactaaattaaaaaaaaaacctttttctttcttcaataataaattaaccttagcttactgtaacttttttactttacggtaagattactgtaacttccttactttataaacttctatttttttaactttttgaccatttcataataatattttaaaacacaagcacatcagctatgcaaaaatattttctttatatcctcatcctgtatttttctatttttataattttttatttttcaatttttaagctttttttttttgttaaaaatgaagacacaaaggcacattagcctaggcctatacagggtcaggaccatcaatatgattgtcttctacttctttatcctgtctcactagagggtctttggggccataacactcatggaactgtcgtctcctaggataacactgtcttcttccggaatcttcctgaaggacctgcatgaggctgttttacagttaactttttaaaaagtaagtaggagtacactccaaaataatggttaaaagtatagtatagtaaatacataaaccaataacataatcatttactgttaccatcaagtattatgcactactgtacataattgtatatgttacacttttatacaactggtagtgcagaagttttgtgtttttattaacctgggctctatggatctgatcacagtagtttgttgaccagatcgccagaaacaagtgagtaatatgttgggctatgactttacgacaccaatgatgtcatgcggtgataggaatttttcagctccattataatcttacaggaccaatgtcatatatgcagtctgttgttgaccaaaacattgttatgtggtgtgtgactgtacttgtaagagaaagtcctgcgtaacacagatagtccagggagccacattttattctctctctctctctgtgtatatttttcagactcatttggagtcagttgcccctttacccctaactacttgaatttgctcctaatgacaagaacgttcatttaaatatccacagtacaataatcaaaaccataaagtcaacattgatacagtattatattatccatgttgcttaaatttcaccaattttcccaataatgtagtaatcccctgcgtagcaagatcaagaaccattgagcctaagcccatgggctgagccctggctgcacaatagtagagtcacctggggtggagaggagcttttaaaaactacagatgcctacctctagaaattggatcgattggccaagtcgtgtgtatttgtgtgtctgtgttcatggttactctgatacacacttagtgtggaaaccattgatctaagccagtatatggtcacttccttttatttctttctcatttgtcagttcccgttagttctgggtgggtatactgggttgaatagtgttccctaaacgttcatatcagaaagtgaccttctttgaaaataggggttttgcagatgtaatcaagttgagatgagtcatgttggattagggagggcactaaattctacaaccaatgtccttcaagaggagggagatttgaagacatagagacccacagaaaggaaggccatgtgatgatggggcagagtgtgaaatgatgctgctataagccaagcaataccaaggattgctgggagccagcagaatctagaaaaaggcaaggaaggattcttccctagagccttcaaaagtaacaaggcgctgctgaacatttcagatttctagcctccaaatctgtgagataattaaatttctgccgtttacctaaccaagtttctggtaatttgttactgtaggaaaataatatagtggtcaagggacctagttaagccaagatggcccaagggcaattttactgggtcttttgtcagctattctttcctagtaacaaaagattcacaggagtgtggtagtctttagcgttggctggtgggggcgcctgggaggattacacttctctggctcttagagagaggtgtggcttgtaaacagattcttgaggtatcttccaggacaggctagattacgcttgacacttctgggtgtacatttacaagtccgtgggtgatccaaaccgtgctctcatcctctgacgcagagaccagtgatgcttcagatgggggttgctcagatggacaaggcccgggagtaagatggcttactgggaatccacaaaacctatttgttacaggtttcaagtgagactcttgattctattcttgccacaaggggcaagggagtagagtctgagtttcctgaattttaatgggcttttgttactaaatatttctcagtttcatcttttactaatagaagtcgtgaagcagttgcctctcccaaccctaaaagtccctgaacttgtggactctattcccttccatccctgcttgcaaactggttaattcttttgtaagcccatctctttcttataatgtcttgccaaacacaagcaaaagcagccaacatgcaatactaaccttgtgttttcagcaacttctcttggagtgataagttccaagttaggtctgtctcctgtcagtggcaactttgtcaaatatttgcctcttcataaaagggaccattttcaattttggtcaacaacaatgctttggtcgacagcatcctccttgcccctcccagcctctaagccaatgtacctattttagttttttatttaatcagcaacattcttttagtatcttctatgattggctacgtaacaaatgaccctcaaaaaaaatcttagtggttggccgggtgcggtggctcatgcctgtaaacccagcacttcgggaggtcgaggtgggtggatcacaatcacctgaggtcaggagtttgagaccagcctggccaacatggtgaaaccgtgtctccactaaaaatacaaaaaattgccaggcttggtggcgggcacctgtaatcccagctactcaggaggctgagacaggagaatcgcttgaacccaggaggcagaggttgcagtgagccaagatcatgccattgcactccagcctgggcaacaagagcaaaactccacgtcaagaaacaacaacaacaacaacaaaaatcttagtggcttctaagaacagaggcctttcttttttctcactcaagcaaacactcacttggaagttaacttagtaacctatcttttcagtttataggtctccggatcaagaggagccacatcctgacttgatgcaaggaccactctgtatcccccaggggcctcagacttgatgttgtggaggtgtggggctttggctgcttccctggaaggatggagagtatattttgcctgtggaagggagagtgtgaccagaagggcagattgaatagtcactagctctgcttacagatgattttgggtgttgacctcctgggcatgtccagggtggtacctcccttcccccatcgagacaggagtgagctgctttgtccagtggattgtgagtagaagttatgtgtgtctcttccagctggaagctttaaaagccagtgtggccacacaatcatggctgttctgtcagccaggacctggaccgaggggacatggaacagaacccccaggtagcatgagtgagaaataaactcttgtctttttaggccctaagatttgaggaagtgtatgtgaagtcgtttcggggttgtttgttaccactacactattttggctgatatagaaggaaatactcctcttctgctttgcacagggtggtgcttggagctgcagcatccatcttacaactggtagaagacaagttaaaaaaaaaaaggtaacgattacatatagagaaaggatggcggatggtggagcagaaagatgcaaaggacctgggtccccagggtagagccatcaaattcacccctggggctttcctaccaccaagcttcctgtgatgtgagaaaacaaagccccttttatcatggatgactgggtattattactcgcagctgcacaggtgtggtagacagaggaatgactcgccaaaggtgctcatgttttaatccctagtaccggagagtgtgtttctgatatggcaaaatggacattgctggtgtgattaaagtatggatcttgtggtgggaagattattcccattgaccatggattattcccatgggtcccatgtaaacaagtccaagggaggcaagaaggtcaaagtcagtagaagatggaacgatgaaagcagagcttgaagtgatgcattttgaagacagacgaaggggccaggagctaagaaatgcaggcagcctctaggagctagtaaagacaaggaaatgcatttttccctggagctgtgagaaggaacccagctctgccaacaccttgattttaaccctgtaagtcctattttggacttctgacttccagaaatgtaagagaataaattggtgctatcttaagccactcactttgtgggaatttgttactggaaacgaatacagatggcatccactaacctcacgacagcagaccacaccatcatctccccagcaaagtagcctctggaagggaacggctaacatttccttgagtatttaaaaggagaatcaacaaggtatatgagaattagggagcagaaaggaaggaacattttccacttaggttataactcattttcctccagccacaacaaaaaaaggagtgtcctgggaaatgagtatcgtgttccggtcgatcacctcgtcatgaatgcagcttccagctaccctggactgcagtgctgtagacctgggacgcctttagattaccgtgatattagagttcacagtaatgcccagtgcggggaagaggtgagatacagctgaggaggggccagagctggagccaggctatcttgggtcgtgggggtcaggcaaagtggctggccgggagatctgctgagtgggtcagccggtcagtcctgagcagccgggcctctggtgcccaggtccacgtgactggcaccctttctaggggtctagtacttgtttcttacggctcacaaatcttgagggacagttgataactggagggtagagttttcgcttcctcggaagggcaaggggaggccaccgtagaagcgcccgctcgcgccggacctcccgcccgggaagccagggcagggcggggccggggagggaggggagaggaaggtgaggagggaggagacgggccgggaggggtggagagggagagggcgtgcgcctggggcctcacctgctgggagctggaggaggcgcggagcgaagccggccctgccagccacgcggagaagcagaggcaggtgagcgcgatgcagccggcgccgggtctggggctcggggactcctccctgcaccgctacctggacggcgacttctggagcctcaagaacgagctgcgcggactcctcggcggcgcccgctcttccggcaaaggtaccgcgctgcggccgtcgcccctgcccgcgcccccgaagccgccgagcgtgtcccctcggtccccggagcgtcgctgcggacaacgccctggcgagggcgaggtggggtgtgcgccgcgcctgagaggcgggtccctgcctcgccgcaggtgacgggctcccctccccaggtgtgtgggcgcagccggccgccgccgacctcttcggccccctgagaggtgccctctcctcccgagctccctcccccacgaagagtcgggtgcagggctgggccccgcggtgacaggcgcggtgtctacgaagaccgtgtggctggaagatcggccttgctggtttgttgaacctgtttcttgagtccccgccccgcgatgtcccacccttggtggggagaaggggacagaaaaccgcgatgggatgggcgcacagggatggagtggccctgtccagggcgtgtctgggcgtcggggtgggacaggcttacaggaccccctcggagtgcaggtgtgcggaatgggcagcttcagcggggcggtttggttataagaagaactcaggtcctcgatgtcatccgatgccaggacagccctgagaagcaggcagagggttgagtgcttgagctgcactggagatagagagatggttcagtcaccggacagtcaggaccagaactcggcattcgtgtctcctgtgggctctctttctcatacccatttcaagcagtctgaaaagcccagttggaggcatgctttggagttctagcttaagaaaggccctattaaaaatgtcagtatgtgcccgtggaggattaattggttagccatgcccacttagccctcgtttaatttattttgcggaaatgagagggaaggagatggcttgagtgaacgtcaggctgtccttggagaatctggggttcctgcactgaggttacctagtggggagttgggggcgtttgaaagttgaaaagtgagaagtgtgggatggtgggtatatccatcagtgtctcgccgacttctctttccctctctctcatacatagttctttaagttatggttctcaaagtgtggtacagggagccctggggggacccaagagcatttcaggcggttcatgagtacaaactgtttttatagtaatacaaaaaaagttattagctttttcactctcattctctcactaatgtacagtggcagtttccagagaccacatgatgtgtagtattccagcagaaaaaatatagaagcagacatgagaatacagctgctttctattaagacagacagtaaagggatttgtaaaaatatagaacgatgctactcttcttgctaactttttttgttttggaaaatagttattttcataaaatacactaatagatttattagttattttcaaatgaattaataaacatttgaaaacttttctgttttaatttctaatacgggaaatatcagtggatataacccacccaaataaaagctctttggggacctcataattttttttttttgagacggagtctgactctgttgtccaggctggagtgctgtggtgtgatctcagctcactgcaacctccacctcctgggttcaagcgattctcctgtctcagcctccggagtagctgagattacaggcayccaccaccacgcctggctaattttttgtatttttagtagagatggggtttcaccgtgttggccaggctggtcttgaacttctgacctcaagcgatccgcctgcctcggtctcccaaagtgctgggacctcataattcttaacagtgcaaagagttcctaaaatcaatgtttgtgaacggctgctttaagtcatactgagttcagtcgcatctgattagacacacatcccctcctatattcctcagtcttttcagtttgttcctgggctatcacctctttgtctttcagtttagataactgcagtttaaaagacggaacaaaattgtaataaccaaactactgatttgaggcaagcagaagggacttccttgtgaattccatagggacagaggaaaggcatgcctggataaggggtccagtgtggcagtttatttcctgtgtgaccattgtcctggatttttttttcccccttattgactttacatttgttcatctacagaatgcagataatatcaatgctgctgtgttatgaagcttgaatgaaaaactgttgcgtgggcatggagtaaacactggttgtggtgggataccaaaacacacttgcacgcaaagggaaaagcaaaaatcccattaccctgacaaacacttttccattctttccagttcttgtttatttactttatagttcagagttgtagtaatggcatgaacaacatttcatattttttccccaaatggttaaagattctgatatctatctatttgaaagttcatattgtactatcagattttaccttagcccatgttaraagatggcgatcttgatttctggatgttttaacattctcctaatgtaaaatgttatagaacattaggagatgagaaataaaacttcctcctctctgaggcaatgccagatctcctgtggcttgtccccaccttaccccaaacaggtctttgcagttaaagtaggtgtaggggaragggttgtggcagcgtagtggtgagtgctgtgtgtacatagtgagaagtttgtacagggccaggcaatcccagggcataagagctcaggaaacagttttcctccaaaagaggttgtgcaacttcctacacacactgggtggccactctcctcagaggaggagttcattcccagggtgctggccatcggctcccaggggcaatgtaggcacagcccaggttcctcttctaaggagtgactttctctctcccaaggatgagcctgctgggctaagtcctcagactccgggagcatcctggctgctgtgcccgcccctgtcctattgtgcatctgaccaggtgtgctgtttgttgtgacagcaggagcattctgggtgactggcggctcctcattgggatttgcagggaatgttaaaaagcaacatctgaaatgagataagcttttgagatttttctgagtttgtttattggtgaagggaagctctctcaggagaggctggctggcagaggtaggtacagcacacacctctcacccggagaactgagaaagcccccccataggattctgttctctcagggccttctcacacccttcttctcccacttgtagctcctggctgcttccttctccctttctttctctttgtccccttctctttccttccctagagcaatgcacatttctcttcctaaccttttcatgtgtttagcttttccccatgagtatttcatgaacacgttctcactaggaagagtcaaataatttggacaacttgaaagtttcctaaaatgtttcctcctacagccatttttttttattgtggcaaaatacacactatataaaattgaccatttaactgcttctgaatgtacaactcagtggcattaagtgcgttcacattgttgtgcaaccatcaccactgtccagctccaaaacatttcatcatcccaaatggaaactctgtacctgttagacactaactccccactcccctcttcccccagccccggcaaccctcattctacattctgtctctcagcatctgactattccaggtaccatataagtggattcatttagaatttgttcttctatgactggcttacttcactcagtataatgtcctggaggttcatccatgttgtagcatgtgtcaaaattccctcctttttgaaggctgaataatattccattgtatgtatagactacattttgattactctttttttttttttttttgagacggagtctcgctctgtggcccaggctggagtgcagtggtgcaatctcggctcactgcaagccccgcctcccgggctcacgccattctcctgcctcagcttccygagtagctgggactacaggcacccaccaccacacctggctaattttttgtattttttagtagagacggggtttcatcacgttagccaggatggtctcgatctcctgacctcatgatctgcccgcctcggcctcccaaagtgctgggattacaggcgtgagtcactgtgcctggcctacattttgatcattcttgtatctgttgatagacatttggcccccagccactttgttgtggttgttttagtgtgtttggttgtgttagtgtggtttttccgcatttttctatttttcttggagttcatatacacatgtgcacatcattttgttatataaataggatctcactgtgtgttttattctacagctttctcttttgaaattgaattcttattttcattgatgaaatgtatgaaaatatttaatgaacttatactgtgaggtttgtaatgaaaaacagccatgccctccctcaaccctcttcatccctcatttcttttccttgtgggccactactctcaattctcttacttcattctcatgtaatttactccatattcctaagtaacatgtctaaagagccacctcttggttatctactggcttactcttatagaaaacgaatgtttctcactacagcaccattttccttttcctattctctgaaagtcagtgtatcaccatttttacttaaatcagtatccagtgttcacattgttattgctataaaaatactgtttccagccatgccccacagtgtaccatattttatttccttctgtcacaacctttttatttcttcagagataattgtctcctttatccatttgcttagttttctataagcccatcactcactgacctccacactagacagatatgaaacagaacagatacaacagatttatcacaggacagagcagttccactcgtcccactgtgatcaaacctgtcaggtaattggcagttccacccctcctgcccctcatggacacattcattctggaggcctccttccacagcttcagtccggatgggctcttcctgcgtcttcaccacccccttgggaattttccttgcatttcctccatggtcaagtcactgttttcccaggctttctctttcttggttaccctttgtagaagcttagagaggaccacagattcattaaggctactcctgttgagaggtgtggtttgtgtcgcctccccttgatcttgggtagttttatgactgctttggtcaacagaagatagctgagatgacagtgtgacagtttccaggctcaggcctgaagagactgggaccttccacttcccatctcttgaggccctgagcttccatttaaaaagtgctgcttgcctgtggctgccattgctatgaggaagtccaagctgatgcctgttgagaggctgcatagagagaggtaaagagatgctaacattcccaactgcttcagcagacagctatttctgagatgggaactcagacactggaaagcagagaaaagccatccctatttgtttcctgtccacattccatggaataataacacactgttgttttaactttccgagttttgggtgcagtcttacatagccatagataaccaaaacagtctcttatctaatagcttcctaagagagggtacctgggaattaacttttcgagatttttaaagattttcatgtctgaaaatgtttactgttcaattgactgaaagtttttgtgggtgtagagttctaggctggaaataaaattttccttagatttttaaaggtgcatgccataactttccaatatccaacattgcaatgaacaaatctgaccctttctgcaccttgatctgttatatatgacttgtttttgtccctccctactggaagcttctttttggcattgttgtattatagaatttcatgatggggtggcttgacatgggttcttttagtgcattgggcatgcagtgggcccttttaatatggaaacttgtgttcagttatctgtactgttctgtcatctggaactccttttgctcagatgttgtacctccttgccttgtcttctaatatttttccttccttttttattttccatctctttgtcttttggttctgtgtcctggtgagattttctcaacttttatcttccaactcttcttgagttatttttaaatatctgctgtcatatttttaattttcaaaagttctctgttcctttttcaacagcatctgttcttgttttctagttataaaaatctcttatttttcagaatagttgatagtaagttttgaagtgttcccttctattctctgctttgtctctgttttctttgagttcctttattccatttgtatttttgaccttttttatgtttgaggctttcattaaatgtcaggtcagtcatggatgtttgttcacaatatgggaaatgtgaatagaaggctggttgcaaatggcggggtttgttgggcccgggctttcttgatcacagagtaacttcctttggcagatcagtattggtgttttgtttaggacagggttaattcctccagtgatgaatcttttagtctcctgagaggtggatgggtggagaatgaggggcagatcctaatcctccttcctgagaccttggaggccccaggctctccatgcacaacgtgaggctggttagaaaaccatcctcctttctcaagacttgcatttgtatacctgattttgttagaacaaatcacttgatgccatcttctgggaaatggtctagggtgtccacagcatggaggccaccccacatgattggctgcaccctgtgcattggtaagtggtggctctcactgaggggtctcctactggctccagtgttccccatgtgggtcccacagttagcctcccatgccaccctctcctaacagtaaaccctcaggctttgatggacttggagaggggacttgaggatgcagctgctttcagaggtgcatggagcctccacttcccaagcatttatacaacccagtggcaccagctagttggctccgtcagccctgtagacttagcatcctctgttctgctaagtgagttaccacttgcctgttcactgtctaggtgacagtgtgttgctgctatccctcgtggaatgtcagtttctcttgagttcttggttggtccacgtggttttatgccataaatcattttattattgaatatccctgtttaaatatgttctgatatccagaacttgtagacctgtatttatgtgttagtgtagaaaggattgtctcattcttttaaaagctgcatcagtaacaattgtaccaaatttaattatgccatgccccatcaaaggacactcaggtcatgttcagtttgtgttatcttaaacaatgctgcagggagtaccctcgtattcataagaagagatttctctggattaggttctagaggtgatgccgatgggacagaggtatctgcatggaaaacgctgaccaatattgccagattatcttccaaaggctccagttttattgctcccaagactatatcaggcaatttcaaatccagtttaattgtgggcgtgtagagcctaatctaaatcccagtgttcatctcttcatcatttgagatactgtgtcaggccctggagatgggccggtgagtggtgaggtgggccctggctcccaggagcttctgcagcacatgaaccatgactgacctatgacactggcagcctgcagccccacagtcacttttggcattctcttctccccattaacatacataaatatcccagacatcctattttctgccattcccagaatttcaagtctccaaaggagcacaaaaagattttggcaaatcataggtttttaatgtgtaaaatatgcctttgtatttgtaaacttgaatgttaagttttatgagcatttattggatgtagggtccagacctctagataggcagttgagagagctaaggatgctccatgatacagcctgggacaggatccctgtcagccatcatttagggacctgatagtggggaatccactggccctgtcctttggaagctacagtctaatgtggccaggtccggtgggacactgggatgtcagcgtgtttgaatgttgggacatgggsatttttcacagtgacaacactgttaggttgtggctgacgtggacagttgtccttggtcctgtctaggggccacagaaatacaagctgttcatgttggaggggatcttgcccttttttgaaggaggaaacaaaggcttaaggaggaagtgacttactcaagtgtcattctcttttctctattaaaatatgtaaatatcccaggcattcctgggatgtggagtggcttggagtggcaaagccaagaataggacctctgggcttccgattcctcaagcagtgatttccagtgtgtttatctggagtattatggtgttgcgtcagcttaatagggctgccgtaataatgtacccgggctaggtggcttaaataacagaaatgtattgtctcagagttccggaggctgagaatccaagatcaaggtgtcagtgggtgtcggcagggttggttgcttctgagggctgcaagggagaatctgctgcaggcctctctccttggcttgttggtggctgtcttttttcctgtcttcacatggtcttccctctgtacctgtctgtcttcaaattttagaaggacaccagtcaatatctgaatttttagggggagcgggggacactattcagcttgtaacacacagtgagtgtgacagagtaagaacaagaagttacacgtgcacccgcgtgtttgtgtgtgtataaaacagagttttatacatttaaatagaaactccctacctctgacctcaactggaaagtcatttcttgagaagtgctggatccccaagcctagcacagtggttgtcatcgagtaacatctcagagagcctgtgctgagtagatgggcaggtatgaagaggtaggaagtcaaaaccctcagggctgggagggatcctaaggaatttggtttaaccaatctcttatctgtggtttcctaccatgcttttgcacgcaagcactcagagaaaacacaaactggagaatggtgagggagttggggcagggggtgggctggtggttttccaagtgtctgcctccagcggtgagagaggagagaggcggagaggtgattgcacgttttcttgcgagtctcacaaacctgcaagggatagaattcttccagtccctgtcagactctgtgccccctgactgtgttaaaatagggagacatttagcacagctttcagtcctggaaggaaacagcacggtgaggagagggtcccagggatggggacagctattgctgtcttgtcttacacacatccaccagctaaaatcgtgacagtatgtggatttaaacacaagtcataggagaacaaagcatgtttttgatatgggtaattttgtaaaggctttttaagtatttggagaccatctcctcccaggtccagcatcaagacaattattgtagtgctgctctgtactctgacatgtgactttattaaggggcattgtcaacctcttagatcactttcctcaaccttaaatgaataattgtacactagaaaaaatattgttgactatgtgtaaggaaaattttccttcttgttcttctttccttggcaagaaattttggggtgatatattgttatattaataacttgctttcctggatgggaggaaagttttggtgtccctgacaccttggatcctgatgccattgggtggcagagctcctggggcccttcgtcaccacacttgtctgagtgctgcaaccacttctacaacatgggccgtgaaaagtgaaggacagaaggtgggtgaatttggggaattctctagttttcttttctatcacaccaaggcttggggctttcctgaactctcaatagtaatagcatcctaaaattgtttgagtgcatacaaagataactcaaaatggrttaaagacttaacttaagacctgaaactgtagatctactagaagaaaacacaggaaaaaagcttcttgacattggtttgggtaaagattttttggatatgatcccaaaagcataggcgataaaaactaaaatagataaatgagattgcatcaaactagaagaggggagattcacataacatacaactaaccattttaaastgtacaattcagtggcatttagtgtgttctcaatgttttggaaacattgtttctatctcattttcatcaccccagaaaaacacactgtacctattaaagaatcactccctttcacccttcacttatttccctggcaaccaccatctactttctgtctccatggagttgtgtattctggacatttcatataaaaggttataataggtgaccatttgtatctggtggcttagcatgcttttgagtttcattctagctgtgtacttccaaacctatcaactatgtaataccaatacttcaattctttttgtggttgaatagtgctgtgttgtatgcatatatcaggcagataatttcctatatttaaaaacacaggtgaagtctcttacagtttgttttgtcccaggccacatgggaaagtggcagtggggctgagccttttggctacccagtccctacatttttttctagaatatgttctcttttcttaaacttgcatagtgactgttctgatttattttccaaaaatttactaatttttccagtaactaacatcatgaaataagggtgcaagggtttggaaaaaaacaaacccaagttcagagactcrgggaggagggccgggtggaggtcattcagtgctgccaggcctttggtgggacacgggatcctcgattgaccaggactgaggctggcggaaggaccaatgcaccattcagagcactttgcaccatttctttgagatcatccataatttctgtgtctccgcccaaggctttcagaatttttcctagcccttagaactcccctcacctgccttcccttgtggtgccttccggagctgccacatcaccacagggatgatttctattcttgtgaatgtgcctacacatttctcctcttctgctcctcccagtgaaatcccactggctgacttggggcagcagacagcaccttctgttctatcctgtgatttcctcttgaagtaaaatgctcagtccttttagggggctctccttctgctgggtacaattggggtgctgcctctggggccccccaggcactgaccctgcaccctgcagcagatgtcccacacctaggccctgcctcctagttgtgccctgtctgcagccaaagaactctggctgatacctgctcagtggagaaagagagagagagagaaagagagagagaagagagagaaaacgagggaaagagtgcaagagagcactattcagcgaagtgcattaaaactcttgcttgtaaaaggccaagagacccagtggtcccactttaccctcaaggtgctctgggcccaaggaacatagttggtggcatgattttttatgtcttataatttacttgactattaaaggtggcagtaataaagtttagaaagggaattattttggcaaaaaatgtagagaggacagagttaggaggtgggatctgcagggtttgacattatatgttatgtgtgctaatgtaatatgagacattcccttctcaaaggaatttgaggtgaagaaaatggtgagctggtggtaatttcttttgcttcctcatcaagcacagtatcagtgaggtaagcacttgtccttacttcacgtcccctccctacattacctacaaccttctcccacagttgaccagtcacttcacactcctcccacactttgccataggacctatcttgtaaaccctggaggaagccattcaggcatagccaccgtctggccacaggagttggttcagaaacagtcatgtgacctgactgtagtcaatgaaataggaggggaggaggttttttggtgtgccggcaaaagacacttccttgcttacttgcgagatctgtcagaggggcatactctctcatcttggagagggtggagtttgagtatgaagctagccctggtgcagccattttgtcattttgagggagaccacctctaggatgaagtggcccatggaggcagagtagacagacactaagttytaggacacacttgagcctcagaatcaaacctgctctgaagcctgccccaagtttgccttgccagttccctgaggtagcaactgccctttaccgttcaggttaatgcgagttggttttctgttgcttgcaaccctaagcactgttattagcataagtagttgctcctgtttcagttgcagagtcagaaatgcagctcacattggcctcaggtgtggaggctggaatccaggtgcttgggtggcactttcaggaatcccctgacctgctctcttcctgtccagacaggccctgtccacctcgtggccttcagagctatggcacatgtgcaacagctcagcagccaggcaggaagagagggaccctttttggttttcagcctgaccaacccagctggccattgctcttccttgcagtggtcactggggccaggagcaaggattggcccagtctagtcagtgtctgcccacaccagaaggtggggggtcaacaaccagcatcatgtagtttgggcagagggagtgggtgtctgcaagggaaaatgggtgatgtagctcggggaagggacagcagatgctttcccttagtctctggaccattctagtgattgaagtaatgtcacagaagagagcccgggaagccacaggtcaggcatttctgccttaaatgggaagttagtgggggttctactaccttccttttctgtgactttgatctgaagatcagcaatatttttgtttttctgggtagacgcttgccgactgattccaaatgaaaatattacccgtgcaaggaaccaatgtctgactaaagagatgaagtgtcatcaatacccattcctcactgcttctgaaagtggctgcaattctgaggaaacctggactggttttctagctaaagtcattcttactgtgtcttgagagtgcagaactttgatctgcaccatagtcagggaaagcagccacctctgcccctttcttttcctgcaaggggactggagagtctcctgtcacctcctgttagtgtgtatcatttttatttttctttaccctgttgcactgagtgttgatagtatctcttctctttaagtctcttctctgtatcctctaccttacaacgtcaaggctggcaagatttatactctgttctcactctacaagtaaagctttgcccatgggttgagaccaggagttgagaatggtgcttacccagattacagctgtagacagatgttgactgcagagctgagcaggggactccgattgccgtccttctcttcataacaatgcctttacggaacatatgcaaacctctgttttttttcaacagtgtctatgggcttattgtgaatgctgcagaaatcactgagacccccagatccctggctgttctctctgcccctcctgatagccatgggagaatattgactcaacctttcctttgtccctaagtgatctcagaccccaagatccaactacaattcagattgtagttggcccttgagggaatcgccatgtccaccttcctacttcccatttacttgtaaatggacaagtaagtgcatgagtggctcccagattccagcatgggacccggctcctgggcatgttgcctgcctccatgagggggcttcctccacatgtacgtcgaatggatttgttgttgaagacgatgagtttgcaccgtagacgcctgcagaattggtgcacagtcacgctccaccatgaaggaaataatgtatacagtggtctctttccaagacaaagtgccttaaattgacttaggtcagcgaactaccgaagaaacaggatatactaggcccctgcttaaatagcggatgcctgcttgtcggcctccccctttccccctcttctccccccgccctttagttgccttcacctgaaccaaaaaagtttagtctaagatgaaagcttactagtctccaaaatagctcactttatctgttcttatcagcctgcccagctacttaggtcataagtcaaatgtacttgaagagccctgagctaactaggattgcaatgtactgtgggctgaaataaaatgcagcaaaagaaccctaaaaaagacatctaaagcccctacccaacaatcagttggtgacatccaggaagattgtgaccccatagtactcaacctatgaggaactgggggagggacctgcacactaggggatgaattgcttgttgaaactgtgctgggtctgcctgcctatcagacgcctgatcttacaagactgtcattaaaagtctcactttggctgttttctgggtctctgagtccattctttgggtttggatgggtgagtttgtttctaacaactagagacatcctttgggtgaccaattgcatcatatttaaacgacagccagaaacaaggagcctgcaagccagcagactcagccatcccatgggcagagtgcagcctcaggagggagtcaggcctggttatatccattggccacaggactgggtgcatcctctggtgtgtttaacagctggggctgcacacccacttttgttttctcagctagcctctcgtgtgccattctagccacagtgtctcctaaattcacactataaaaataaccgtcctcgtttcaagcaacaaatttcatttctaagctgatcactttcctggaggttgggaccctgtgatgacctgagtcaatcagacgtgccctggggctgggcagtggagtgacctacctcagaatcctggcaggggaggaagagccaccagcagtgtctgccaaaaccgacatacctttacctagtgaagaaatgtttttgtgttttttttatggcttgtgttgttgtcttaggaggttatatctgtttgcatctctgctcatgtggtcctgtttctccctttacttcctgtctgctcccttccagccctttctaccttaccacctcctccccattctctcctcctgggggcctcctctctctgcccacatatgcccctcttattggcatctgcagaggaatatggttctcactctgtcttcttgccacccctgcagctcatcctgacagtaagtacaggtagttgctgcactaaaggttttcttctgcagaaaacaaccatgccatccatcccctgtgaggcggcagagccctggccacgtggggcttagtgataatgtgaaaaatttctctccctgtcttggtgggacactcctgctcctctgtcttctatgctagagtctgagctctctgaggagaggaatgggccaaggtatcttggattcttcctacttagcgtggtgcaggtgcctaatgaaaacttaagtaaggaggcaaggaaacaaggaaagatgggagaaaggaaggctggagagggagtgtcccttttcctcactgcactccgtggagtgcccaggatgcaggggggtggattggaagtgcctatcaggctttatctctggtgcaggggatcttttcttcctctgcctccctttttctatctcctgagtctttcttccctgctacctttgtagactttgccaattagcagctgtacatttccccggctgagtgacttcacaactgaaattaaaccacagtacttagaaagccctgtcttcgcattttctcagtctcccttgctggttcagagcttgcagtgtttgccagttaccacaagatgattaaacagtttctgtttccattcaccatcaattcatcaggctgtgcaggtggctcctgggagtggggtgaatgctttggcggtaggaggttgagctgtgggtgcagctgcggtgtttatgcagctgtggtgtttactagaaggcagatggtttctttgctctccgcctttggggatttgttcttcatgcccacctgtcatttgtgtgactgcttggccgtggtttcaccttgttggtgttggacataaagcattttttattcttgccgttttcaacaagaagagaatgctgtagggaattatcacaggctgaatcggaggtgtttctggaagcaaacttgcaaaagggaccaggaaaaaggggcaggttattaaagcaggagcatgctgtgaaagcagcttgattttgaagttcgtgttgatgcttaattccagaatgtctgtgctacctggaatcattctgtggtcgaagggtggacacctagggtgtccctggtcatgatggcattcaaatttggtatctgaagatgtgttttccactagatcaaaattgatttttgatttagattttgagaaaaccatgcacaaagactgtttttaaaaatgtttcagctttttgttttcatttttaatgcacaaaggtcattttgttgtttgtgttgccttggctattccttctttttaaaataaactttttattttgcaataattttcagtgtatagaaaagttacaaagcatagtacagagatttgccatatatcctcccctgttgttaacatcttacacaaccatagcacatttgtcaaaacgaagacagcagcattgacaggccggacagggtggctcacgcctgtaatctcagcactttgggaggctgaggccggtggatcactggaggtcaggagttcgagagcagcttggccaacatggcgaaaccctgtctctactaaaaatacaaaaacattagctgggcacggtggcgggcacttgtcatcccagctaatctggaggctgaggcaagaggataatttgaactagggaggtggaggttgcagtgagccgagatcgcgccactgcactccagcctgggtgacagagggagactgcatctcagaaaaacaaagcagcatctattaaactctagacttggtttgtatttctttagttttcccactggtggtcgatttctgctccagggtcctatccaggatgccacactgtgttttgctgtcacacgtcctcagggtcccctggtctgtgacagttcctctgtctttcatgctttccatgacctggctgttttgaagagtactggtcaggtgtttgtcaaatgtctctcaatttgggtttgtctgtgttttccgtatgactagactggaattatgggtgttgggaagaatatcctgagcatcacatcgtattagtgagtacattccatcgacatggcttatccctggtgatgtttgtagtgcttgtcaggtttctccactgtacagttaccttttccttctctggaaactagtcattcaatctgtccaacattcaagttgggtgagtgggtaggtggggctagttaagctccattttctggaggagagagtatctacacaaattatttcttataggaggttgatctctttcccccatgtatttatttattaaatcatttacttatatcagtatagactaacatgtttattttatattttgggttacaatctaacagcacatttttgttgctcaaattgttccagctttggccattgggagtttcgggctcatcttatattttccctgcccctgtcctagaatcagccatttatccaaggagccctagtttcttttatttgagaacggtatttagaaaccaacttttgtgcacaaagttcttacttaagaaaacaatggccctaccataattccatttctgatcatctacttttttccactactatatatatacatatatatacattacatattatacatattatatataaacatatacatattatatataaacaaatacacatatatttgtgtgtgtatgtgtatgggtgtgtgtgtgtatatatatatatatgtataattttttttttgagacaggatcttgctctgttgctcaggctggagtgcagtggcacaatcctggctcagtgcagccttgaccttccaggctcaagtggtcctcccactgcaacctcctgagtagctgagactacaggtgccccactaatttttgtattttttgtagagatggggcttcgccatgttgcccaggctgatcttgaactcctcagctcaaacgattcgcctgccttggcctcccaaagttctgggattacaagtgtgagccaccatgcctggccccaacactttatatttaaaaatttagacatgcggctgggcgcggtggctcacgcctgtaatcccagcactttgggaggccgaggcaggcggatcatgaggtcaggagattgagaccatcctggctaacatggtgaaaccccatctctactaaaaaaatacaaaaaaattagccaggcattgtagcgggtgcctgtagtcccagctacttgggaggctgaggcaggagaatggcgtgaacctgggaggcggagcttgcagtgagccgagatcgtgccactgcactccagcctgggcgagagcgagactccgtctcaaaaaaaaaaaaaaaaaaaaaaaaatttagacatgcacaaaaatgggaagaccttgacattgaggatctttatatccactacctagattctggcattaacatgctactatacttgctttatcacgtatttgcccatctattgatctctctattcaccatatcccatttttgggtttttgggtgcatttcaaaattactaacataaatattcttccccctaaataactcagtgtgcatactgctaagaagacttcaatacatgccagatctttttcatttgctgtagaacttcatacaatgaaatgcaaaaatcttaagtgtacattctcagggctttgccaaatatatacacctatgtaacccaacccctatcaaaatacatagaacattatcatcgccccaaaaagttctcttatacccttgccagtcaacccttgcctccaccctcctggaggtaaccacggttgtgtgtgtttttcaccccagtattggttagttttgtctgttttagaacttattatcagaatcacacaatttgttgactcaacatattttagtggtatattaattcaatttaatcttgtataacgatgaaaatgaatgaaccacaactacaacagatactaaagatgactcttaattagccattgctaagtgaaagaagccagacacaaaagaatacatagtagataatcccatttcttttctttctttctttcttcttcttttttttttttttttccagatggagtcttgctctgtctcgcccaggctggagtgcaatggcacgatcttggctcacttcagcctctgcctcctgggttcaagcaagtctccctagctgggactacaggcatgtgccaccacacctggctaattttgtatttttagtagagacagggtttcaccatattggccaggctggtcttgaactcatgacctcaggttatccatctgccttggcctctcaaagtgctgggattacagatgtgagccaccgcacctggcctatttctttaatattcaaaatacaaaaaatacgttgggcatgttggtgtacttatagtcccaactacttgggaggctgaggaaggaggatcgcttgaggcctggagttcaagacaagcctgggcaacataatgagaccctgtctcaaaataaataaataaaagaagtaaaaaataatttatgaagttataaggcaggatagcagctagcactttcggagagagaaagtagtgattgagggggatcttgtatgctggtcctggaatgtgattttccttggcttgggtgtggattacacagttgaagttactttgcgataattcactgggctgtacatttacgactcatgcctctgttcttgttgcattgtatgttgctacagtgctttaaaaataagatacttgtcatgtccgtcaattttgtgtgtgtgcatgacactactgtgtgtattagctatctactgatatgtaacaaattactccaaaatttagcagcttaaaccccaatatatattgtctcacgcagtgtctgtgggtcaggaatttcagtgtcttaattgggtggcgctgggtcaggctctcccataaggttgcatttaggatgttggccctggcttgactggggctggaagagccacttctacaatggctcattgatatagtttggatgtttttcccttccaaatctcatgcctgatgttggaggtgggacctagtgggaggtgtttgggtcatgggggcaaattcttcatgaatggcttggtgctgacctcctgctggtggtgagttctcactctattagttcacttgagagctggttgtttaaatgactctggcacctcctcctctctttcttaccccctctcttgccatgtgacacacctgctccccttttgccttctacttctaccatgagtagaagtagaaaccctcactgaggcctcatcagaagccgagcaaatgctgatgccatgcttgtacagcctgcagaattgtgagccaaataaacctcttttatttataaattacccagtctcagatgttcctctatagcaatgcaaagtggactaatacactcattgacagggctattggaatgagacctcagttcctctccaggtggactatttataaggctacttgagtgtcctcacatcttggcaactggtttcctccagagcaagtgacccacaagagcacagtacaatgtttcctaggttaatatatgtcatttattgtgtatcagcagtatgttcctttttattgctaagtagcattccatcctctgaatagatcatagtttaccaattctattgatggacaccagggctgtttctagtttggagctattatgaataaagctgataagaacattcttctatgacaatttgtgtgggcatgtaattttatttctcttggataaatacctaggaatgtaattgtcaggtcatgggataggtatctgtttaattttatgaaatctatgagatctttttccaaagtggttgtaccattttacatttttatgacaaagtatgacagttataattgctccacgtctttgtcaaaattttgtgttgtcattattttaaaaatttagccatttgagtaggtgcatattattatttcattgtggctataatttgcattcctatgatgcctgatgattttgagcactttctcgtgtgcttgctggtcatttatatatcctcttgcacatgcacacgtgtgtgtgtgtgtgtgtgtgtgtgtgtagttctgtgaattttttttttttttttttttgagatagggtctcactctgtcacccaggctggagtgcagtggcatgatcttggctcactacagcctcaacatcctgggatcaagcaatcctcccacctcatcctccgaagtagctaggactacagacatgcactaccatacctgggccatttttaaattttttgtagagaaggggcctagctgtgttgctgggctggtctggaactcccaggctcaagcaattcttgtgcctcagcctctcaaagtgctgagattacaggtgtgagccaccatgctgcccagcctagttctatgagagtttattccctatgtagtattgtgttaccaacaccatgatgagggcacacaacatcacaaagaaactcccctttgttttcccttcagaatcagaatccccatagtcctaaccccagcagcaactgatatgttctccattaccttaattttgtcactttgaaaatttataaaattggaattatgtaatatgtaactgttttgagattggcattttttcactcaacacaatgccctatccaagttattgtgatctatccaagttgtgtgtgtcagtggttcattccttttaattgttgagtagtattccattgtatggatgtgtcacagtttgtttatccatttgccagtggcatttgggttgtttccagtttttgatgattgcaaataaagctgctgtaaacatttatgtacaggttttaaaaataatttttgtaaacaaagaatttctcctagggtgtatacctgggattgcgattgcacatgaaaagtctatgtttaacttcataacaaactgtcaaacttttctagagttccattttacactcctacctccagcgaatgaggggtctagttgctcagcatgcttgttaacacttggtatggtcagcatttgttttgccaccttgccaggcttcctagagagatctctctctctctctcttttagcttagaggtttgcaggcttattcttagtcatgggaccgttttacaacctgaatcctgcacagaacaccaatagggaagtcagatgatggtggagctgctggccagagctaggccctccctagacctcatcacatctccaacagctgtccccagatgaccctcacatgtgaggcctgactcccacccccagaactgatgccataaacccagggccgctgcctgcagcctgagatctaggaacactaatatttgcctaatctccatatcttagagacccaagaagacataaaagagaaattatagctgagaacatgtcaaaaaatcattgtttatgattttatatgccattgttatacagatggtatttgaggaaaactaccaagattgttaaatgtggcggtttatatttgaagacagaaaatacacaactatgcatgttgcttaggggattggagcataaggatgtttctaaaatcctgatttttccgcggcagattgtcacctgtttgctcgaacagtgttagcaatttagatattattattatgataaaccggtgttcaagctttcagctagtttccagaatacatttttatccagctttaatttatttatgaatttgttatggcagcagttcaaatgaggaacatactccatctagtggttctttttaactatgcaatttaaaataaaatttaaacatttatttgaaataggtgttattttaacttggttcaaaagtcagaaagcataaaaaaatagagtactgtttcccatctactgaattttcccacctccaccccacatacccaaaaggtaaaaactgttagtttctagtgtgtccttaaagaaattaaaaaaaatacacacacatgcaagcaatatgtgtattgttaatcactatttctgtccatataacattattctcatcccttgtagggcattttgggaatgggaatgagaatagacctataattagaattgtctaacatgtctctgttgagaaatttatttgatataaggaattcgggtgttaatagttgagagctgtttagtaatagcccacttttcttaaggcctcttttttttttctgaagcagagtcttgctctgttgcccaggctggagtgcaatggcacgatctcggctcactgcaacctccgcctcccgggttcaagtgattctcctgtctcagcctcccgagtagctgggattacaggtgcccgacaccacgctcggctaatttttttctatttttagtagagacggggtttcgtcatgttggccaggctagtctcaaactcctgacctcagttgatccgcccacattggcctcccaaagtgttgggattacaggtatgagccaccgcaccgtgtcaaggtctgtttattttataggttttgatcatttcttcagttcctttgggcgatgtgtgtattatctgtgcattagtggccctcatctactgatttcttggattaaaattatgaaataattcttcaggttttattttaatactttgtggttttatttttcttcatgtcaattgttgatctatttggaatttattctagtacgtggtgtgaaatggggatctgacttaattttcctttccagttggccacccagctggatgtttcagtaatgtttgtttttcccatgatttgatataccacatttgtcttacatatattaaatttccatatatacttacttctgtttctcaatattctattttattctattggtctatctgcctgttttgcacaatttgagttacttaaggccttatcacacatctttttaaaaaaaattttacgggagatttgccccttttattttttcttcagctttttttaaattcaggggtacatgtgcaggatgtgcacatttgttacataggtaaacgtgggccgtggtggtttgctgtacagatcatctcatcatctaggtattcagcccagcatccattagctattctacctgatgctctccctcctccaaccccccccaagacaggctccagtgcatgttgttctcaccatgtatccatatgttctcatcattcagctcccacttataagtgagaacatgtgctgttttggttttccattcctgcattagattgctgaggataatggcttccaacttgtccatgttcctgcaaatgtcctaatcgcattcctttgtatgtctgcatagtattccatggtatatatgtaccacattttctttattcagtctatcattgatgggtatttaggttgattccatgtctttgctaatgtaaatagtgctgcagtgaacatatgcatgcatgtatctttataatagaatgatttatattcctttgggtatatacccagtattgggattgtggggtcaattggtatttctgcatctaggtctttgaggaatcaccacactgtcttccacggtggttgaactaatttacacttttaccaacagtgtaaaagtgttcctcgttctccgcaacctcgccggcatctgttgttttttcactttttaataatcaacattctgactgrtgtgagctggtatctcatggttttgacgtgcatttctctaatgatcagtgatgttgagccttttttcatatgtttgttagccacatgtatgtcttcttttgagaagtgtctgttcaggtcctttgcctaccttttaatggggtttttttttttcttgtcaatttgtttaagttcctcatagactctggatattagactttcgtcagatagatcgattgcaagaattttctcccattctgtaggttgttcactctgatgatagtttcttttgctgtccaggagctctttggtctaattagatccgattcgtcaatttttgcttttgttgcagtcatttttggtgtcttcattataaaatctttgcccatgcctatgtcctgaatgatattccctagattttcttctagggtttttataattttgggttttacatttaagtctttaatccaacttgagttaatttttatatatggtgtaaggaaggggtctagttttaattttctgcctataacttgccagctctcccagcaccatttattaaatagggagtccttttcccattccttgtttttgtcaggtttgtcaaagattagatgcttgtaggtgtgcagttttatttctgagttctttgttctgttccattggtctatgtgtctgttcttgtaccagtatcatgctgttttagttactatagccttgtagtatagtttgaagtcaaatagtgtgatgcttccagctttgttctttttccttaggattgtcttggttatctgggctcctttttggttccatatgaattttaaaatgattttttctaattctgtgaagaatgtcaatgggagtttaatgtgaatagcattgaatctatacattatttggggcagtatggccattctctgatggctgtatttttgtggggtcagtagtgatatcccctttatcatttctggttgagtttatttgattcttctaacttttcttccttattagtctagctagtggtctatttaatttgttcaaaaaaccagctcctgggttcattgattttttgaagtgtttttcttgtctatctccttcagttcagctctgatcttggttatttcttgtcttctgctagctttgggagtttattgctcttggttctcttgttcttttagttgagatgttaggttgttaacttgagatctttctagctttttgacgtggacatgtagtgctataaagttccctcttaacactgctttacctgcgtcacagagattctggtacatcatttctttgttctcattagtttcaaagaacttcttgatttctgccttaatttcattatttacccaagactcattcaggagcaggttgttccgtttcctgtagttgtgtgggtttaagtgaatttcttaatcttgagttctaatttgattgctctgcagtctgagagattgtttgttatgatttcagttcctttgcatttgctgaggagtattttacttccaattgtgtgatcagttttagagtaagtgccatgtaatgatgagaagaatgtatattttgttgtttttgggtggagagttctgtagatatctgtcaggtctacttgatcctgaggttgagttcaggtcctaaatatctttgttaattttctttcttgatgatttgtctactattgtcagtggggtggtaaagtctcccagtattattgtgtgagagtctacgtctctttgtaggtctctaagaatttgctttatgaatctgggtgctcctgtattgggtgcatgtttatttaggatagttggctcttcttgttgaattgaacactttactgttatgtaatgcccttctttgtcttttataatctttgttggttgaaagtctattttttcagaaactaggattgcaacccttgattttttttccatttgctcggtaaatttttctttatccctttattttgagcccatgtgtgtctttgcacatggataggtctcttgaagacaacatactgatgggtcttggcgctttatccagcttggcaatcttttcacccattttattgtctgcaaagatcatacttccatgggtttagagttttcctgactatttttgtttgtttctttttatatttgaattttaaaatcacttgttggcattgttatttggattatgtttaatgtatgaattaacataaggagaattgatttcattatgatattgtcttctattaataaacatggcacacatttctatttgtccaagtcttctcttgtattctttaggcatatttagatgaaagctttttcatctaggttctgtaaattaaaaaaatttattctaatgtatattttaattttgttttattacttttgcaagtgggatcttttccttcatgtattttctaactggtttttaatgtatctgtataaaagctattgatttcttttattgtgtatcctgctaactcttattttttgtagtagttgttagttgattgtcttgggggcttccaggtgtacaatcatattatagctagttaaatttttcttttcttttttttttttttgagatggagtctcactctgttgcccaggctggagtgcagtggtgcaatctcggctcactgcaagctccacctcttgggttcacgccattctcctgcctcagcctcccgagtagctgggactacaggcactgaccgccaccacgcctggctaattttttttgcatttttagtagaaacggggtttcaccgtgttagacaggatggtctcgatctcctgacctcgtgatccgcccgcctcagcctcccaaagtgctgggattacaggcgtgagccaccgcacccagccaatattatagctagttataatgcaatatatagtggctcaaaatgacagttgtttattattgttcatgcatctgtgcatgactgggaggaccttctggtcttaactgaactcattcatgtatttcagttagccatgaattggacagacagcctctctgatcttggctggactctcacatatttgaggattgcctagaggtaggttggtttaagatggccatggccaagacaagtgagctgttctcacatatctcttactttatatcacccgcaagcatggtagtctgagcatatttttagcttcactcagggatattcccatgagtatcacaggatatgatactttttttttcattagtgttcatgtggaacaagacagatagggaaatgcataagcactcaagtgtttgcttctctcaaatttaccaatattttaatggccaaagaatgtcccattggctaggtccagatttaaggggtaggaaaatagaccctgcctcttaaatgagaactgggagtgtcaaagggcaagagtcaagggagaggtgaagcataggtgttatcaataaatcaacctgctactttgtatctgcaaatagtgatannnnnnnnnnnnnnnnnnnnnnnnnnnnnnnnnnnnnnnnnnnnnnnnnnnnnnnnnnnnnnnnnnnnnnnnnnnnnnnnnnnnnnnnnnnnnnnnnnnnnnnnnnnnnnnnnnnnnnnnnnnnnnnnnnnnnnnnnnnnnnnnnnnnnnnnnnnnnnnnnnnnnnnnnnnnnnnnnnnnnnnnnnnnnnnnnnnnnnnnnntgattaatatcaactcccaattgaacatttctcctttgaattgtcattgattatggaagttaccttctctggaaatacctgaggttatgctttctccttaggaataccctgcaatcaatgactaactaagagagtggcacaactctgtgatgccatttatattccagagctccccatggaatataatttggctgaggctaaattttatatgagcttacatcgttgcaagctcccaggtggcctatgtgctctaaaggcctcctgtctgcattgatgcctgccatcctactgtacacccatactgccagttgctgatggtttgcttccccacctgcatttgtaaggatggtttattcttatcccagaaactccagaccaactctggcctggccaaatcagctaacttctctgctgtttgatgggctaaaccataccttctctagtgagatctgtacctgttccaactttttcccgtttttaggtgttctctctcagcctgaggataccatatggagtttccctatatcttatagtgaacattttatcatagtaatactttgtattaaactttgtctgtttaacctattgcatgatttctttcttctgattggctctagactgctacatcttgtgatttatcagtttttgttttacatatttgaggctttgttgtttggtgtgtacacgtttaggattgttatgtcttctttgtggattgatccttttataattataatatcttttgctatctttggtgatgttcttttttctgacatctactctagctgatataaatataaccatttctactttttctttttgattagcgttcacatggcttaactttttgcatcttttagctttcaacttgcttatgtcactatatctgaaatggatttcttgcagatagcatatttttagacttaaaaaattcattctaccaatctttgtcttttaattgtggtatttaaaccatttacatttagggtaattattgatatgtcaatgtttacatctgccactttattatttatttcttctgtttcttatttctcttattttttttgttttcttaccttcctgtagattatttgaacattattttaggataccgtcttgatgtatttattgtgttttagggtatatcgcattctatattttcttagtggttgcttgaggtgttatagtacatacctaatttatcatagtttactagtattgtcctaccactttgagtgaagtatagaaacctaactttcatttaggttcctttacctttccaattttaaaataccttttttgagtccttttttaaaaatttgagacagggtctcactctgtcacccaggctggagtgcaatggtgtgatctcgcctcactgcaaccttcccctcctaggctcaagcaatcctcctacctcagactcccaagtagctgggactacacatgcacacaaccacatccaggtaattttttgtattgttagtagaaacaggattttgccacattgcccaggctggtctcaagctcctgggctcgagcaatctgcccacctcagcctcccacagtgcttgaattataggcatgacccactgcccctggccaaattgtttgaagtatttcttcaacctacattgagtaccacatcagatggttttataatttttgctttagacattaaatattatttcaaaaagtcatgaatgaaaaaaatccactaaataaatggtgggatattctatgttcatggagaggaaacttaatgttgttaagattaaacgtcatctcaatcaaaatcttggcaagttatttcrtggatatcaacaaactgattttaaagcctataaggagagacaaaagactcacaatagccaatacaaaattgaaggagaagaacaaagttggaggacagccactactggcttcatgacttactacaaatctacagtaattaaaaatgtatagtggtggtgaaagaacagacaaatggatcaatgaaacagaatagaaagtccagaaatggactcacataaatatagtcaactgatctttgacaaaggagcaaaaacaataaaatggagaaaagatagctttttctaccaatgatgctgtgacaactggacgtcaacatacaacccccacccccacataaatctatacatagaccttacacccttcacagaaagtaactcaaaatggatcacaggcctaaatgtaaaatgtaaaaccataaaattcctaggagatctagaagaaagtccatatgactttgcatttggtgatgactttttagatacaacaccaaaggcatggtctatgaaagaaagaattggtaaattgaattttattaaaaggaaaactttctgctctgtgaatgtcaaaaggatgaaaaggcaagccatggattgggagaaaatatttgcaacagacacatagacacgtctaatataagactgttattcagaatatacaaagaacatttcaaactcaacaataagaaaacaaacaaccccatcaaaaaatgggccaaagaccttaacagacacctcaccaaagaagatatatagcaggcaaatgagcatattaaaaatgctcaacatcatatgtcattagggctacacacattaaaacaacaatgagatatcactacatgtctgttagaatggccaaaatccagaacactgacaacactaaatgctgacaacaagaagttttattcattgctggtaagaatgcaaaatggtatagctgctttggaagatagtttggtgatttcttaccatatggtccagtagtcattttccttggtatttacccaaaggaatggaaaacttacgtgcacacagaaacctgcacatggatatttatagcaattctattcataatttccaaaacttaggagtaaccaagatgtctatcagtagttgaatggatagataaatggtggtacctccaggcaatggaatattatttagtgctaaaaaaaaatgaggtatcaagccatgaaaagcacatggagacttaaaggtatttactaagtgaaagaagacaattcaaaagtctagttgaaatactgcattatttcaactgtgtgacatcctggaaaaggcaaaactatggagacagtaaaaagatcagtggctgtcaggggttgggggaggcatggcacagatgatttttagggcagtgaagctactccgtatgatactataatagtagatacatgtcattataaatttatccagacccacagaatgtacaattccaagaatgaaccctaatgtaaactgtgaatttgggtgataatgatgggtaatgtacgttcatcagctgtaacaaatataccactctggtgggggattttgatagtgagggaggctatacacatgtgggggcaggaactatatgggaaatctctgtatcttttaatcaattttgcagtgggcctaaaactgctctaaaaaagtctattaaaaacccataataagtaatctagtctactatatttttactcattctgatgttctttcttttctgaaagttctagcctttttctcctatcatttcctgtctgtttaaagaactacctttagccattctttaagtcagcttgctagcaaacattgtcttagatttttttggcctgataagatttttattattcctcttcttcattcttgaaggatatcttcactgaatataagatttgccattgacagttattttgtctcagtacttgaaaaatgttgagccacttgtttctggcctctgtagtttccagtgagaaatctgctgtcattccaatggttttcccctataagtaacccatcatttctctctagctgccttcaagattttttcctcggccttaattttaagaaatttaattatgatgtttcttgacatgggcttctttgggtttagccaattatttgctcagcttactgaacctgtaggtttattatgtcttttaccaagtaggggaagtttttagctattatatcttatactacttttttggtccagtctctcttttttttgcttttcaaaactgaagatatgcatgttggctctgttattattgtcccaaatgttcctgagaaatatttgtcttatttttcagtctatattttctttgttgttcagattggataaattctattgatttgtgttctagtctaaaataaaatatcttagatcaggttgcctttagataacagaaatttatttttcatattctggaggctgggaagtccaagatcaaggtgccagaagatttggtgtctggtgagggtcttgctttctggttcatagatggtgccttcttgctatgttctaacatactggaaggagcaaggcaggtctctgggacctcttttgtaagggcataaatctcattcatgagggtgaactgctcatgacttaatcatctcccagagcccctactttctaatataatcaccttggtgattaggatccaacatatacattttggaggacatacaaacatttagaccatagcaatctgtcatcaagttcactgattctattatttcatctatgctgtattcttgagttcatctagtgagatttaaaaaatttggttatcatatttttcagttctatgagttccattttattcttttctataacttgcacttctttgatacaattttctgtttttttccccatttatttcaagagaaattatgattacttattgaagcatggttatgatggttgctttaaaatcttcatcagataattccaatgtctgattaatcttggtgtgggtatctgttgatttctttatcattcatgttgtgatgttccttgttgctgtgatgattcttagtaaattctttgtatgtgttctgacagttcttggtatcatgagcaattttttattgtgtcctagacattttggatattttattatgttgctcaagattgattgaatattttttagcatggggtcccttgttgaggtatattgggatgtccaggtggccatgtatattcagcttcctgttgagccaactttgttgaaaatgtatggagtggaagttcagctcccctcttgaatctcatgacctcagttgccttcagatggggatgtgagatcatcccctccccactgggctgagctgccatcaggaagggggaagttgaaagctgacccacatcactttgttgtcaccggtatgggatggaaggtcagttctcttctgggtgctaatgacgccagggaaggagaggggtgaattaagtgccaactgaccctctctcctaccacctcctttttccttgttaataccgagtaggggtgaagtctcagcttcccattgggtcctgctgatggggtgttggtgtgaagcagggtgtgactagatttacctygcatcttcttgctaggccttgttgttgctgggtatagatggccactactggactccactaatgctaccctggcaccacctgcttttgctgggcaggagatagaagatcagctccctacttggcccaccaaggtgtgcaccaggtcgggaactcagacactccatctgctctgcaagacaagaggtggaaggttaactctcccctcagccttgcagaaaggaattggagtgccccctcctgcttttgcagggttatggggtagagaggaagagcaatgccccactgagactgcaggagaggaagatgggtgtgttttgctctgatgtttttctgttgttgggtgggtatctccaagaaggttttctattgttaggccatccttttcatatcctctggctctgaaatctaacctgagtgaggtcctacaggctcaggctgtgcgttgcatggaaacattctaggtggccaaagaggaacctctcctcctgtgtcagtttaggttcattgagaagtgggcaccaaggtggggctagatgtgcaggagatttaatgggagaaaacacctgagaagcgtaagtgggagggagctggattggtggggagaaccctcagaacaaaggcagtcaggtctggcttccttgcaaagagagggggaggaaagggttgagctgggaaagcctcagacacagtacagtgatgacaaagtctgcaggcaagtgggctcccagagcaggtcacctcttgggcaggcatggcctgactctagaaccttgtgaggctcaaccatcagctagtagcagccaagagatgagcagcctcatggtgaatgtaattaccatcactctgttattccaaaggtgtggcagctggaagcaggtaatctcgaaggcaaccctgagtggcaatccttatggccaccacagtccacctcttgcaacacgcatgtcactcccttgcccctatctcccaaatgytgcttttaagtcatctcagacaattttcaaaggactgcagagcaggaggtgttgcagtcttgttttaagatggtcttggccgggcgcggtggctcacgcctgtaatcccagcactttgggaggccaaggcgggtggatcacaaggtcaggagtttgaggccagcctggccaatatggcgaaaccctgtctctactaaacacacacacacacacacacacacacacacacacacacacacacacacacacacaaattagctgggcatggtggtgggcacctgtagtcccagctacttgggaggctgaggcaggagaatcgcttgaacccgggaggcggaggttgcagtgagccgagattgcactgctgcacgccagcctaggcaacagagtgagacaccatctcaaataataatawtaakaagaagaataagatggtcttgtcaggaaatccttccatctctccctccctgtgtctggctgtattgaacacccagtctgtgtgacacacacagtgtgcacagtatcaaacaagcattacaatggacacagcttttctgtctgagcccggggtcaaagcatccacagcctcccctcagtcaccaattattggctgtcttattttgtatctgttcttcacaggtatgatttaagcttggatgaaatgagagctttgacagttcagagagtgaagtttgccatggacctgcctctgttaaaacgtgcaggtcaggatctggtaagtgtcattattattctggtatggttgtgtgtgtgtgtgtgtgtgtgagagagagagagagagagagagagtttttttctctccagcttttattttatgtttagagggtatatgtgcaggtttgttacatgggtaaattgcgtgttatggaggtttgatgtacagagtatttcctcaccccagtagtgggcactgaactcacgataggtagttttttgaccctcacccttctcccaccctcctcyctcaagtaggccgcygcgcctattgatttcttctttgtgtctgcgtgtactcagtgtttagctctcacttataagtaagaacgtgcggtatttggttttctgttcctatgttaatttgcttagagattttgttttgtttgcttttgtgacttgctaagcctgttgatctcatgctgagggcagctgacagacaggtctcggtggaggagagtgtcttcctcaggccccttttctgccccactcccactaacctaacaaaccctttcctcggcccacacattcacttctccaatctcacaggcgagggaataggagtatcagcagaagtaataaaatatttgtacacaaaacccatataattttagggataaagttaaatagctgggaaatagaaataactcattttaagggcttttaaagtactttagacttatccaaagtttatgtcttatttgtctaaaaactgtcattctaaatttagtggtattattttagtcaatttagcctcatgaaaaaagaaagaaagaaagaaagaaagaaagaaagaaagaaaaaaatacatgattagtgagttcctttgtgtcagtattaggagtgatgtattttagccaagttcattcagcttcatggtatataggaaaaaatatacctcagcagggtgtggtggctcacatctgtaatcccagtactttgggaggccaaggtgggctgatactgggtagagcccaggagttcaagactggcctgggcaacatggtgaaaccctgtctccacaaaaaaaaaaatacaaaactggccaggcacagtggctcatgcctgtaatcctagcactttgggagggaagcaggtggatcacttgaggccaggagtttgagaccagcctggcctcaacatggcgaaacatggcctgggcaacatggtgaaacactgtttctactaaaacaaaacaaaacaaaacaaaacaaaacaaaaattagccaggtgtggtggtgcacgcctgtagtcccagctacttgggaggctgaggcacgagaatcccttgaaccaggaggcggaggttgcggtgagctgagattgcgccactgcactccagcctgggcaacaaagcgagactctgtctcaaaaaataaaataaaataaaataaaaaaccccaaaaaccccaaaacactaaacaaatactagccaggcatggtggcccacacctgtagtaccagctacttgggacgctgaggtgggaggatcgtttgaggctccagaggtcgaggctgcagtgagctatgatcgcaccaccgcactccagcctgggcaaccggagtgagaccctgtctcaaaatgaacaaacaaacaaacaaaaaacccaacaccacccgccctctgagaccccctaagggaggagcctgaactagggtagctgcagctcagcggcatgctgaggagccgaccctatcctgcagcagcccagccctttccccacccagcatggtctgggagggagagtctgaggactgagggatggagtcctcccagttcaggagaccacaggggcgcctttctttgtggagcgtagaatggagctagtgggggcctgggatccatgcttgaaagtagatccctctcccttccccacaatcccaccaacctttggtaggttgtctaaggagacaaggaccaatcctggagtcttctcaggaaggaattacaggcagagccttggcaccacctgcgctgcgatactgcaggcacctccacgctgacaagggcgctgcagtgtcagctgagctggagaacgtgcagatggatgttcacttggcacaggaaaactcccatgtgacaaagtggagcgtgcttgcgaagcgtaaaaaatcatttcataccaagtagtttggcagagattttcaagctaggaaattgcctcttgatggagcatccatttagagctgtgaatacaaccaaaaaagaaaaaaaacacaaaaacaaccaacctctttgctgccaaccactctctctgtcagagtcgcctccaagtgcgttcggcatggggctggttggaaggtgaaatcttggcctgtggccagcttcttgctcccttaatcagcccaacatgtctgtggcttaacttagtgtcaatactcaagacccggatgtgagagctgatcccttaatgaggcttgctaattgcagcccgacccgctgagtctgaaggattagcctctgtaatctcgctcctgatgaagcgtgttgagctctggatccaattatcttcctgttttcctggctcacttagtggccttaggcagcctggacaactctctgtcctgggtgattagatataattcctccaggaggcacaggattggccctagaccatccctccagtcatttctgtgaattatctcggcctgtttggcacctctctctgtatgaattcacaaaagccaataaacctgaaggaaatgaaactggccatcagtgcggcaggctcatctcgctgggcggatgtcatgagactcggcagcacatctgtgtttgaaggctctcaaattccgccctgtaaacagctggaggagctgtccacatccagtaattctagaagtgttacatgattcatcctgcctcttaataaaatgattgagtcatggctgtcctgcctgctcagggagcatgccaggcccgtctgtgtttccctggacccccctttcatgttgctctccacttttgtggatgatccgatgagctctgaggcagaacgcggtgtataatgtgtaatgatgatgttctaggggacaaataagaagggagtctcattcactccaggtctctatggacagtccgcaggccaagaataaaccattaaaatatttccacgctgtgttttcccctctgccatctgtaatagatttgagatgtttcaataattttaaagcgaaaaaacaatatgagtctgattgcagagtgtgcacgcacacacacacagacacacacacagtgtgaacaccatcattgttctctgtgccaacttctcctgcacctgtttctagtgacatcacctttgtgcacctcagccaagagctctcttgttcccctgaagtttccagaattggatcctgggctgggggagtcaccaactgcctctatttccagatgcagagaccttctgtctctaagacccaggtcttatcatctactttgtggcagtgtcttgtcctgcatgggggacagcttcctcagagatgctcatccctggaagctgacagagtctgacagcctgcactgatcttcaccatagcagacagtgacagctcaagttgactgagtacatgttctggtacagtcccaacactaagaactttaaatagatgatgtcattcagtattcacaacatccctcatggcattcccattttacagataagtaaactgaagctgagtaattggcctgaggttagttatacaattagtgagttgtatatataaatgactagtgaaccagggattcaaacccaggtgctctgcttcctgagcccacgtcaaacaggtggtgcttgcccctgtctgcacaatagaagcagccagacaactttcaaaactcctgctgtgaaggcttttgctcaggctaatcaagtcagcatttacatctcccaggtgacccactgtgcatctggggttgcggactgctgcactatgcctcctttcctgcaccctgtctccccaaaattgttcccattaagcatttggtccctaccaatcagggcttgtgggtggctcatagggaaaccgcatctcaacattacctttccccaggagggagccagctgggatcaggcttctttcagccaagtgtagtgtgggttggggacagatacctggatgatgaagatcctacccctgactccttcttcccctcccccaaccagcctacaaccgttctctctctcacccagagctctggtttttatccccatgatccacacgagtgaggggcatagttgcaccatcgttatctaaaccagtggttctcaaagtaaggcccgaggacccgtgtgtgtccccaataccctttcaggtgctatgtggaaagtatatgtccaactacctgcatgtgagacactggatattcatcataaacttcaaccaaaacaacatatcacaacagatggcacaaaagcagttatgaaagggcagctatcttttattgagccagatactaaaacaatgtgaaacaatgccattcttctcatgagttttttgaaattatgactatttttcataaaaattatgcaatatggtaaattgacagctgtagcctggacaaacaaaacctctttggaatcctcagaaaaggtccagggaccataaaggttgagagtcactgatctaaatcgtctactattttctcaggaagctcagtctcagcagatcagaggggaactagtagaacattggttgcattatatttatattacatatattatgactattatttttatcagaattttaggtaatctccgtttgaggtatttttgtatttggagaaatatcaggtgggtgatcagatctaaaatggaagaatgttctaaggtcagctcaccttagaaggtgtttgggaatgccggggagggtggttacttttctactcagaccttgagagaagaaacagcctttcctgggaagcgtttacatttaagccctgagtgtgttgtgcaaaaggagctgagccaggaatctgccaagaggctgagatgtctgtcctgtcccagtcccaactcacccaggccccaccctgttgcccacaacttccagtgccagccccagcgagtgctgcagactgtgaccgctgtactcccccacccatcccaggactggctcctgaccgacggacagactctgagctcttggctctgccgccctggccttggctccctcttgggcctctggcttctgtttgtactggaacccaggcttctcctagtgggctgtgacaggctcccctggctcttagtcctatatactgtctttggcaggagtccctgtcccagctccagctccacagacttggacattggccacttggccagcactttggtcaggccagccctggccgcctgggatatcttggaggatttgggcagagacaacaggacagagaggtctgtttacagaagtccctctatgtagattggcacctgaatgcagttgtcatctgtgatagccacagggattacttgaaagcggggcatggcagggagtgagctggacctgccctgggattccagtgcagctggaatcatggtgctatttgttttttgacactgcaaccattctgcattaaaaaacacccttttcaatctaagccttcattattactcgtgcagtgaaatactatgtaaaaaaccaataattatttctcgctaccttttgctaagtcccttccgtgtgccaggtgaggtgattcgttcattttataattgtttattgagcacctacagtgagccaggcattgctcaaggggcagtgaacaaagcaggcagaaattacctgtctcgatggagcttacatttttgtctgggaggagtcagactataaactaataaacaaagtaaatttctggtatgtcagatggtgatggatgctggggataaaaatcaagtgtggtaaattggaaaagaagaagtaaaatagtctctctgagcagatgacaggatcttttatgtagaaaaccccaagattccacaaaaaatctgttagaactaataaattcagcaaagctacaggataaaaatcaacatgtagaagtcagttgcatttctatgcattaataatgaagaatccaaaatgaaattgagaaaacaattctacttatcatagcatcaaaaagaataaaatactcaggaatagacttaaccaaggaggtaaagactgtacatggaaaactacaaaattgctgaaagtaataaaaggagatacaaatacattgaaaggcatcctatgttcatgaattggaagacctcatattgttaaaatgtcaatactactaaagcaatccacagtttcagtgcaattcctatcaaaatcccaaagatgatttttgcggaaatagaaaaactcatcctaaaattcacatggaatctcaagggactctgaatagccaaagcaatcttggaaaagaagaataaagttggaggcctctcacttcctgatttcaaaatttactgcaaagctactataatcaaaactgtggaactggcataaagacaggcgtagagaccaatggaatggaataaagagcccctagaaataaaacctcacataggtggtcaatgatttctggcaagggtgccaagaccattcagtgaggaaagagcaatcttctcaacaaatgatgctgggataactggatatctacaagccaagtatgacgttggaagcttaccttacagcatatccaaaatttaactcaaaatggattaaagacctaaatgtaagagcaaaaactaataaaaaattcaaagaaagcataaagaaagggcttcttaacattggatttgacaatgatttcttggatagaacaccaaaaacacaggcttttgaaaaacgtagatacatttttggaataaaaatgatctaattattaaaaacaattttaaaaagcatttaagtaaaaatttatataaaaataaactggactacatcaacatcaaaatcttttgtgcatcaagggacactatcaacagagtgaaaaggcaacacatggaatgggagaaaatatttgcatgttatatgtctgataagggattgatatccccagaatagataaaaactcctacaactcaacaagaaaaaaaccaaacaactagattaaaaaatggtcaaagagttgaagatatagttcttcaaagataaacaaatggccaataaacacatagaaagatgcccaacgtcactaatcattaggcaaatacaaatcacaaccacaatgagataccaccttacacccattaggatggttattatcaaaaaaaacaaaaaaccagaaaagaacaagtgttggagaggatatggagaaactggaacccatgtgcattgtcggtggtgatgtgggaatgtgaactgatgtagccactggggaacacaatatggcatttccttaaagaattaaatgtagaattacaatgcgatccagaaattccacttcttggtatataccccacagaagtgaaagcaagggctcagagagctatttgcatgtccatgttaacagtggcattattcccaatagccaaaaggtagaaacaacccaaatgtcaattggcaggtgaatggcataacaaaacatacaaaacatgttgtaatacatacaatgggatgttattcagccttaaaagggaagggaattttaatacatgctataacacgtatgaacctggaagacgttatgctgagtgaaacaagccagtcacaaaaagataaatacggtacactgttacatgaagtatttagagtggtcaaattcatagagattggaagtggaatggtggtttcctgggtctgggggaaaggggaaatgggagttagtgtttaatgggtgtagattttcagtttgggaagattaagaagttctggagatggatggtgatgatggttgccaaacactgtgaatatacttagtgccagagaattgtacacctaaaaatagttgaaatagtaaattttatgttgtgtgtatgttaatttttttaagtgaagatgtaaaggtgctcagaagagtcagagggacaggtgggggcctcatgatgaggtgacattggagcagatgcctaagaggtgggggagcgagacagctggaggtcggtgaacagcatccaggcagagggaacagcagtcatgaagggcctaaggtgggagtgtcctgggcttgttaatggaatgtcagtcaccatgtggtgtgagcagagtgagagaggaggagagaggtggtgacaaccagggagatggtgagtccctggagtatgaagggccttatgaggcatttgattttcttcagaccggataaaatgggaggacttggagggactgagtggagcaggacctgtctgactgggtctccgggctgctggcttagaaatatactatatgagaggcaggactgcaaacagggagctgagcagtcaccagggagagaggtggtgctagctgggaccagagtgactgcagtcaaggtgatgagaagtggcaggaatggggattctactgaaggtcaagcagtagacagacactgatacatggaagtggagtgagagaggggaaagaaaatgcgattccctggtatttggtctgagcaactcaactagaaggatagggtcaccgtatactgggtgggaagcctagaagagatgttaggttaaatctggagctagtctttagatgtgatcatctaaacatgtttgcgatgtttagggtcaaggtatggggaagccatcaacatagagatgaatttagagccataaggctggagggatccccatggcatgggtgttgacagagaaggggaggcccaagggtggagcctggtgggaaggaccagaaaggagactggagagaagtggccatagaggtagggacaagtgtaagagggctcataagcattttacatacattactccattaaattatcatagcaaatcggaaagtaaatatggtgctcattttacaagtcaggggactaagatgtagagagaaaaggtaacttgtctaaagttcatagtaaatgaagcagaggcaggattcaagccagttggcccaactccacagctgtgtatggtgcaactccaccctgcagagtctttctgttgtgatggggacagaacagagggatgggagaattgaatcttgtaactcaagatgagtaggagaccatctctgtcttccaagtgtgcactgtctcgtgggccaggggctagagtgcatccatcacaggacagtggctcagacaggggccatcagcgcgggcagccctcctgggtgagccggggttgacactggccacggaggctgcacagagcccagcactgacctcctgtgtgtatgtggggttgagggaggctgtcctcatgatagcacctggggagaggccacaccacttcaaggagtcggggcaggtgtcctattttagggctgtccaaacatagaatgtgggtagcattagtggtttccagtggctgccttcctgccacaagacaaagctggtcttgggcatgtgagccgagttcaactattggaagctcgcattgggaccagccagcaggcaggagttttgtgcagttggagaaggcagggttagcattcatgttggcagcagcggccatgcccagttggcgctgtgacttctgggccacattgaacctgaaaccctgcagtgtttttccctttggttcctggcacgggggccaacttggctcttactagttttccaagtctgcttttctaccttctactgacgctgtgaggcttggatagatgagtcagttacagacagacactataaaaagatgcacaaaccataactgggaaaaatgctgacaaatttctcattatcaaaaatgatgcatgttcattacaggaaagttaaaaatgcagacaggtaaagacacatacacaattgcaaaattctattgtccaaaaataatgcatatcccaatctggtctttgaaatgtatcatatatgaatttatacttatattgttttgaaaaggggatatgggatggtcatagtacaattttctcaccatcatgcagtggttatgggtttctgattttggagtcagatagaacagggttcatgactggctgctccttcactgaggagccatgtggccttgggctagtttttgaattctttgcatctcagtttctttctctgtgaagtgtggacgataacattcttaccttaaagggttgatgggaggctcaaatggcataacacgtggtaagttgtccagacagtgtttgggcacataggaagtgctgaatgaatgctcagtggtagtactgcttgacaatccagtttttaagtagtcatgtggtatatttatctctcacaatgtagaataatgggaacaatatttgctcatgggccaaaaattataagcaaccattaatttccattaaaatgaatgtagaatgctgcataaaaaaagtaagcttgtacatcaagctggtaatgtcaataagatacgttcattattacctgccaccaatatcaatcgattctgtaattacactaataatcagaaacattttcgaagtaactaggaattgtagtaagcatgtgctgccaggggaagaggtattacatttgtggcaataatttggaaaatcctacactgtcagggtcctgcaataatgtcgtgaaaagagaaaaatatctttagacagagccatgggaatgtcacctttcatcaatcctgcactgggctttcctggagtagtcaaaggcccttggagagaacagaagtacgtggctacagcctttgttacagaatgctcccaggatctgtgcagctggcctactatgtggcccctggaaccagcaagaagtaagaagggctagacatggaggatgtggtcagagggttagattttcttgcagtggtaactggagtcattggaggtgttcactatggttgggggagagaggagggaggaaggaacacaatgtgatacttagtttaaaaatgttgtagtaccttgatccaaatttacaggttgcttcaaaacatatatggaaatgcaaaagacctagaagagttaaaacaattctaaaaaaggacaaagttagaagactcactacatgacttcagcccttatattataaagctgctcaaggtcatggggtattggcataaggaaagacaatgagatcaatggaatggaatggcaggttctgaaagaaactcacacatatatgaccaattgagttgccaaggcaattcaatgggaaaagcaatgtcttggcagtaaacgatgctggaacaactagataagcatatgggaagaaagttaactttcatccctacctcatgctacacacaaaactaatttgagacacattagatgcctaaacagagactcaaaaattactacatttgtagaataatagaggagaatgtcctattaggataggcaggggttcttagaggagactcaaaaatcacttgaacatataaacgaaaatatactaatgaactggtctacaataaaattaagaactgctgttcattaaaagacatcattaagagaataaaaaggcaatgtacaaagtaggaaaaaatctgtaatgcatatatctgacaaaaacttgtgtccagatataaaggatttgttcccatactatataaaaatccctagaacttgacaataaaaagacaaacagcccaattttaaaaatgtggccaaagacttgaacacttacaaatggccattaagcatatgcaaatgtgctcatatctctagtcatctgagaaatacatctttaaactatagtgatataacattacactccctccagagtagctaaaattggaaaagactgacaatgctggtaggatgtggagaaactagaactctcattcattgttgcgaggagtgtaaaatggtacaaccattttcaaaaactgtttggctgttccttacaacactaaaactacactttaaccacacagttgcattcctaaggatttacaaaagagaaacagacacatgtccccaaaaaggtttgtacacaaatgtttatgtcaactttgttcataagagcctgaaactggaagcaacccagtttcactaaagagttttgtttagacaaattataaactattcatagatggaaaccattctaataatgaactatggatatccttagtttaacatagatgcctcatttgcatggaagaaggcagaccctgaagagcacatactgtttcctgcttgtgtgacttcaagaacaagccaaactagtggatggtgatacaaaaagaagtgttaggctggggacgatcgtggctcatgcctgtaatcccagcactttgagaggccgaggcaggaggattgcttgagactaggagtttaagaccatcctgggcaacatggtgagaccctagtttccagaaaaaaaaaaattagctggctgtgatggcagacctgtcatcccagctactcaagaggctgaggcaggaggattccttgagcccaggagtttgaggctacagtgagctacgatcacaccactgcactccagcttcagctatgaagcaagactccatctttaagaaacaaagaaagaaaagagaacagtggttgcctttgaaggtgggtactaactgtagaggggcatggggatgcctgctgggggaagggaatgccctgtgctcttgattgatatgatggttacacaggtagataattgaacataactcatgcgcttaagctctgtgcatttcactggctgtaaattttaccttagtaattactcataataaaaagctcatggtgcctgatatttggggctgggtggacagaggaggcctgtcaagaggctgttactatagtccagggcacaagagtctggtgaagagatgtaaaaagtggccagacttggccaggcacagtcgttcacgcctgtaatcccagcactttgggaggtggaggcgggcggatcatgaggtcaggagtttgagaccagactggccagcatggtgaaaccccatctctactaaaaatacaaaaaaattagccaggcatggtggcgcgcacctgtaatcccagctactcgggaagctgaggcaggagaatcgcttcaccctgggaggtggaggttgcagtgagccgagatcgcaccatgcactccagcctgggtgacagaatgatactccatctcaaaaataaataaataaataaataaatataaaaaaagaaaaaaaagaagtggccagacttggggtcttttggagggaaggtcagggctggttagcccaggaggtgagagtcttgcttagagctggcaaaggaggccgtgtgggttaacatcagaggaaagacagctcagactacacatccaacctattctgaatcatggcggttttagttgaggagtatatatgtcttttacagactactctgtgaaaacatacattttttcagagtttataacagattattacatcacaatgatctgttacatcaagtgctctacaaagaaaggggagtattttaagaaaagctatcttcctctgtttgaggctgaatttattaagtattcatgtgaatagcatggactgtaatttaggataaactataagctggggtatagtactcataaatttatggaattattattatttaaaatcactacaaacttacatgctactacggagattgaatttggtttgaatatattaagtgtaaatgaaggcagctattgatacagtagaattgctgcaattctactgctgcaatgtagaagagcacataactattgattgatcattatcatcgtagcccattcagttagtgctgccatttcaatgagaggtgaaacttgtcaatattagacattctttaattaagaacaattaatcagaaataaaataagaattgaagaagatagggaatttgtgtgtgaagaagatgttaaaatatataccagtaaggcagtcattcttattaagcttattctcagttctggaactttggtttggcatctggagatggattagtacaaatatatgcttaaatcaacatcagagaattaatagcaaactcctattgtcatttcccatgagatctaatagcaaaggtcactatctcctgcagagacaagggaagggaagtaattgtcataggcaatttataatgctctatgatggctaaattttggattgattcttcagtaaatgtccttgcaattaatttcaaagtggtgagtaaaaatgaccgcagttggacaccattaatggcaaagtcatactcctgcactgacagtgttcgtgaagagaatgaaatatgaagaaagctatgaatagttggaaattcggggggctgtgcttactcctgattatttcagtttggctaaaacagagctggcatcaaggaagggtttgttgtgatgattccagagagggtgactctcaggaagatgaactgggggcccaggacaggttgatgtcaggtgctctctgggaacaaggctggtggtgaaaaataggggtggaccgatgaggaaggctgggccactcagggtcccaagacttcttctggcttaataatgaggagcagggagggctggtggcaagatgtccagatgagaaacctgaagctccggattctgataaaggatactgctctccacttcccaggtgactctggtgggacaagtcatttgacctccctgagcctgggatttcctgtctgttacatggggtcagtctttcctgtcctgttagcctcccgtgtagggttgttgtgaggatctgtgcaacaaaggacacttaggccctctaaaagagtctgcaactatctgctttagttgtcttttattatttgttggtaataacttcagcagtgtgagctgaagctggagccatgcagtggtttatatactcaagcctggagatattttaggaaataatcaatacaagatgcattgggttggagccatggtaagagtcataaatcttgacagcctgctgtttgttcaaattaataatggttgagagaaacattgtaaaaacctatgggagggaaaaatctagagtgtgtttggggtgagagctttagccagtgtggaaactgaaagtcattcaaggaaggttagttatcatcctgctgctggtggagcagtgtagaaacacagmcacacacacacacttgcacacacacgtgtgcatacagatgcacacgcacatatagacacacacatgcatacatggacacatgtgcacacaggcacatgcacacacatgtacatacacatacacatgggtaacaagcaccagtttttttgggtggatctcagaagagactggcaaacaaggacaactagcactgatttcaacaatggacagctgcactttgcccactcaagggcctatcaccttctaagaaaatgctggctgcctctgaatttttaaaatgaaacatgtacagtgtttttgccatgcctcatttgtcactggtggagaagagtgtgttcgtatagccttgggatttgtggctgttgtgtacagtgagtgaggagaggggattgggacctcatgatttttaaatcatcaaagccttgatatggtctatagttacaaagtaaacatactgcttttcctgtgtccagggtgctcccagacttcccaatcctccaccctcacatcaagatggtcactgaagctgggtaccatggcgcatgcctgtagtcccagcttcttgggaggctgagccaggatgatcgtttgagcccagaagttcatgtacagcctgggcaacatagcgagaccctgtctgtacaaaaaaaaaaaagattgtcaacagagctccagccaggcattctttgttggttggggcatcagtgcagagaggctgcaggctgtggcacacattggaggagctgggcagaaccgtgggggtgccggcctgtaaagtgaacaccaggagctgggagggacaaacctggagaaagcaaagcaaggcacgaggcgagtcggtcgcagggttgcaggctggcctccatgcggatgcagttgactattgtataagaagagtctttaacactaacaaggttagagaccagaaagccacattaaaaaaagatgaaaacatttactttagtagaatgatggaattgtttcttaatttaaaaactgcttttactgtgtttattttttattataaaagtaacatgcatttcttataaaaactgtgaatttaacaagtcagaaaaccataaggaaaccttgatactgagtctatcatattttcaggcagagaaaacaaagaattttgtcagccgaagccttgtcataggagaagtcctctccatggcggacatggccacaggagtgaaggtgagaggcgccgggcacctgcccttcatgaatgcatgctygctttgcatgccaaggaatgaaaactataaccccgtgagctctctcagtctatgtagtggcacaggtgttggtaaaattgcatacctcaaaacctgtgcctgacttcccttttaactatcatatcctatcctgtttttgtttctaatttgcttttcttctttgtatagttttgttacatttgtatcaattggttattttcctttgtcttagttttatgaaaacagtatcataatcctttgtgattttctttcttcacttaaatattattgctaagatcgattcatattgtgtgttcctgtattcattaaattttaaaataaaaaccttttcattttgaaataataatgctcacagaaagttacaaaaatagtacatagggtcatgagaaccctttagtcatggtgacatcttatgtagcagtaatgcaatgtaaaatcaggaaatcaatattagtacagcactgttaggacatagaccctattcagatttcacgagtttttacatgcactcagttktgtgtgtgtgtgtgtgtgtgtgtgtgtggttttatgcagtttgaccctatatgtagattcatgtaaccaccaccacaatcaagatatagaactgttccatcatcagaaagaaacttccgggtcctacccggaagtttcatttggcctccattccacccctgtcctttggcaagcactaatctgttgttctccatctctatagttttgtcatttggggaatgacatagcaatggaagatcattcatttttgactgctgtataatattcctttgtgtgaatataccacagcatttattcatccactttctcatgttgtttccaggattttgctaatgtgaaaagtgctgctgtgaatactcttgtccatgtctggtgttgaacatgggtaaaatcttcccttaggtattcaactaggaatggaattgctagttacaggatgaatgaatgcttaactttaaagagtagtgttaatctattctccaaagttagtgcatcaattcacattcccaccaacagcatgtaatcggatcctgtggayccatatcctcttccatacttggaattcttagacttctccatttttttgcaaatggttataaaatggcatcttattgtcttgagggaagacaattatcttgcatgttcctgcttaccaaggaaggcgaacaaaatagctcaggtgggcgtgtctgctgcagccactcgtgctgcccaagccttccagcagagagtccttcatggggccctcctttccctccctggacaccactggatctcagaatgattcctcatatccaaacacccagtcgtgatgtccccaaagaggagaaattacaactagaacatgaagacagaatgatcagacaagaagccaggtcagttggcagtgagtccaatatggtggtgatttcagtttggtgtggacattgtctattggtaggtaggaattaaaaacaaagatatctgtgagtgccatcttgtcgtgagggtgtccaccatcagatttttccaggaagactgggctccctgtgatttcagccaggcacgatctcttccctcttggatgggttggctgtggctttcagagagagcagctagctgagatgcaacagataaataaataaatcctgtctcagaaataccggaggatcctggtccagactctcatgatccccagtttgtgcttttaccatgttgcacccccaccctactctgccatctactttctcttcagcaagcctccgtggattgtgaccatgaggacagctccacaggtggtggcagctctctgggtggggagccctctcctctggtctccagggtcttgcactgagcctagtccatggagtttcacagggatcgtctgaatgaatgagggaaggggcagcctgtagcataaagcagacttaagaagcattttaaccaattgcaatatgtgtgtcttatttacatcttggttcaaacaacaaactatttgtaatgaaaaattatgtatcagttggggaaatctgagcattggacatctgatgatattagagaatgatcattatatttttaggtgggataatggttttagggctatgtttttaaaaagaatctgtatcttttacatatgtattggaaatattcagggaagacatgatatgatgtcagggataaacatcaagataacctgggatgtaggaagggaaagtaggtaggggtggcggggggagggagatgaaggaaaatggaccatgagctgaccatccttgagttcattagatgcttctatttcattgaatttttccataataaaatttttttctgaaaactcctgagtatcctagaaggaaattggcatagacttaaagaaaatgtcctttgaaatacttctctgaggccgggtgcggtgactcacgcttgtaatcccagcactttgggaggccaaggcaggcggatcacaaggtcaggagattgagaccattctggctaacatggttaaaccctgtctccactaaaaatacaaaaaattagccgggcgtggtggcagacgcctgtagtcccagctactcgggaggctgaggcaggagaatggcgtggacccgggaggcggagcttgcagtgggctgagatggcaccactgcattccagcctgggtgacagagcaagactccgtctcaaaaaaaaaaaaaaaaaaagaaaaagaaaaaaaagaaatacttctctgatcactccagtctcctgcttaaaaccccttccttcccattatgctttagaaacatcctctaatccttgatgttgcccatgggtccttgcaggtgtggccctggtcacatctgttccactctcctcttcttctggttccttttacccacctttggaccacttgcttctagccctagcttggtctttcccctccttctcctggctgacaactattcattcttcatgttccagctaacgtgtccttcccgcagggatgcccctctcaagccttcaacttgagtcccatccactcgctgtcacctgtctttgcttcttacagttttctgccataacgtgtacccattttgaatctatatatttattcatggaattactttatgtctcttactaccacaagagggaaaactccttgaaaactataacccctacattcttggtacataataggtgtcaatacttgagtattaaataaatatataaaatcaaaacgatatggttgtttctcaaaaagtaggacataaaaattaccatacagcccagcattccactaactggatatataccccaaataattgaaagtagggactgaaatagatacttgtgtgccagtgttcattgcagcatgattcacaatagctaaaagctggaaacaagccacatttccgtcaacagaggagtgggtaaacaaaatgtggtataaactcaaaatggaatattgttcagccacaaaaaatagtgaagttctgacacatgccaccatgtggatgaaccttgaaattattaagtgaagtaagccagacataagaggacaaatattgtatgagcctacttatataaaatatctagaatagacaaattcataaagacagaaggtagattagaggtaacaagaggttggagggaggggagaatgggagttattgcttaatgggtacagagtttttttttgggatgatgaaaaagttttggaaatagtggtgatggttgtacaacattatgactgtacttcatgccactgaattgtatgcttaaaagtggctaaaatggcaaaccttatgctgtatgtattttaccagaaataaaaatgacaattaaaaattattattaactatgctgtcccacacatcagtaattgtgggagatttttcttttcctggagcttggaaatcctagacaattagaggaaactatagactgtgcagcccccaagtcctgaccaggaggaccatggctgtcttttctattggtggtggaggagatgccaggagggcatgtggtgtgctgggaacagttcctgtgagctctgggtcagtcaggggttccccagatccccctgccagctcaagagccactggtggtccctgcctttcacatgagctggctgtcaacctgaggaagggacgtcagcatcaattcatcaaaatcagctgtgccctgcatgttcaagtcccttttctctctctctccaggtctgtttatccagtggatttgcatttccctgagcaccttggacaaactcatttgtactcacacagccaagtgctggcagggctgggggctggctctgagagtggctcacagcgacaggggtgggcatattagcaaagtgccagggaaaaagattgtctttattggtgctttgaatccccactctagcttgtgagccagcccaagtttcctgccaaaagcatgggtgcaatctggaaggactctaactaaagctgaaagaaatgagacatgcttccttttctgcttctccatggctgttctattttgccttatttgaaccatcctattatctgtcttagcctgcttggactgctatracaaaataccatgggctggatgagttaaacagcagaaatttatttttccacctttctggaggctgtaaagtctaagatcatggtgccagcatggtcaggttccagtgagggcccttttcctggcttgcagacagccaccttctcattgtgtcctcattggtgaagagaggtgctgctttttcttcctcttctttaaaggcaccaatcccattattggagtcccaccctcatgagctcatctaactttgatcattgcccaaagtttccatctccaaataccatcacacagcgggtagggctttaacatatgaattttgggaggacaaaattcagtccatttctggagtccccgttgtctcaaaaaacacttccagttttccatttgtggaaatttgctcttggaattaggaaatcctgaatacacttgaagtctctttaggaggcccttgttgggctgttgtttaggaatggcctggcctattgcagccggggagccggcaggcttcctgcccatgggacagacctcacgggtccactgggacaggggcacactcagaacaacagagttgtacatgctacctctaggacttcccagccacacttttggcatgttcctttgtacatatgtaccttagctttctcctccctaaagatggcattgctaaagcccattcacaggctgtgtgtagatttaaatcagtaatgcctacaaggatccccgtgccaaacctggcaggtagcaggagctccataaatggtggggactgtaacctcctgggacgtggctgggggcccagccccacagtcttccaggtagtggctccgttggtgggttgaggtgataccagcctgccttcccagctctaacccaccagatttcccttccacttcaggatgtctccttttagtctttatttagaagctaagaagccctgccatagccccatcctttggtccctgtgacctgtcctggctacacctcccagccctcagctgtctcacactgtggcctctggaagctgccgaccctcattgggcatgttatgatcattacctcgtgtgctcgatgtcatagctgtcctttttcttctcctgataagtgggaaaagagagaggaggctttctcaagcaaggtgggtgcatgtttgaagttcgagttttcattaggtatcccccaaccaactctactttttctctcttaccactgcttttcgcagtctctctcagagcaaatggtcctctctgtgtcctgttccctgaggtctgccaggggcaggacgctgggtagtctgacaggagaaccacagtgtcctctcggaggacactctgcgacattcccacgtgatcggttgatgcctacctcccattagcctcaggatttctgttttaaggagtccataccctcctcctggctcctcccagcccctcctccaagctgttccactgcagtcagtgggtctccatcttcttggaaactcaggccacacacccaggtgtctctcagagtcctctttttccttctcctcccaaatccatcccaacaactctgtctccagaatctaccctgaatccctctacttccccacttccctgtctgcctccttcctggcctgtgggctggggcccatgcccctcccagaaggcacctgctgaaagcatgtcaggccagggagccctccacttccaatccccaggagctccacctgcatttggcccagcttggttggattagctgcccttcagagaatgtggcttttgtgggaaatgaaccccacactttacctgactgtgtggattgaggtcatgcagacactgcctctgtcaactgctgcagtttcctgcaaacttacaggttcacttccacagcccagggtgcctactaagacatttagtgaatgggggctttcaaaatgtggataaaacactctaggttttttttcctcttcctaaagaggaggaaaggatttaaaacctagaagaggaatttattgtcaagagtgcattaggcaccagccaaagagatttagaggtggaaaacctaacttgtttgagttttagaaaaatatttttttaaacttaactcccaagatggtttagggaaaaaacacgtaccatttgggttgcttccatttcccatgttggaattagtaatgcaatttgcagtgcctgcgatgattctgtagagaagtgagctgagtcttcagggtgtgaatcatcttcccaggatactttatgattctccaaatgaaaagcacttcacatgtcagatgtgattagtgaaattcatctgtcctgatgccagagtgtgttagctggtccgagctgctagagttgatcaagtaccatttcacaaagttaataccaggttgttcatacacgtggggtatgaacagagagctcatccagatgcagtgaccccaggaaaaaagtcgactctaaacttgcctaagcaaaaatggtacttattggctgctgtaattcaggagtctaggatgcagcaggcttcaggtctgggtgtgcaggacctggtctctgccatctctcaactctgcctccttcccccaaccgggtcctcatacattggcttcattccccagctcatggctgtatggccccaggcttccatccctccagatttcatagcctcacaaaagagggcttctcttccacagtagcttagccttgtgtcctggcttctactccaaatggacacacccagatcatgaatccatcctgagagccattgtctggccagatgagccagtcctgggctcccaactcatcctaaagctgggatggggtggggtcaacatcacccacaaaccacttggacagattctaggggaggagggctccccagatgaaaactggggttgtatagctaggagggggaaggaactctgacctgcaggcacagcaatgtccctacattcaagttcttctgtctttgcagtcagtcaccctgctccttccaaacggccctgctcaagccactctgcctcttcctgtttcttctccttctccttctcatcctcatcctctttgtcttcctccttctctttgtcagcaacacttttccagggtttacaaaagaccaggcaggctgggcatggtggctcatgcctgtaatcccagcacttcaggaggccaaggtgggaggattgcttgagctcagtagtttgagaccagcctgggcaacatagcaagacctcatctctactaaaaataaaaaaaacttagccaggtgtggtagtgtgtgcctgtagtccctagtcccagctactcaggaggctaaggcaggaggatcgcttgagcctgagagtttgacaatgcagtgagctatgatcatgccactgtcctccagcctgggtgaaagagtgagaccctgtctcttaagaaaaacaaaaacaaaaaacccacaaaaggccaagcaaaggcttggtggttgactctcactgaatcctcatggtcactatatgaagtattataaggcattaggtagcttgggtttcagcctcagcccttcccactttcttaggatgtgggtgagacactttccctctatgaatcccaatttcccatgttaaatggggatgatgatgctttctctccagggttgttgtgagagtcagtgagcttgtaagctcagtagctcagtaaatgggtactctcaccattcatttatcagatgaggaagctgaggctacaatgtcatttgtccaagatcctgcagccggtgggtagctgaagtgggattgaaacccagggtgctcatcccaagctgcatgcttgctccttttgcagcgttgcctcttccatccaccttcctgtaaggaaacactttctcatggcaggactcacctccacagacgggtcagcatcgagggtcattgcacacacactttgttacatgtcttctgcatcaggacctaagctagatcctgagaggacaaagcagaatgagctttcagagcattcatttgttggggggatctgggaggcctgaggatggaggattgactttctgtgtcagtcctgagcgactcatgagccatgtctgcagagagaaactggagctcaccaggcagtgaagaggaagggcaaagaagcatgccacttgcagggcttaggtcaagcacagggggctgaatagctgctccctgattggagtttggccgtggatttaattgtctttagattgctgactgttgctaatgatggtttgtattgtccttgtttccagtgcggaataatttattggctatttggtggtgctatcaggaatctcggaagccctgaacatgttactaagtggtttcagccactccaggtatggtattttcctcaacattggtcttctatggagagccttaaaaatctgtagtagatagatatgcatgtgtgtatgtgtttgaagaaaaataaaataaaacagaatttgtatcagcaaaaatcttgttgaaaatgagaattccaagactatcttttttatgttgcattgggcctgtcatgttgttaagctcacattcgctgtcatcagactgcatttttataattttctccaacccacctgtccctctctcaccaccattcttaatggtccgaggggtctgcatttggagcarctgcctgaccagctaattcccttctaacatctggtaaactccaggagcagaaatacactgggatgtttgcaatgaccgagaggggccatgggagcaacgcgagagggatccagaccgaagccacctttgacctctctgcccaggtgaggaatccrtccttctcctgccgtgcaggggagctggaaacctggacagaaacagatctccttctttctgtgtccagcttcacaccctctgtgtgtgctctctggcccagggagctgagattcagatcaaatgcctaagtgttttaatagaggtggatatgtgctcagccttcgtgtacccaacatcagccagcatgttgcctttgaggcaatatggtgcctttgaggcactgaacactgcttcaagcactttgtgtgcacttgtgaatttaatcccttgtcataactccaagagaacaacactaaaaccattttgtagtcgtccctagcagtagcaggaacagactggaggagacgcctttgttggtcctctccactgtgccctgtgtcaggagggcactatgctggggccaccttatcaggagctgagtcttctgtactgggatcatgtgctgtcccttaccgtgacctgcactgacattttacatgacaacagaaacaagagtgtcaccaaacggtctgactcttctacctttactctatatggtcaatgctgaggtttttccttttcattcttttctttgtcttccttttcctttcttttccttctctgtttttcttcctttccattcccttcttgctaactaaaaagatgttggctaagtctctctacattgctatctctgtccatagtgggtcataacataccctcgggacgctgctttgtaaccctcatgcccatctctttaactcctacacgcaccccgcccccgcccctcaccaaaaaagaaagcaactgtgtacttatctcactctcctttatagttgcttgcttgatattgggtgttcctaagaactacaaagggataaacaaatgttgaggtactttctagaaatgaagctatgtcagtcagtgtgtgcaagcacgtgcccgagcgtggctgcgggtgctgcctggccgtgtggctgctctgcttcgtctattctttatttttgcagtttgtccttgagcaggtggatttttgttagyggggtttcctgacccagggttgctggttggaggtggccaatgtctggaatgacagatgcaggggcggggtgtattggaggatgccctgcttttccttctgccctgatgttagttctctccagcagcaaatgatgtccaagatcatagtaagaacaagtactaccctatactgaccactcgtaaagtgccatgctgtgtatcaaactccctctgtgtagtattctatgtttccccccagcaacagtcccaggaacgcaacattaaactggtccttttaactaagcatggctgtgccatgtaccaggctaagcagtctacttgtaacatcatttcatttcaaatgttctgtaaccttacgaaaatgtattattgtccctactttacagatggggaaacagaggctcacggaggttaagcagctgactctggctatgcagttaatgagtgagttaggttcgggtgagactgccctcagcagcttggcttttctgccagtggtggcatgctgacctaacatcctttggcttttggctggccgatttttttcctctcccgaagccatcgtattaaggtcaccttgctgtcgttgatggggggaaaacacccacagctcttatttatttgtttcttcttacaattattacttttttacaaaaataatttcctgtgttggtcccattttccccaaacagcataaatgacttagctacctggcgtgcctcggcagctaccactgtctgataggggacctgcaaagttgcaatcataatgacgaggggcctctggtgaacactgtctcccgtggggctgggagagagaacaatcccatcataaactcataccaccgagaactgacatagcaggaatgtatttctcccttcactgggttctgtgttttccccttcatttccctttcaaaatgctagagcttattaaataagtgttctctccccaaggaccatttaaatctcttacatgttttggttattcattcctgtgggttggttgttttacatttatttttgggaggtggattgggtagtggtatggatagttaagagataagagagagttttatttttatactttattctaaatagcaaaaataaatgaggttatgaagtctctggccaaaggcatcatttttagttcctacaacactgaccattttgctggccttcaaacaaataatgattacagaaactgacacaatggtgtgtgttatttagatgcagctttaatgcccgagtttgggctgatgcaaactttccaaatcaagcattttgccagaagtgacaaacctcctttcccagagtgtagcaaatgtttatggggacgggtggccttctgctcccttccccaccccaccagatcgtttctgccaggccaatgtttcctctgccacttcactttcttaccctgagtgtaagcatgcgcccacccacatgggttgtatttttgttgctgttatttttctctgcactcagcctcaagcaatgcctctccttgagaagccctggctaccctgataagacaagggtggcctccagagacatctcttaaaaagatccagcatgtccgtttatgtttctgaaaagctcttgcacaagttaaaagtttccctgtgcaaacatatgtcagagaatgttttcttaggcttcaagactgtatttcttggccagcgggaaagtgttgtctatatactttatagtctgaaatctgagataatctttgcacgatcaatagcttgttggtttagttcagtcacatcttcaatactgtcaactccaattaaatgtgcagttccactctctgccatttctcctgggctcccaacttgccccaggtgccctgtattcagagctggcaccagggccagttcctttttggcaagaggcttaaaggtaacccaggtggcagtggagactggggagagccaagaagtgaggggagcatttccactatcggcttccagagagtaggacagagaagacggagttttgagccgagcctgagaacaaaacccctgcgttttcttcctgcttcttcatgaccagtgttagtttcagactgttttgagctgaaatccttggacatattcagagacaaactgcatggtacattctaagatttttccctcctaagaaagagactcatttacaagttcttccattttaggagcttgaacatatgaacctcttttgggaaactttattatatgcattgatcagggaaatagagagacattttcaaaggttgaaatgagggatttctttttataaaaataaaaattgggctgctactctaagcagtggtgggaataggtcatggctgtctatcagtcttgctttatccaagcgtacggttttggccttcarttccctggctttcatttaaaccaagatccatgtcatggaggcaggaaggttcagggcctgggaaacagcgaggaaccaagtgatttgcccagaaggagtgaacaccagcagacaaagtgcgactcacagatgcggaccctgggacaagccatctaagggcccagatcgttggatattccatcctttcttagaaatcttgcaggtgggatatttggagatgaggggcatggagagctgagcatataccaccagggcttttagaggttttggtgttggatgagttaaaggtcaaaactttgctatgaagtagtctagcgagataattgaagaaagcctttatacattaaagccaggcaggctcagccaaacagcacacatgtcagcctggcattataaagaggagagactgggagggagagaacaaacaccttttaaagattgaaaactggcaacttattttctggatcagattattccttgaaaaatcactttaatctcagccattttcaaagctgaggtggaggtgaaataaatgaattgaggtgatagcacagccatgttggtttcaagacgtggagccagrtgaccttcccattgtcttctcttctgctgtgaaatcccctggaaacggaaccctgcactgtgtggttctgtttttcacagtattcattgcttttttttttttttttgagatggagtctcgctctgtcgcccaggctggagtgcagtggcgcaatcacggctcactgcaagctctgcctcccaggttcacgccattctcctgcctcagcctcccgagtagctgggactacaggcacccgccaccatgcctggctaattttttgtatttttagtagagacggggtttcaccatgttagccaggatggtctcgatctcctgacctcgtgatccacccacctcggccccccaaagtgctgggattacagtattcattgctttgagccagggagttgaaatgagccatgggaagggaaacactgttgctctgctttttctgtgtaggagtttgtaattgacacgccgtgtgaaaatgcggagaagatgtatattggaaatgccatgtacgggaattatgcagctgtctttgcccagctcatcatagatggaagatctcaaggtttgttaccaatacagacaactagaataattctctycattagtactatttaccagtgaaaaaccatttcacagagctgcttttatcttgtaaataattcagtactaactttatctcctaatatgcatgaagaaatttatcattacattttgacattatatgctctcatgcttggtgcacagttgtagaactgaatgagtttgaggatcacagaaatgttayactattccaggacatgagtaaagctataggaaggagagcttaataatgatctcgatgccttccttagggccccactgtttcatcgttcctgtccgggatgaaaacggaagcttgtacccaggagtcacagctattgatatgatgtacaaggagggtgagtccccaggtgcccttttcctgtgctcactcttcctacctgctccccacctgactcaaggagaatctaacctacgttatattaccgaagcactgagggtggagaaaacttccccagagaagatgtccagattttgaagcctcatgaagtcttttatgtagaactgttcaggaatgtcgtagattgccttttatgaatgtgcattggtctcagtttcttccagcttctcaaattttccagtaatgaggtagttttgcccacaatcctgttttgtcttctctcatctgagacttgggggctctcagggggcaggctgtagctctcttctttgyacccctggccacctgtctgctctctgtgctcttgaggcccttaatgagtcctgaggactgactcagtgccctagtttgctagggctgccataccgctaactgtggggcttaaacaacagaagtgtattgtctcacagttctggaggctggaagtccaagatgacggtatcagcagtgttggctccttctaagagtggtgatgagaggtgaagccagctgaacttcctggttccagaggggacttggagaacttttctgtcttacaagaggattgtaaaatgcaccaatcagcactctgtagctaggattgtgaaacgcaccagtcagtgctctgtagctagcaaggggattgtaaaatgcaccaatcagtgctctgtaaaaatgcaccaatcagtgctgtgtaactagcaagaagattgtgaaatgcaccaatcagtgctctgtaaaactcaccaatcagcgctctgtaaaatgcaccaatcagcgccctctaaaatgcactaaccagcgccctctaaaatgcaccaatcagcaggagtctaaaagtagccaatcgcggggaggattgtaaaaagggcactctgataggacagaaacggaacatgggaggggacaaataagcaaagaaaagctggccaccccagccagcagtggcaacccgcgctacttgctgtggaagctttgttctttcactcttcacaataaatctggatgctgctcactctttcggtctgtgccacctttaagagctgtaacactcaccatgaaggtctgtggcttcattcttgaagtcagcaagaccacgaatccaccagcaggaaccaactccagacacagtgagggaaggatttgttctaggactgtgtctttggcctgtaaatggttgtgttcatgttaacctggtgttctccctgtgttcatgcctgtctccaaattgccccatcttacagagaacagaagccatttagattagagcctaccccaatgacctcattttaatttgatcacatctgtaaagactatcttcaaataaggtcacatacacaggtataaggattagggctttgatacatgaattttttttttttttgtggggaggacacaatttaacccataagatttggtgagatcaggacatgcctgtatgctccagtgaccactcagggccaagatcatgccaagccaaggaagggagactgggagagaagaaaaaaaagaaggaagagaagagggaagaagtggcccatcctttagtggaggggacagtccatcctggccccttagtgtttactgtgcactgccatggctgcaggcatggccgcaggtgggtttgtgagggttttagatgtatctcccgggggtgaccgaggccctggctgggctgggctccttgaaagttccttgcatgtcagatgttgctgagagcagaggggtagactgagctctgtgaagtcgtgccaggcattgaaaacactggcaatggcagaaagtctgctctggtgcccttgtaagctgctacatgcaagtgtgtccttgtcaaggggtgaagttctaaataaagacatttactaaagacagattgttttcccctaggttaaatctctctaagttttcacaaagagaagaccccagactctggcaggtgtctttaggaaatgtgtctgccagatttcaggaccacccctccccactccgcactgcttcccccacttcctgctgtccttgtggctattttcccttgtcttgtaggcatttgctgtcaacagtttgccctgtgtgcagacgagagagcactgggaaggaggagggatttgagcactgcattcctggggagagcaatcctgctaccctgcctctgtgttcagcttcccattcttgcagttgcttagaactctccctttcttaatcacagtcactgctcgggaggtaggtgtgcatccactacatgcccaaagcatgcacatgcaggctgcacagaaggagagtccattctcctccactctcgctaaggaggaaggggccaggctggtggaagaaacaggcacagctcatcaaggaaacaacagacaacatccccatgtccacccccaaggaaaaagcaccaacaattctggaagtaaaataaggggctttgtattttagtggcgacaggcctgggaagtagcagggaaaatacttctgatgctgcatccatttcccctttctattcttgccaggtmtgcatggtgtggacaatgggatattaatatttgacaaggttcggatacccagggagaacctgctggataagtgagtagtttctccttaactcaggtcaatggtgcagatgatctcactgctctccaaagttggcttgggtcttgggtctcatgggctgcatgtctgggcattcttcccctaaccacccgtacaggtttgttgacaactaattggaaaagatacgtctgcagatagaaaaaagaaagtaaaattattcagcatgctgttgtccaggcataatgactgttacacttcaatatacatctttccagacttttctctatgcccatatgtctaaagagagagaggtgtcagatttttactaagcgagatccacttctagattctatgttcaaaataacctgtaattcccatttatcattatatagcaaatgtttttatgtaatgctaagcacacacatgcattatcatctttaatatcactataatggactgttaaataaatggtttataagttatgtaatcaatttcttattgttgggcatttagttttttttccttcccccccctgccattacaaacagatgggtgctattgcttcctttgtgagtggcagaggataaggcaccatctttcagcttccaggtgtgttctgggggtggagctctaggggttaatgatgcttttcacagaagctgagaaacaccaattacttttaattttctcagcagcgtttcacgcatccagtaaagatcctgagccatagtcatgttaaatctgtgacaaagccagcaatcagggtacacacaaccagctgttttcccacctccccatgggtttcccttgaatgctttactcctttttgttgccagcagataaatgtagtggatgccaaaagcttaagaaaattatatgggaaaaaaccttaaaaatgattggtatgacaaacccccatgacacaagtttacctatgtaacaaacttgtacttgtacccctgaacttaaaataaaagttaaaaaaaaatggagggataaggaagtagaggatagaatagtggttaccaggggctgggaaaggtagggaggaggaggggatggggagaggttggtcaatggatactgttacagttgtatggaagaaataagttctggtgtgatattgtacagcgtgataatagttaacaataatgtgttgtatatttcaaaatagttacaagttttgaatgtcctcattccaaaaaattgataaatgcttcagatgatgaatatgccaattaccctgattttattattatacaatatataatgtatcaaaacatcacactgtattccatcaatatgtacaattattatatgtcaattaacaaaataaagcaaaaagaaaaagaaaaaaacttaaaatggaccaaattctgcttaacattttcctcctgtgaattgataggaaataaaatggaaacaataaaagcatcttcacagttatcctggtgggtgctaaagtcccccaggccccctcaggaccaccagcattcatatggaaatgcaggaaacttagaatagccaaaacaatcttgataaagaagaacaaagtaggaggactcatacctgtgatttgaaaacttactacaaagtaatcaagacagtgtggtatttgaataaggatagatatatgtacaatggaatagaatgaagaatctagaaataaatccttacagttacaatcaattaatattccactgcagagccaagacaattcaatggggaaagaatagtctttttgacaaatggtgctgggacaaactagatagccacatgcaaaagcatgaagttggacctttactgcctaccatatacaaaaatcaactcaaaatggatcacagacctaaatgtaagagctaaaactacacaaatcttagaagaaaacacaggtgtgaatttttgtgacctgggtttaagcagtctattagacgtggcaccaaaagcacaactaaccaaagaaaaaatagataaattggacttcatcgaagttataaaaaactttttgcatcaaagaacactatgaataaagtgaaaacctacagagtgggagaaaatatttgtaagtcatatatattaatataagggtatagtatccacaatatagaaataactattacagctcaagaataaaaagacaacccaattttaaaatgagcaaaaatctgaatagacatttcactaaagatttacaaatgactgctaagcatatgaaaagatgctcaatgtcgttgccattaggaagatacgaatcaaaaccactgtgaataccactctgcacctactaggatgtctttttttttttttttttttgagatggagtcttgctgtgtcgcccaggctgaagtgcagtggtgtaatcttggctctctgcaacctctgcctcctgggttcaagtgattcttttgcctcaacctcctgagtacctgggattacaggcatgcgccaccatgcctggctcatttttgtgtttttagtagagatggggttttgccatgttgaccaggctggtcttgaaatcctgacttcggatgatcctcccacctcagcctcccgaagtgctaggattacaggcataagtcaccatgcccaactgatgtcccttattaaaggggcagacgataacaagtgttggggaggatgtagagaaattaggactgtttgttatacattgctggtggggctgcaaaatggtggcaccaactaggaaatcagtttggccgttcctcaaaagtgtaaagttatcatcttatgacccagcaattctactcctaggtatgtgtgaaaacgttgtctacaagagaaatgcaaacctatatccacacaataaattatacacaaatgtccatagcataattattcacaatagcaaaaaggggaagataatccaaatatccatcgactgaggaaacaggaaataaaatgtggtatatccatacaatggaatactattcaaccatgaaaagaaatggagtactaacacgtgctacaacacaggtgaaccctgaaaacattatgcaagtgaaagaagccagacataaagaccaaatgtgatatgattccatctatgtgaattttttcccagaacaggcaccatagagagagaaagtaggtgaatggttgccagggactggagggaggggagtatggggagggactgctagtggggtggggtttctttttggggtggtgaaatgatttggaataggatcatggtgatggttgtacaatttcgtgactatactcaaatccatcaaattgtacatgaattttatggcatgtgaattacatctcagtttttaaaaagtgggtcagtgtgcggtctgcacagtcaggctccggtgctggtttaatgtctcaggaaaccactacctcccatgagtcaagcctttctcagcatctcttggagagggactccccctgcccttatcggcgctctgtctcaagggggaagttccacgatggggaaatccgagtgcttccctgtgtatgcacatgggagccacctgacttcgtttctggtggtgctatgtcctgcttttttgtgaaaccccacctctcttttccacaggtttggttccgtggctccagatggacagtaccattcgcctattaggaacaagagtgcaagattcaatgccatgctggcagcactgaccccttcgagattagctgtggctttccaagctatgggtgccatgaaggtaattgactctgattttaacttaattatctactgtgaattctctcacgwctcagggatgagtaacaattccaggagctgagcttctggagccacagttggtataatatggccagggttcccggttagatgctggggagtgccaggtggccatccacagggaacttttctccacccttcttaagaggggctcccacccatctacatcccagatgtgtgctgctaatcgtgggggtggagcacaggcattgtggtaagagagccaggagagatgaccagggagaacgggatgttcagagcaaacacatctgctggagaagcagctaagggttggcccatgtgggcaaaggtcggcatgtcttggctgaattcacctgggagtgttgatcctcatgtgtctgtatagggtgtaacgttctccatcacagtctggaggccatgagaccagacctccaggagccatctctgcctccctgccctgcctctcccgtgtattggttggacagaggagcctggagagcaaagctctggaagggcctccttctccccagggccccagtctactttgttctctgggccttctctgtctctttgcctgaaggaaaagcctgctttaaactccactgagcttggtgaagctagaagaaaaattaagtctccccaggaatatacatctggggcttgagtccagcttttccatgaagaaggaataaatttcattcccttgactccaggcctgacatcagtccggagtcgtctgaatagcaggaaagccctgctttacttgcttcggggtcggccacgcttcacagatggcctgtcctgacccgggcttccccttatgatgcttcctgtgagggggcacagctgtggccatcaacacgcgtacgcggcctggcctcgtgcccgcccgtgcaccccagttcctgtgcttgttttgtggtggttctttcagtggggccgggtgggtgttcaggtctgaagtcccaggtcaggaggggctcaggtcccttggctgaactgtctgatattgaatgaggccccagaaagccttgtggtgaaggcaccagcacagacagcatcagagtgccgaggaaaactggttcctcaggtctgcaacagaagccatttcagccatcctcaggactccagagagaggcaaaaatagaaaagccagacgagcctaggattgcatgaaagggaagattggttaaacatcggatgcagggttagctgaagctgtgatagcagtctctgcacaatatcccctctaattgcagtagcctgcagaccatcctgactcaggggccctctgaggagagtgctgggcgcatataaaaaacgcaaggtggtcagcggccaggcaggctcctgggaaaccttgcactcttgctggttttgatggggtgatgatgtgtgaaggacgtccatgccgccagcagccctgcaggctcattggggtccacagtggggttgtgtggggcaaggtgtggggtggtgcagaccagaccaggcagaggtgggagccttccaggagggccttggttttaaatatcaccagatctggagcggggtgggggtggtgtcccagggagaggagccacagtgggtgattcctaaaaggttcctgttctccgttctactggatgttatcatggaccagcccctgccaggcccaggagggtcttgggggccacattcgcatcagttcctttattggttgtctcatgtgcagacttcattcccggcaacacggagacgtgatcatgatcgtgggcaggaaagccctgggctcagccctcatcctgcccatgaccagcactggggccgtgaacaggccatagcgctctctagggctcagtttcttcatgtgtgaaatgggtcttaggatggtggtgagccatgagtgaagggtgtgtgtgcagcgctggcccagagcgatgctccatagctgacagctgttatttgtgtgatggttgttgttgttgtttttgttgctgctgctgccgttactgggaagacaggagttggctaaaggaaaggaagacatgggcattcccatgaaacaaatgctgggtaccctcgcctccaagtaacaaggcaatgtgcaatgttttgcagagatgcatagtgtcctttgaattcccaggtgtctgaagcaaaccacagtaacccggagttagcacctgccctgcctatccagaccttgccaggcaatgggattgtcaggcagtgggaagaccccgcacagagccagcagggtccaggcaccctgccggacagtgacccgggccgctgtgatctcatctccagcgtctctggtgaggatgatctcaccggccctcttggcagctcttcctctcctatggctcaaacacatgacatatgttttcccggctgaaacctaagatggtccttctccttctgctcttgctgatgagtggaaaaatggatccgtttctcctacgtgcgttccttgtgtattaaaaaactgtcaccgcagctccccacagtgacattcactcaaggctgagcgtgcccggtcattttaaactttgcccaaatgtcatatttttcatggttctctttcatttccatggcattccttggaactttcaggttttctcttaaagccttgccatattgaccatcatctaatttgtgtcagaaatgccacaccaaattaagtgattaccaagaacacgaggagaaggaagcaaatgtgtttgggaggggagggagtgggggcttgggagacctctgcagcctgtgctgggaggctgggaaaccttttcagaaggaggaagctgggcacctgaaagagtgagaagtgtaaatgaggtctggcccattctcttgggttgattttgcgcagaggtaaatattttagctaagacaagctcatcttgtaaattaggtgctgcacagtagctaggtcctacccccaggatgtgtgattctgcagctctggggtggggtggagagtctgcatttctgggttcccgggtgacactgctgccatgggctctgctccttgagacccctgcacagaacacatggatgtggttgtgaaatatcagcactgtctcagcccccttgtcactccctgggtccccaggatcaaggcccaagttctgtttctgtatccaggatccttcatgactcctcactgtaccccctctctccactgggcctctgtccctctggcctcatttctgtctctcccctgtgccactgtgggagggggcttacatgtgctaccatccagctggggatgccccccttttgcatgggttgttttcatgtacatttcagagcttgtatgactgtcccttcttcagaaaggcctcagcctgcatgtggttcctctgacacctgttcccaaggcactggactccccacttgcagcatgtattacaactcatgagtgtagcaactcatgtgcaataggtgggttctgtctccttcactagcctaaaagctccacgcagctggggccctgccagcctcatccactgctgtgtgttcagcttcacacacagggctgggcacatagcagacaaacagcaaataggagtggaaagagtgaatgaggtctgaatcaggattcacatccaaagcccctggcttatctcttagcagagggaagccctcagtgcatgttggttcttgtgctcccacataccagcccccactgccgggtccatgttgagtgggaaggaggatgttgctgcctctttgatctaactccacgtggcccttctgtccagaaccaggagtcttctttctttcttcctctctgtcgcagacactgctccccatagtatgtgcttcatgtgtacacactcgtgcattgtgctgtaagcaggcactggggtcgtgctcacctacacttggcagtgtggccctggtggtctgggagtgtgcccagggctggggctgcagagtcacatgcagcagctgagctgcggggctgcatgctgagtgcaaccagcattctgggctgttttttcaggcacgtgggtgctgggcggcagacaactcagccagtcctgagagcctgaacgatgatctccaagttgtacagcgtgccacatatgagatgggggtagcttttcccagcaccaggagcttcagggagagcaaagggaagaaactggcttcaggggattctcagaaccggcgatagacacacaatcttttcctacggtgtgcattgttgggtatgagtgaagggtctcagcaaggcatgggagagtctctccctgctgttgatgggggtttgaaatgggttattgcatccttgagtaacccttttgtgaccttctgactgcaagggttcatggaagacttgagcaatgaagaggaggttgagggcatctgagtccccttgagagccagccagggttggtcagtggccagtgtgggcccttctcaccgcacatggagtggtggtgtggctctgtgggcctgtgctgtgttaggtgagcacagcaggctgcatgctgccactgctgtgaggtcttgcttgggattgccccttcacccaagctcttccacagctccagagaggtcctgatgtcgatgtcctcaccagggtgtctggctcctggtcatccggctctccaccactcagcctgtctggttcagctactggctggggctggggcagatcagcaggtgtcagagtgtcacattctatctgtcctaatggccacaaaccaggtgccatgacacttcctcctgagcagaaggttactcagcctcctcacattaataatctcaatgtttgtggctattgctgtaacacgatcaggcctttgtctgttttctttttgcttggaggtcatctgcttttattgtcttctggaatcactttgtgttcatctattcttgtcacagattgatctcattttgtatcattactaacacaatctttaatgggcagggattgtgtttttttatttagtccctgcaaggcctagtagagccctacatgtcatggaaatcgttttactcttctaaccttccttccatgtattgcctattcatccacccacctgttcaaccacctgtccgtctgtgtccatccacctatccacccactcacccattcacccaccacccatccatccacccatccatcatccattcatcattcatccatcatctgttcatccatccatcattcatcatccatgcatcattcatcatctgttcatccatccatcatccacccatccatcatccatccatccatccatcatcatttatccatccaataatccattcatcccacccatcccactacaaagactctgaacacaagagtaatcagctcatgtataatttagtagttaatggggagtgtattagtccattctcacactgctaataaagacatacctgacactggttaatttataaagaaaagatgtttaattgactcaaacttcagcatggctggggaggccttaggaaacttacagtcatggcagaagggaagcaaacacgtccttctccacatggcagcagcaaggagaagtgctcagcaaaagggggaaaagcccccttataaaaccatcagatttcatgagactcacccactatcacaagaacaagatgggggaaactgctccagtgatttaattatcttcaccgggtcccttccatgacatgtggagattatgggaactatgattcaagatgagatttggggggaacacagccaaagcgtatcagggagttatggaatgtcctagagaaaaccattcgactacctgatggacaccacacttcacagaaactcctcaggcaggagtgttcaaggaaaggacagaggcattcaccattctcagagcctgtccttccttcagcagcaaagggcagagtaaggagtgtctctgtaggtcttgcacggtggggggtcagtgtggggactgagttgaatggggttggtgggaacggaaaccctctgatgttgagcacagtgggacctctgcctccgcagacagtgtggcataacagagggtgatggaaggggaggctatgggctctttaaagtaatgtcctgaaaatgtgtggtgctcacaggagtgtgtttccctgatattaataaggcaaagctgaccgatgctcattctgttgacacttttgtgatgtggtggccttactcatctgctcagatggaacatggtgttggggagttgaaagcacagctcatctgctgcagttttatgccttttcaggcacgttgtatgtgcttggaggaggtggggtcacattgctcatcctgttctgctcagactgacgttatcctttttgttttttttgcatacacmcacacacacacacacacacacacacacacacacacacacacacacacacacacacgcggggaggagagaagcaggacctacttggttgctggggaagtccagtgggatgaaggctttagcctgagtgatcctcagagaggccatctgtgaaatacacagattgtttcctggtgtggagacttcttggacttgaccaccagagggcagaaaataccaataatgacttgcaggttctgttttctttgcgtttatttactttcgtatgtaagaagtggggaggtttttgctcttgtcatcagtttatttagcttctcatcaggcatcagtgttgatttttaaaaagtgtcaacataagaagaaggatacatgagctgagtaattgttggactcaagaccaaggttgtaaataggatgtagagttattttgacaactcttcaggatataatttgactcataaacctctttaaaaacatatgtttgcagcattttggatgggtataaaatggttaaataatgttttttggttttctatagcagttgtttacatatttaacaaccgaaatttaaacatttgtcctttttgtaaccttttattttaggttggggagtacatgagaaggtttgttacataggtaaactcatgttatggtggtttgttgtacagattatttcatcacccaagtattaagcccagtacccaatagttaccttttctgctcctctccctcctccccactccctcctcaagtagaccccactgtctgttgtttccttctttgtgttcataagttctcatcctttagctcccactataggtgagaacatgccgtatttggttttctgtttctgtgttagtttgctgaggataatggcctccagctccattcataaacatttctccttaaaagatacatctactgcccttttcctcaaagaccgaagagctagagagaagtgcagccagagatagtaagtagcacaggacatgtgtatctgaaatggatatttgaaagaatttccattttgaatttgcttcgattccacgaagacgtgttgtacgccttcctctcagcactgtgaatcgtgctaggaggtgacagagatgacctggaacaggcgtgtgccctctggggactcatggtgcatccgggtagctgaaacacttggtgctgtgtggagcctctgtggttacactgkcaggagggacatgtggcagcgggtactgagagtaacatgccatacagagacagttgtggggtttttatggtcagagtccagtacatgtcctttatagaagcttttccaaatgaggcctctaggtctctggcacaaagacctaggagctgacatccagcccttccccaatgagtagagtatctgcgtcacattcacagatgggcagccagaaagctcttggtagggtaaggagtttctctctgctacaggagaggaaagtccttgggcatctctccccatttgatgtggcccatgaatgttagatgtttgtggctgtgacatttcaaggaacagaactccctttaagtaagtcatcagaggctacacaggcattgtaggaaaccccagcctcctcaaaccttgggttgtggcagtggcagctgtgaggggcagtgtgatgctgccataattgtgactgcttcccagtgctcccagccaggcctctgcttgggagaggcttgccttccttggcgccagctgccagctcatctactaccgggagaacgatgcccaggctgcagctgtgaggagcttcccaggcttcactccatggaagtccttttggccacctctggggaaaagcatgacctgtgccacctggaaggtcagatatggatgattgacaactggcctgctgtccctaggagcttttccacctgaaacttgatagtccatgtagcatagatgcttgtacaggttactgtccttttccctcactccacagctcattgctccattcctttgttctatcctgtagtagattcccatagagaaaggcaacaacagctcaagccacagtcaaatagtaactcacttgtattgagtccttcctgatcagggacaattttctgagcacctcacatataattgtttatttcatcaccagagcaaccctgtgagctgagtgctgtcctgattcccattttccacatgaggaacctgagatgtaggaagatgtaacagtttgcccagagctttctgggccttacactctggtattccagcactggggtccggccgttacccaatgctggagtggctttgtagtcctcaagacagatgttcttgggataaactctgctcactggcgttcctggaacactttatgcatggttggatttgccttggttaaccaaaccaaaccaaatatttaaaaaatttggtgtccacgttgaaaatgtggacatttcactcagactgggatttggtagatgttaaatagttagtggctgggccagaatccaggcctccttctccactgtgacctgaggcctggtttaatttttagtggcactgccgactttgcctcacagctgtgtgtcactgtggttctgagctttgtgtcctgggatcaggagtaagaggggaaatgagttgatccagccttttcattgatgactttttatggggaaaagggccatttagaatgaacacttattaagtgtgtccagtggatttttttttttttagcttagtttaacggaacaagtttggatacctttgcctaccataatgaaatttagtaagccaaaaaaagtttacaattccttagataaattttaaaaagtgaactgggccatttaaatttgccaccacaaaacccttacaggctctaagaagggaagcaaaataatggttagtagaatatttgtgggttataactttatgtattattgttataagtttgtgtgttattaaggccagggctacgaagtattgttcactgtagaactacatagtatatgaggatcatatttcttctctagaagtctaatgtcaaaatatctttacaatttgaacaacaatattcctagcatcaaggtcaaatggaatcacttttcttatactctataaattactcagaattgtatcatgtttttatttgcttgatattttgataattgtaactttttaaggtttttagtttgtcctggaatttctaattgcctttgttttttttcttgttaggagaagaaacatatgccttcatcaatgtattagttggttctcatgttgctaataaagacatacccgagactgggtaatttgtaaagaaaggtttaattaactcacagttctgcagggctggggaggcctcagaaaacttacaatcatggtggaagggcgagcaaatatgtccttcttcatatggtggcagcaaggagaagtgctgagcaaaaggggtaaaagccccttataaaaccatcagatcttgtgagaactcactcactatcatgagaacagcaacatgagggaaactgcccccgtgattcaattacttcccaatgtgtccctcctacaacacatggaaattatgggaactataattcaagatgagatttgggtggaaacacagccaaaccatgtcaatcactatagtagtaatatcttcaagcttcttgatcattttgtctattgtatgaaatctatttcatattctcctttgttaatttgtattttattaatttggcctctatctgatgcttgttggtttatttctcaatttgtacaaaatccaagtgaggtgccttgaaaacttcaatacagggaccttagaaggaggggatgtttttcatatttaaaatgtatgtgctgccatgtctgtaataaggagcaaagtcccctgcttctgtgaagatatgtggcttttccagattattacatggtttgcagtggggagaatgttgcctgcatcgtagggacttccctctggatcaagcttgatctgagtttggagaggcaggaaccgaaggaggtaaactgaggagcaggcattctctgcctacaaggttggccctgagtggggtgcccaagggcttctgtggaactatatttatttgccactcagcaaactcaggggtaagaaagtcttgcttggggtgcctcacctgcaaggctggtcactaggaatgtcaagtccaagaggacagaacctgtgtcttcttggtcacctctggatgaacaggacctggtacttagtaagcactcagtgaatggacagatggatgatgggtgagtggatgaatggatggaaaaatgcatgtatagatggatgaatagatagattaattgatggatggagggatggatgggtagatgaatagatggatgaatggatagatgggtgggtagatgaatggatgggtgggtggatggatgaatggatggatagacagatgtataaatggatgcatggatggacggatggatggatagatggatgaatggatgggtagatggataaatgatggatggatggatggatggatggatgaatggatggatgaatggatgtgtgggtggatggatagagagatagatgaataaatatagtggcaaaggggaaggcttatttggtagagaataagtcagtccagatcacagctctgtggagattgggtttgggtcatctggtggcatttaaatgtattattggccctggaatcatgaattaaatctttagaaaaagaaaaacaagcactttctgtttctaatgtgtatatggagatcttttggacttgtgcaccccagggtattttcagctgaggcaggtgtgtatctgggcaatgactgttttgtttttatttcctgcagtgcttacttgctccttggctcacccttgcagattgctcatggctgagtctcctgggtctgatgacattgtcagtgtgactggagtgctattctaggtggatgatacacaggtccggggatggtctcctgttctctaaagacagctgtgtaataggattaaagcttcagagagcagccgtggcctaaagtatagaggaactgggttaaggggaattctatccgggtgagagaaatgaatcttttactccagcaatacagacctggttgcagctcctcaaacaggccaccctggtcacctctggactcagcacagattggcctctctgcccgtgactgtccctgtcttcctctcttgctcacccrttgcctgggcatggatgtggcttccctgggaaagcttcctgcctttggggctgttcttagtgcctggcttattccagccccaggtgttaacagtctgcctacttctcccttagctacgaaagggcaggaacttcacacagtgcgaggcacacagggggccctcagtagctgtctgcgaactgaattcagccctgcacccagcccatcacaagcatctttgttctaaggcggtccaggaggagagaaggagctgccacgtgctgatggtctcccgtgggctaggctcttgagattccatgtgtgtgttctcattcagtgctcacagcaactccaccaggattccagtttcacagccaagaaaacagaggctctgtgaggggaggcagcttggcgaggcaatcacctcatgtggggcagtgcagggttgtacacatctgtgtcccacttggatgacttgaggaatgacttgaggattacggaatgacttgagggtcccacagaacccttcttgcgaaagacccttcatctggaggctgcactggagaagggatgctggacatgttggagcctcaaagtgcagcatcttcagtttcttgaaacttctgtgcttcttgcttgggtaactgtgcttcctctgatctttgggccaacctggcccatgagagattccaaggatttgagctgtctctagggtcatggggcagcctacatcttgtgcttgatttttctccagggatatcctaggtcaggtagttagggtgatggacattggctccagagtcagcctgatgagttgtgtttttctaaattaacttttatctggcaagagtgttgcagaatcaagttttaaaaaatatttgcatatctcatttctttgtctaattagtgttgtgagaatgatgtcacagttttcatgcttgaataaatagctgatggtgtaaggcactaagggctggctcactgtggcgcgttccctttcttctatttgccgtctcgtccaagttttgtttcaatccatgctcctgacttttttttttttttttttttagggactgatctcatcagccaaattataccttttactgccataaaatgcctccttaatttagaggatatgtttgtcaatgttgcaagataattccgagcatcaaatcactagaggtgctgagagtacaaaaagtatacttggccgggtgcagtgggtcatgcctgtaatcccagcactttgggaggtcaagtcggggggatcacctgaggtgaggagtttgagaccagcctggtcaacatgaaaccccatctctactaaaattacaaaaattagcctggtgtggtatggcatgcgcctatattcccagctatttgggaggctgaggcaggagaatcacttgaacccgggaggcagaggttgcagtgagccgagatcgcaccactgcactccagcctggttgacagagtgagactctgtctcaaaaaaaaaaaaaaacatatatatatatatatgtgtgtgtgtgtgtgtgtgtgtgtgtatatatatatatatgtatatgtgtatgtgtgtatatatatgtgtatgtgtatatatatatgtgtatgtgtgtatatatatatgtgtataagtaggtatatatatgtatgtgtatatatatgtatgtatatatatactctatgcctatgctccattttaaagtggaattttaaaaagacgggggatgggggagatttaggttaaatgtgacatgaccccatttttacgtatgaccttagaaatcctctggtttattcactccagctggactaaagacatctaagcattggagggtggaacatagaaattccttcccttgaggggttttcagtcctattggaaaagcagagcgtaaacctgaaatgatttcaggtgctgatgtcagcaccctgggagcacacggaagctcgtgatcagccaaagctgacctggctgcgatgctgaagctagaattggcctgttgggcaggcacaaagaggacaggctgcattctgagaagtaattttcagaacactggagagcatagttctattcagcacctaaggtactgtccgtttctgggcttcattttaaaagagacacccaggcaaatgaagccagtctggagatgatctccaggacagtcaagggttttgacatgatgccacgctaagaattgctggagcatgtgtggatgtttagctgggaaagagactctggggaggagaggcataatagcaaatgtccaatagattggtgcagttgaaagcagctgggaaggtggtttggaccagataatgaagggatttggttgccttgctaaagattctgcagtttattctgttggcaatagggggctactggaggcttctaaggaagaagcaatgagatttactcatggttcaggagcaccttggttaaacatggagaacgcagaggaggaacaggtttagggaaggaagtgtgggtttgctgaggtgtcaggcagggtggaggctctgggaggcactgaccgaagttgggggagaaggtgacattgtgcaggaacagggagctatgagggactctggacaaagcctacatttaaaggatgagcccaagaggattatggggaatgcaagaggtgggttggagaggcaggaggacaactaggagatcatagcttcatggaagcgaagaggagggaattcaagttggaatgcgtggttggtaatcctatagaaatcatccccattttttgaacaatcctcatttgttgagtgctggacattatgctaagtgctctgtgcacatcattttctttaattcttataggaccttcacaaggtagccaataacactgatattctctagagaaggggctgaggataagagcattaggcatctaggagacagtggaggatagaatgtgggctttggtttgatataggccagctctccctggctccacctctgcctcacttggctatgtgaacttgtacaaattacttaacctctccagggcccagcttcttgttctctgaactaaatacaacatccctgtctcctgaggatgctgatgggattctgtgagcttgatatcattgtaagtaaagtcccttgcaccgtgcctgacactcaggggctcctccatagacttccgtgtggtcgtggttatttcccaacattccctagtcagtaagaggcagatctgagatctgaacccaggtccatgtgggaccatagcctgtgcctggtgctgtaacaagggaggttatgtgggacaggagtttgagtgctgtggggttgaggaatagtgttttagtgggaggaacaacaggagcacgtctgagcccagatgggaaagaggaagtgagagggagagaccgatgctgctagggagaggaagttaactgaagagaaggtcacaggtggcatgtaggatgtgacattaaacataggtggagaatgaccctgaaaccaaagcaagtattttttcctcacagacaggagggacagaaagtctgaagagaggaggagatacagaggaaatttcaagcaggtgcaagaaagttgagggtgccccagcagatgacttctgttctctgaggaatgcagagatagggtcaaggtctgaggagagggagtgggggtggggctggacacttaggaagaagaggctcaatctccacagccactgagagcgatagactgaggaggagagaggacagaagaagaaggcttgtggagactgttatacctctggtcttgagtggcgtaccttgttctaatttgtatttgtggcagtgccaggcaaggtgaagatgtggtttgtaccgggggacagaggtaggaaattagatggttgggttggcccagatttggaaattcaccaattgggttgcagaaggacaggatgtggcagtgaagtgacagcttcagggaaaactctaatcaaaaaagctcaggagatgagggtgggagaaggtgtagggagggagactgggattgggaatatgtcctccctcctgctattgttggatacccagagtgtggtttggaccttccagtgaataacatgtatgattcaccttcggatctcctgtcccagcaaatatgaggcatctgtatggaaaactctatggcaagaacggctgttgtacctcataagttctacccaaactttgacctcaagcacaatccactaaagctgggctctcaaagcccctggttccatggtcgtgtggcaggggaggccctgcccttcctcagtttgatgtcattctttcctggatgstgaaggggtataagcaaaagatttacaaggataagctctcttttgaggagccattcaaaatactttctctctctctctctttttttttaacatatttctgctagtttctattcattaatgaaggtgccagcagatcagaaggtcgaagtcttgaagaggcagccccaaacaggctggtctgagctccaaagaagagctggacccctatatgcagcggggcccagagctgcctcccacctgggtggagggagaacccttctctgtgtgtggctcagaatttgacacctttgaagctaagagggaccatcactgagacctttggggccgagcaggtgccctgtccatctcttcacctgtcccaggtcaagtaattgctgacttaaagtgtccaaagtcraacttgtcaagtttctgtactctaaagttactctttttcccccttttcatacgatcagcccacactgaagatgtgaggagttatgttccacctcctcaagggtggagtatctgcagaaattatttggaattcttttgcatgggaaatttgtcttttctccctcattatttatccaattacttctttatgtaagtatgtactcatggatatttaatttatactttgggttataatctaatactactttcttttgttgctcaaattgtttcagctttggcttttggaagctctttcaattggctctgttaccctttgacattcttctatcattgtgtgtgtgtgtgtgcatgtgagtgtgtgtgtgagtgtgtgcgtgcgtgtgtgtatgtgcatgtatacatgcggctgtatacaagatgccccaggctcatcttgtattttgtctgccctaggcccttttaataaaaggaacctttccctggttccttttattaaagaatgttttgagaaatgaagattagggtgctaggtgtttccttcgtggctgggatgttgttacttctaggcctttccagttgataagccaaggaaatatatgtgtgtaaagcaacctgtgtatataacatatctataatatatattcatttgtatctatgttaagctaaacatgagttcacactcacgtctcaactctgatccctttacagtagggtcttctagcctttctccttgcttgtctgtagcctactccaacagtgagaaatatggttgccaccatctgccatatgtttacttaattattcagttccagccttcacgtatgccggtttctgtatttttaactcatattccatgcaaacaactttatcatctagagtacagtgctgatgtacagttagttcactttgcctttagtcttactacattcggctccagagttacttagttcagcacctttatttcttactcccttcagtgaggttgcttaatacatatgtcatacagttatgttcttttatcacagtctacattccattctgagagcccctcaatgtttaaatgttttttaaagttacataccttagattttactctctgtgctgtaaagctctgtgggttttgacaaatgtgtagtttcgtgtatctcccattaaagtatcatagagagtagcttcaccacccccaaataataccctgtgctttgtctatttaatccttctccctccccatacctttggccaccccaatctgttcaccatctctatagtttttgcctttttgagaatgtcatataaatagcatcatacagcaggtagccttttcagactggcttctttcacttagtaatatacatttaagattcacctggctgggtgcagtggctcacacctgtacacccagcactttgggaggccgaagcaggtggatcacctgaggtcagtagttcgagaccagcctggcctacctggtgaaaccccatctctactaaaaatacaaaaattagctgggcgtggtggcatgcacctgtaatcccagctactcgggaggctgaggcaggagaatcacttgaacctgggaggtggaggttgcagtgagccaagatggtgccattgcactccagcctgggtgacggtaagactccatctcaaaaaaaaaaaaaaaagattcatctatgttttttcatgactggatagctcgttctttttgttgctgaatagtattccactgtatagatgtaccacagtttgtccattcatccatggaaggatatctcggttgcttccagtttttggtgattatgaataaagctgctatacacatttgtatgcaggtcttttgtgaacataagtttttaaaatcatttgggtaaatacctaggaggactattgatggattataagataagactatgtttagctttctaaaaaactgacaaactgtcttctgcagtggctgtataattttgtgttttcaccagcaattaatgagagagtgcttgccattctgggtccttgccagtaatggtattgtcagtgtttgagattttagccattcaaataggtatgtagtggcactgcattgttgtcctaatttgcatttccctgatgacaaatgatgttgagcatcatttcatgtgcatgtttgccctctgaatatatatttttggcaagtatctgttcagatctttttgcccatttttattttcagttgagttgcttgttttcttattgttagttttaagagttatttgtatgttttggatatcagtcctttgttaggtatgtgttttgcagagattttcttccaatctctggctttttattgtcttaacagtgtcatagggcagaagtttttaattttaataaagtctaatttgtttgttttttctttcatggattgtgcttttggtgctatatctaaaaattcatcacaaacccaaggccatatagattttatcctttgttttatggttttgcattttacatttaggttcttgaccaatttaagggaattttgtttaaggtgtaaggtctgtgtctatatacaaatatagtcaactcagttgattatatttatgtggggatatttctgaattctctcttctgtttcattgacttaggtgtctattctttctccaatgccttgctgtcttgattactatcatcttgaaataatctaatgtgaatccttcaactttgtcctacttcaatattgttttggcttttctaggtcttttgcatttttaaataaattttagaaccagtttgccaatatctagaaaataacttggtgggaacttgattgggattctgttagggtcccataaagtgacaccttaacaacctcgaatcctctaattcattgatatggaataccttttcatttgtatcttctttgatgttcatttttaagtctctttttctctctcttttgggtaatttatattaatgtcttttcaagctcactgaatttttcctttttcatttctattttgctgttatgcttattcagtgaacttttattttcagatactgtattttttcattctaaaatttttgcttatttcttgtttttatcttccatttctctgctaagattccctatattttcattaattagtgcatattttccttgacctcatggagtatggcaataatatgtgctttaaagcccttatctaataattccaacatctggatcatctttgggtaggcatttactgattgtcttttatcttgggaatgggttacattttcccgattctttgtaaatgagaaactttggattgtgtcttggacgttatgattgttgtgttttggagactctgaattacataatactcttctgaagaaagttgatggtttgttatagcaggcaattaacccagactcaaggcctgaccttgacctttgtcttttgtgggttcaagtctcagttcaattctttaagcctttgctacattgctttgagtttgtcccatgaatgctaatttagtggtcagcctgagattcatccagagttcatgcacagaattaggggatctacttcttctaacctttgttctctttgattgctcctcacactccagtgaccatggttgcctttgctcaattttcctggttccttcaaacagaaagacaacagattttttcacagagttttagccacttatactgaactagttttcaactgtgtcctgctttcagggcaaaaatcaggaaataacaattaaaaaaccggaaagctaccctgtgccactctctacttcaaatttggactcccctctataatctatctgcttggttctactctctagaatcctcagtagtcatttttcttattttgccctgactttatcatttttattcatgggagggttggtctgcagggggctcacactgccacaccagaagtggacgtcctccggcttttttcactgaacactgtttcttggagattttkttccaaattagcatgtagacaacatccttaattttttcccatgaatcaaacaggggatttcaatatccttaatctttttaatagtacatagtagtccactataagcagacccctcctggtgagcatttatgccgtttgcaaggttttttgttttagagacaggctgcatcaaatgtccttgtaccccatgcaatgctttgaggccttagtggataaatgtcttgggcccccagccacagtggagatttttcttggaatcctgaaaaatattcatttatttgggagtagcatggtttctttgtccttctggttgactagaggcctggaccatgtttctgagcacatcagcaggaggaaggtgtggaggagagaaagataatgaggggtgctgagtattcagaagtctcagtgattgcaccagagtgatcagctgagaggagctaggcaagtctgatacaaaaggacagtgacagccacaacaacccccatcaaatttcagtggctttatttaattgcctgtttccaaattaattttctatcagcaaataataaaaggccactttggataaaaatatagcacattaraggaaagcttcatctttttgctgccctctcctataattcctcttttgcaaataacttttcagaatcatcactgagcgccccttgttcacacaccttcggcatctccctattgtctctagggttaaaagttcccaatatttaatattgtactcaaggcctgcaagatgccaatcccaaatatccccaggtattcagtcaccttctagctgtgtgaccttaggcaagatagcatgttctctgaacctttgtcactccatccacaaaatgggaagagtcatgcttccttctcagagttgatgggcttaggtacagcacttggcaccatgtttgacgtgtagaaagtgtccagtggttgccacccataggtgtgttattgcccagacctcttgcctgacccagattctaatctgaaccttgtatttcagatgcattaaatggcctgtttccacatacagagaagcacactttgttgttggtggccattgattcatagcaatgcaatggccatattgatgttaaaaacatgtcatgttaaagttagaagacatccagacatccttytgagatttggagatgttgttttgctattttctctctttgctttttttttttttttccttttttttttgttttaaggagcaattaggatttttggtgcacatttcatctggtgtacagttttggtgcatagtccttttagtgtacagttcacctgtacaccaaaagatcctagtctcttctcagctggttggaaagcatttcccacagttgggtgctctgttcagatgggctcgctctccatggtgagatgtggtgtggtggcaccagaacatgggctttggcgatggctgttctgttggctgcccgagcccaggggacaaatacagactccatgcagcttaatgtgcacagacaactgcataaccacattaaagaagagaaatgaaagaaatacaaacctgctaattttaaccaatcctccctgagctcctgctgtgggtctggcactggatggaagatgaacacacagcctccaaaagtttgcaggatggtgggaaaggatctatacacaggcactgacacccacatatgccctgcaggagtagccaaaagagggacggataaaagccagggtggggcatgggctctcccgggtcatgatgacgtctaggggtggtttctaggatgaagaggaatttgaaaggtgaataaaggtagcagggcatggcaggtgaatgagctggcatgtggcgggccgtggaacagtgcactgcatttggggcctgggtctgatgtggtgcgctgggtagcagtgaggaggtgaggtggctggaaggggcaggtgaggtggccttagagtcttggcttcattatgtggccactgagcactgagagtcccagagggtttccagtgggattcagtgagatcagctctgagttcttggctggaggaaggcagctccttaagaagctcttgctgaacttcctgtgagagagaaggcaacactttcagggtggtatcagttgggttagtggagaggagcagagtggcttagctggagacatcagctgaccctggaaaggaaggtggttgggcatggggtgaggatgaggggaggagaggagggcaaggggagtcacatgttttacttttgatgtggctatcacctccctgcacaaatgctgattgcttctgttctggctttcccacattaaatcccaagcatctttctcatattgctaaataatcttcttaactgcgatttttaatggcaacaaaatattgagttaaaagtcttattattgacttattattctcctattattattattatttgagacagaatcttgctctgtcgcccaggctggagtgcagtggcatgatctcagctcactgtaacctccacctcccaggttcaagtgattctccttccttagcctcccaagtagcttggactacaggcacatgccatcgcacctggctaatttttgtgtttttttgaagagacagggtcttactatgttgcccacgctggtctcaaattcctgagctcaagcaatccacctgcctcggcttctccatgtgctgggattacaggcatgagtcactatgctcagcctattttcctattgttagtagatatttacattatttcaatttttgcttttatacacagggttctaatgtgcatatttggattttcctttcctttagattatttccttagggacaacctaagggtgtcaatactgtcatgactctttaatacatgtcgtcaaattgtctttcaaaagagctgtgctgatttgtaatgccaacaatagtctgtgagtgcactcttcttgctttctggcattgacaatcgccaggctgttttttctagattgaattcctgtaaatatcaacaatgactaagagacagagtgtgagcgttgtactatccttgtgctgagcactttgcgtacgtcatctcatcagccttctyaacaagcctgtgagtaaggagccgttgtaatccccaagttagacctgggaaactgaagcacagagaaattgagtcatttgctcaagatcacatggttattcagtggtgggctkgggggtggaattaaggatgcttctttggggagctctgaggaatcacccacttgtactatcttgctattttttttttttgagatggagttttgttcttgttgcccaggctagagtgcaatggcgcaatcttggctcaccacaacctctgctttccaggttcaagtgattctcctgcctcagcctcccragtagctgggattacaggcatgcaccaccacgtccagctaattttgtatttttagtagagatagggtttctccatgttggtcagtctggtcttgaatttccgacctcaggtgatctgcctgcattggcctcccaaagtgctgggattataggcgtgagccaccgtgcccagcctatcttgctatttaaatgtctgttttgggggctttggatgatgttgagtattttcctgtatgtttgatacttgttatatttcgttgtttcgtgacttttctttttgtgtcctttgtagttttctatctgctgaacagttcacaccccatccccaccccagtttggagtgccagtgcatgatagtgtaagttcaggtggtgagttcgttgggtccaggtggtggtcagcactggtctcctgccttactgatagccgtggggcatgctgatcttcccttagctgtgtctcttgactgggttactcctcgggaagttggttctttctcttcygaggaagagagagctccttgtagaattgtcctagaaatattcagaaagctcaggatgtactatcaccaatgtagtgccaggtagcaccaggtcagagcagtgtctgtaaatgatcgagggtgcttttgctccagtgtctttgtacggtggctgtttcttctctgcgtcacagtgaccacacttctgtggtactcttgtctagttgtgccctgccagaagcctggtctgaggcaggggaagaaggaggaaggcgtccttgatttcccttgctgagtgtgtgtgtatgtatctgtttttgcctctatcacatccatcacattagacaaactcatttctctcccatcaaatctgaagtaaccacctttagattaaactgacctaaagaatcaaaccatgaaatggagccatcgtgagcctgtgtttggagtgggagtgagataattatttacagagattgcttccttgttctttcactgctttcttgagccctacttttgagtgtttgtccttttcattcagtgtgaatatgagtggaggtggctggtgttttaatatgtccctgacaaagcactcatgtttcaggctggtaaagacagcatcttaagagaaaaattgtgtttgggtacacagaaagtcaaactgtggttcatagcattttgcaatataagatttcctccatattttttctttagtagatttttaaaataattattcactaatatcagcttatcttaaagcacttacatcaaacattagagaagagaataaaatattaatgagtgaaagtctttttccaccttatcttctcctgtgcaacaatttggcattcagacttctctctatgtaattatataaataattacctaacatcaggtattgactcaacacatattgtacgcatctacattgtgtctgcagttccttcctccctccctccctctctttctttctttgcttaaaaatacgtgtctctttccacaataaatctattgcatttttttttaaacagctgtgatcatacttcatagaaaacttcatcttcgcttgtattctatattcctggtagaaggctcaggttttttgggtttgttttgtataatttttttttttttgagacagagtcttggtttgtgccccaggctggagtgcagtggcgcaatctcggctcactgcaagctccgcctcccaggctcatgccattctcctgcctcagcctcccgagtagctgggactacaggcgcccgccaccacgcctggctaaatttttgtatttttagttgagacagggtttcactctgttagccaggatggtctcaatttcctgaccttgtgatccccccacctcggcctcccaaagtgctgggattacaggcgtgagccaccgcgcctggcctggtacaaatttgtattggtaaaaactagatagagaagaagttaagaaatagctataaaaagggtaagttgtttttcagcaatatttgacaaaattcagcaccaattcataattaaaactctcagataaataggaatagaagggaatttcctcaacttcataaagaacatctacaaaaaacctacaggtaacattatatttaaagataaaatactgaatactttcccccctacaactgggaacaaggcaaggatgtctgctgtcatcattcttaatcaacacagttctgggggtactagccagggaaataaggcaaggaaaggaaataagaggcataaagatcagaaaaaagacataaaactgaccctatttgcagattacatgatttcttacatagaaagcccgaggaacctacacccccacacacttacctcctagaactaataattgagtttcagaaggttgtagataaacatacaagaattaattgcatttccaaatattagcaatgaacacaagttaaaaatataattgctcaaaaaatacatataatgaactctagcaaaacatgtatagaatttgcatgctgaaaattatatgatgatgaaagaaaccaaagaagattcaaagaaatggagacacgtaccatgtttatacattggaagactccacatgataaagttgtcarttctcctcagatttaatgcaattcctatcaaaatctcagcaaggttttatgtaaatatatccagggttattctaaaatttatatgggagggcaaaagaatagataaacaattctgaaaaagaagaataaagtaggtagaatcagtctacccaatttcaagatatatagctacagaaatcaagactgtgtggtactggcaggaagatctacaagtagatcaatggagcagattaggcatcccagaaatagaaccaaaccaattgcccgttgattctttacaaaggtggaagagtgattcaatggaggaaagatggccttttccacaaacagtgctggagtaattgaacatccacacatgaaaaaacaagccttatacaagtcttacaccttatataaaaatgactcaaaaggggtcacagacttaaatgtaaaatttaaaaccataaaacttttagaaaaaaaaatagaaaccagcctgagcaacatagtgagacctcctgtctaaataaataaataaatacataaaatcatccaggtgagaatggacacacctgtggtcccagctacttgggaggagtttgcggcttcagtgagttatgatcatgccactggacttaccctgggtgacagagcaagactgtctcactaaaaaggagaaactctttgaggtatagggctagacaaagaattcttagacgtatcactaaggcatgatcctttaaagaacaaactagtaggccgggcgcggtggctcacgcctgtaatcccagcactttgggaggccgaggcgggtggatcatgaggtcaggagatcgagaccatcctggctaacaaggtgaaaccccgtctctactaaaaatacaaaaaattagccgggtgcggtggcgggcgcctgtagtcccagctactcgggaggctgaggcaggagaatggcatgaacccgggaagcggagcttgcagtgagccgagattgcgccactgcagtccgcagtccggcctgggcgacagagcgagactccatctcaaaaaaaaaaaaaaaaaaaaagaacaaactagtaagttggacttcatcaaaatactctttccctctgtgaataccttgttacaaggatgaaatgacaagtgcagactgggagaaaatatttacaaatcacatatctgacaaaggactagtatgtagaatatgttaagagctctcaaaactcaacaataaaagctgaacaatccaattataaaatgggtaaaagagattaagagctatttatctgaaaaagacatacagatggcaaataagcacatgaaaagatgtttaacatcactagctattagggaaatgtaaattaaacctacagtgagatatcactacatacctatcagaatagctcagatttataaagtgatarcgccaaatgctggtgaggatgtagaaaaacagcatcactggtacatttctggtgagatcrtcaagactttggaaaacaggttagcagtttcttataaaactaaatatgcaactgccatataactgagcaattgtactcctggggattttcccagagaaatgaaacatatttttttccacaaatacctgaaaatgaatgtttataccaactttattcataactcataactcaactggaaataacccagatatctttcaacaggtgaaaggttgaaagatgcactgtggtgcatctataccatggaacactgctcagcaatacgaaggaataaactattgatacacactgcaacctcgatgaatctctagacaattattctaagaaagtccaatcctaaaggttacatcctgcatggttacatttacataacattcctgaaatgacaaaattatggaaacggagagcagattagcggctgccaggggctaaggagtgggctggggaggcaggaaagtaggtgtggctacacacggtcaccatgagggatgcttgcggggatggagatgtcctgtggcttgactctatcaggggagtatcctgcttgtgatattgtgctaagtttgtgagctcttaccattgtgagatactggataaagggtacccgggatctctctgtattacttctccatataatttcttagacctgcatgcgaatctacaattatctcaaaataaacagcctgatttaaaaaaactgtttattttccctgcaacagatctcctgcactctttttagcagttgctgttgtatttcatggactgcctcatgtacttgggtggaggattttttttacttgttttgtgaatttttggagggtaagaatttgatcgaggaaaaggtagctgaaagctaaggagaaaaartgttttcctgtctttctttgaatacctttaaactctctgtggtcttacattgaaaagcgatgtcttgggttttgactcttgactgtgacagggcctgggggtgagaggggtccacaagctgagatgaggtctctgagctgctgtgacagcccatcaatgggcttgcactttcctgtatttaatgtccccaaatccaccttggaaataccctaacgtttttgttaactgaccatgtttgcgggtgtcacatttttttccctcttagtcctttcatggttccttttcttctctttgtcctcttcctcctcttctggctgattctcctctgacttaataatcaatagtggtatttaacacgtaataagaatcacttaagtgattatttaccactgaatgttccagagtgtgaggtgttctgggatgtaagggatgcacagaatccacagccattgtcatgataatttcttttaagggacttcagctttctaggaaaacaccgtgtgtggtttattcatattatccgttagccaacccttcattatcaagagaagcaaaggaactagagtgcataattcttttgtttgaaacgtaagcctaagaaaaatgtattcattgacaagctgtaaacagcagagaggaactacctggagtgaattcagcggttccggagtcttggttagcagccctgggtgtggggcacacacacacaagtaagcagctctgtcctgccatagtcccagttcactgtgacagatgatagtcacttaatagaaatgacaaaggtgacagccaatgttcctaaagcccataaccattgccaggttcttgctcgagagcttcctgcctgctstctcctggtttgagttccctctctggagaggaggttgagagcagaggtggttctctgaccaccaaagtccccagcttatgggactccatccctgaaaaacacccagcagaagggacccaaggtgatgttgctkcagagatggcaactcaggactcacaacttttcaagtctgggtaaatgagagacaaagcaagtccttgtgaagtgatctccatgcttttcaagcagggttgtaactttcagtccaaaaggtagtgcctgggtcaggctctttgtggggagcagtgaggaatggcagcataatgggtcttagattttcagtcatttggggcctaaagagttaaaagccacctgtttccttaggttaaacaagcaccgcctaggtttcaatgttagttctgtgttgatttccattgatttaacaacttgtcttttacatcagcttttgaaaatttcagatatgaattactgggtttccagcaaatctggaaagagcctacatattatatttatctcttcctttttatttttaacttaagtgtggctttttctttaatttctttaggttttttttttaaatttaattccaagggatcaaggaatggtaacatcataaagtaagctccatagtgaacataagttgctgcttttcctcctcttccctgtcttgttgtatttttcctcttttggtggaatgacagaaaggaacacagaaaggggagggtgctgcagcctggtgaggctccaaggcttgcccttggccttgaggaagctggctgcatccttgcttgtcagcagcactgtgcatctaagcagagtgcagacacctctccctgctggtctcccgtgagcaccaggaggcctcatctcctccagacctgccagtgggcctgaactcgtggtgatcatcatggtgcctgaagctgagtatagaacattgaaatgacattaagaggacataaaatgtgaaaggcttcactttgggctgcgtcatcattatctggcagctaataaaagctttgtcagtaccacgcaggttgctcagttctttctgtacatcatctcattcagtgcctctcaaacttgacgcttgtagaaccagctgaaatgcccaagtttgtgactcagtaggtctgggtttgggcctgataatttgcatttctcacaagttcccaggggagactgatactgctggtcctcgtttttgaggtcaaagttaatcggcctaaaacaaccctgtggagtaggtaacattatcctcatttcacaatgaagaaacaggctggaaaggtcggggtttggccacaaagctcactgttacttccaccagcatctctaagcatcattagcttatcagcagaagtagcaagtacctaagaaagttgtagaagacatccgtggcagagacccagtgagctgtggtgggtgtgatagggtttgagagtcaggcccatggaatcagtaagatctggggtggtgcctggggacgaccagccctggagggggctgttgggggtagtgtgctggtcttgcttgttatcatgagagagcggtgctagaaggagacctgggaaggggttacagaaatctgtcctgtggatcactttcttccagtcctcatgtccttgctgccagcatctcatgaccctgtttgagtggtattctgtgtgtccatggctctctttgagtggtattctgtgcctgcctggccctgtttgagtggtattctgtgtgtccatggctctctttgagtggtattctgtgcctgcctggccctgtttggtattctgtgcatgccaaggccctgtttgagtggtattatgtgggtgccgtggccctgtctgagtggtattctgtgggtgccatggccctgtttgcatggtattctgcccatgtcatgcctcttcttcccttcacgtttctttttccatattttctgtgaaaaggggacaggaacagtaaaaccatacagaagaaaaacaaataccaatttcttttagtgtttgttttgtgatgtacaattctttaggcctttgaaatgaaaaaaggaaaagtaaagaaaaagcttcccacaagtatgggaaagggagggaagccttggaagaaataggcaggctctttccagatttgtcgcctatgcgtagattcagatctgcagacccgggtataagcttggcagcaggcagggtgcaaggcaggttgcaggcgggcggcctcctcgccaaatcctgttgacatgttttgtttggcttgaatcgtatttgaaaaatattcaaattagtttaaaacgtggaaattttcataataaaaaaccccattatccagcttttgttgaagaattgggagtgctggcatcaggctgctggtgggttggtggcctcctctgtgaaaagacctggctcctaggtcatggcccctccagcatgggacaggggccctggagtgtgccactgtcccaggcctagaaagttctggacttggacttggagctgggagactggagccggtgcttcctggtctctccttttcacctgctcttggcagccatgtgtgagagagcacatcttcaccatgaggtccagggtaccttcaaaagatcggattcccagtgacatagggacacagggacccttggtcaagtgggcatttgggaagtggcgcttagtagcaatcgtgaacatgtaagggaatctctttgctgccttctaagatagtgtaaaccattcctttctttaaaaaaattataatgtgtttaaaaaatgtgtttttaaaaattattattattttacaagatccatgaaatctacgtggtgctttatagggcgtatctggctacagctggtgtacttctgggtgttttatggcaaattattctcagattaccctttaatgcaggaaggtctgcctgttgtctgagctcgctgggtcatatggaaacccctccaacttgatgcaaaacagctgcctcagtcagctgttccaaaaaaggagcattttcaagctgaagtggcaggaaaatttttgaaatgttgaattactctttccttgccattaaaatgtgatttaattttgatactaacaaattgtgtaaatctaaaatgaagtactcagaatggagtttgtttagtgtgttctggcaatacttacagtatgtcctcagtagggggtgttccccagggagggcagcacaaaatccctctgacctccgtgtcccrggacctcagcctggctgggccagggtcaggggccaacccacgggcctccctcccctctctcttctggatccctgctgagaccagcaacaaaggggtcaattgtctgaggcctccttttgtctaaggggctccatgagcctctctgaatgccaaagtgtatccatgcatgtggatgagtgtgtgtatgcacctatatatgagtgtgcatgtgtgcacatgcggtggtacacgtgtgtgcatgtatgtgtrcttgcatatgcatgcatgtatgcacatgtgaataaacacatgcacacaagcactaaaagactgcatgtgtgcgtgtgcatgtctgaatgtggacgagtgtatgtgtgtgtgcctgcatgtgtgcacacgtgtgaatgtgcatatgtgcactagtgtgcatatgtgtgtgtgcagtgtacatgtgctgtgtgtgtgtgcrtgtgtgtgcgcacacacaggcagtggtgagacttgcttaaagcgtttctgagttgctgatgcatcagagcagggcgaggggctttggaaaggcctgactagatgatggaggttcctaaggcctaggaggaaaagcatctcatctctcagcagatcacacagttgcctctacctggcatttgctatggtacagaaaccccagagactcttctacctcccctgctttctctgtaggaatgaggaagagcaggcatacatatggaagcttcttacacagctcatttgcctcattggtctgttccaacctggggtttcaagggaagacccacaagaacttttctacactgttccagcctttgttcaggccttcctcattggacccagtgtattctgtgtgacatttcagccatgtttccagaatgactgtgaaataccctgttcccatccaccctggaagtgggttcccacatagcacggaggctttcccccctccccagttgtcgtgtgcccttgcaggtcctgttcatgcagaggcctgccaggagccctggctgctgtgtcgtttggtttgagccctccctgtccactggagtttccttgattcacaccttcttccttaacaaggtgtccttttaagaatgacaataaaacatattttattcagaagccaggaaaagactcataaaaacacttcattgaaattcacctttgtgaaagattcatctcccagccccctttaaccagcacagctgtcatgaacaactttttctgtgttttttttttttcttcttgtccctcccaccccatttcctctccctactccagcaagggcttatctttcaactgtggaaaagccaccaattaaactgtactccaaagcttatcaaaatattcagtcagtaaaattatcttataattagcctcactgtaagccagaacgttttaatcccaggaaatgtaaagttatccggcatgtgaaatctgtaaattgctcatcctgaccttctgtctacagtttctacttttatttctttcccaaagtaatttcttccttgttcttcaaattcttgattgtctctgaggcatcttcctcttctgtttgcttaagtttcaaagaaaatttactcctagttgagatagagaattgaaaaattcaggtgattgtgatgtgcaatcaacctgattttatatatttcataccttcactttgaactgttctttttgcaaacgtaagtctctgattgctgatggcttgccctcgttggtcctgtactttggatgcctgcagtggtatgcatggctgaattattctggaaccaagctattcaaacagtatctgggggattctgcaggaygtcgagctgggcagtggcgttggactttttaatttcaaccatttctcttctcatagctctccctcccctttcaccctcccacagcctggggatcctcctatcatcttgcaccacctgggacagcaccatgaatgttacttccccaccccatcctatttggaccaacatcaagggaaccataagtgatgtttggggatcttaagcytaaggtgcaacttagactttggctacagaaatgatattcagatgatgcttaggtttgttgttgttgttgtttgttgttgttgttgtttttgayggagtctyactctgtcacccaggctggagtgcggtggcgcaatctcrgctcactgcaagctccacctccccaggttcaatcgattctcctgcctcagcctcctgagtagcygggattacaggtgcccgccaccgcacctggctaattttttgtattttagtagaaatggggtttcaccatcttggccaggctggtcttgatctcctgacctcgtgaatgggctagtgaaacttacataggcatgtttgacctggtcatcacttgttgtatgatgaaatattttcaaagttcccagaactcattgaaaaattaaattttggaatgtactaacatttcaataaatggagtattgcctgtatatagtgctattagtggtagttattatttatagaatttttcctrtcacacaataggcacacgcatacacacacagagataagaacacacaaatacataaaaattgcttcatccttacattaattctgtgagaaagtaataaatttgcccattttacagttgggaaaattaaggctctgacagtttcaataacttgctgatgcagctgaacttgactggctggcctgacccttgtaatcccttctgtgaactagccagggcccctgtcatatgatttgacccccacttatgcctgagagatttcctcatcatccctgcagagtaaagaggaaatcacagcttcacctcaacctccacttgttgctgtgcccagcaattgcatgcaccatatcttgatgtcacacatgaatttcaggctyratttatttgctgacctcagagctcagagctgaggcttgccygccttgagcttatgggatcagtgtgaaggctgtgatgatccgcatagggagactctggcccaggtggcctgggctccacttggtgctcctagggtaggagatagaggggggaccagctcccaggatcccaccatgtgtgggcgtgttctcctaatgccaaccttggaatcagctacatgcgtgttctcctaatgccaaccttggaatcagctacatgctgcaatcccatcctttcacaactgtgtcttggagctaaaagacccctattttggaagccattcctattgagagacacctcctgtctaatccacaactraatattttacgcctctgtaagactctttcaaaatacaaattatctgtaagagctaagttgaaactaaatatctgtcattaaaatgtgttatttttgaagcattagctgtagggcattttagaaaatctttaaaacgtaattggccgtatcaagttaattttcttgtgtgaattctgcatactcttgatattacttaatttgtttttctctctttttaattacagcttgggttgaygatagccattcgctatagccacaggtaaatgtttacatttttgtttcttttaagaattatccttaccagtttatagctcttggtttgcttatgtctcagattttgagcttttttttggtggttgctttcctgtgatgtccgtgtcgcagatggaattgttctagttgcttgattggcaagagcacattgctatttagaggaacgaggtctttgtgaaaacatggtggtagatagcacatttatttcaaaacaaacaaaaaaagggatattctagggcatgacacagaagcactatctgggtaatgttctcactcttaaagagtscctgaaaacggggatgccctgcatgagaggtgagtcccagcagagagaaacccagcaagggcttgtctgtgaagcccttgccaccttccatgccaggcctctctctctgtgtcttaggatgcctgacagtggcaaaaagccctatttttgtcttgcttcatgatttctgtcttggtctctactgtattacacttgtgaaaaatgtttgtttcttgtgttgatatcaacattttcccctttgcatgtgtcaaaatgcgttgagatgttaaagtaagatccagctccagtggaggggtaataagcagtcctgtccttacaraaactgtgctcacagcctcccaaagtgccaccctgtggtcataggcttcgggcttggggatgtctgctcagctgcccacagacaacctaaagtcacctgatttcraaagaagtttgcctcctaaaaatgctcataacaagtgtatacatggtttcaatatacacgtgaattgggcaatcataggcaatacctgagagctagaaagctgggggggagccatgtaggttacagcaggaagagggcaggagaggactcaagcccttggaatgagcctgtgggaagaaaggttctcatgtgggacatttctggagacctatgaaagaaactgctccagagaggctcaagatcatggaggggaaagaaatacattttcctrgcccattgctaggtgcatggctgagtctccatacaaaagacagattaactagagaaagcatgcacatttatttaatataagttttatataacatgggagctctcacaaggaaataaagacccaaagtaacagagaaacctgtatgtttttaatgttagtttgatggagaagtgcacagttgtagagatggataattggacaaagagggtatgatctaatggtgataaactgggtgggggattggggacttaacaaacttagcctgtttgttcagattctgtggtcctgtgtcttcagagataagtatgtttcttttctctgggtatatggaggctacctctcaaatgagaattttatggcctgtatcaggggcggaggggaaggggaaggtgagagtgaccttcctgcttctgctgttttctcaaatgccaaggtgccgttttttagtgtattgtgtcctgaaccccatcaattgtttgtatgtttccggtcctatgagtgcatgatgcatgcccacgacaaaagtgtggtgtcctgcagacgggtgctcttcccttgtaaccccagccaggctgctgcagctgctgaggcacacagctatggcacacttaggaagaagcatggtgcgcacacggacccctaaccctaaaaccaactgtgtggtatggtggggtgcggtgggtatggaagtgctctctccagaacttgcaggagcctctttttctagaatgttctcaaggtggactgctccagaatgaggacagctaagatcttgctctagttcagtgacaagcttgcccttccccatgatgtctcactatgttgcaagggctggttttgaactcctagactcaagcagtgcttctgccttggcctcccaaattgctgggattacaggagtgagccaccatgcctggccaatgtaggcttctaagaggaaggaaatcttaaaccatcctcattcctccaaactgtgaaagtggcagggaagcccagctgactcaggcagatgccccwggtaggctgataacatgggtctctcagaacaaatagtctttaaattgctgtctggcattgctgtggaggagaggcagagtttggggagagtgtggaggtgtggggtggatcctggcggcttcagattgcttctgtagttctactagttcagccttgaccccaaacttagaacctactcctcaaacaagccctgcagagagttggacaaaatgcaaggaggaagttagcagctgtctgttgtacatgarcttgcctctttaggctccagcccccacgttctgtgctctgctctccccaggagacatcctagcacatgtggtttccccctgctgtgtttccagagatgtttgtctccaggctgtccttataacctttaaggtgttaagtgcagagcaattaacaaatatcatggatatttacataagtgcaacaataaacaaacaaaaatctcagtaagtgggagaagtgacaactgaaagtgataagattgagggaaggaaagtgaagacatctcctgaggctgccttgcaaggtccaaggtccttcaccatcgaccttgggatctggggaccagggagcgagtggtagcccagtgaagccggtattcacaaaaggctgcctgcagcagctggtgtcatctgtagaggagtctgaagactttgggagcagaaagaatggttagaaagtgattgcagtaactcagagacagcatgagggctttctaggcttggctgggcctctcacaaaatatgaatgtctgattcacacaagccaagctgggaagacttaccgaggagcatgtgacctgctcacggactgacatcttcaatactgtggaaacggagaagggatgatcaaagggttgtgttttccaaaaattacttctgaaatctaaggaattctgattttaacattctggaaagtacaacaacatttgtaaatttgtggtggggacaaacctaccttctgggaaatccccattttcccagaattgatgacacttcacgaggtgtctctgaagagctgtttgcaggtcagggcttttcttcccctcggccacaggaggacctgatcttttctcttagaagcctgcaggtcaccctttgactcttctttttttttcttttcttttctttttttttttttttgagacagagtcttgctctgtcatccaggctggaatgcagtggcatgakcttggctcactgtaacctctgccacctaggttcaagcaattctcatacctcagcctcccgaatagctgggattacaggcacctgccatcacgcccagctaattttttatttttagtagagacagggtttcaccatgttggccaggctggtctcgaactcctgacctcaagggatccgcccacttttgcctcccaaagtgctgggattacaggtgtgagccaccacgcccggccaccgtgactcttctgctccctcttacacctagcctggccacctacctctcccctcatccagcaggaggaagatgagggatgtaggtttctggttgagttccctctttaaaaatcctatttgcttgtttggattggctgaaacttctatcctttagtcgattacttttttcctgtgtgktgaaatatgcctaacataaaatcagccatttgttttagtctgtttgtgctgctataacaaaataccatagactgggtactttataaagaacagaaatttattttctcacagtcctgggagggccaagatgaaggcgccagcaggttcagttgtctggtgagggcctggtctctgcttccaagatggtgccttgttgctgcagccatgggcagggaggagtgctgtgttgtcacgtggcagaagggagaggagcaagaggggaaggcttcatgaagcctctttataagggtcttcttctcattcgtgagggaggagccctcatggcttaatcaccttttaaaggccccacctcttaatatcatcacgttggccattaagtttcaacacctgaatttttgagggaacacatgcaaaccctagcaccattttaaccatttttaagtgtatagtttagtggcattaaatacattcccactgctgtgcaatcaacaccactgtccatctccagagcgttttcaacattgcaaactgtaactccatacccattaaacaatacatttccttcctcaactcctcttcacttcctgacaaccaccattttactttttgtctctataaatttgactattctagggactttatattagtggaataatacagcatttgccttttcgtgactaccttatttaacttagcataattcttcaagattcatgcatattgtagaatgtaccagaatttcattcccttctgtgggataatattccatagcatgtataggccacgttctgtttctccattcatccatcagtagacacttgggtcgcttccacctcttcgccactgtgaataatgctgctatgaatttggatgtacaaatatctctttgacaccctgctttcaattcttttgggtacatgcccagaagtggaattcctgaatcctatggtaactctaagtttaagtttttgaggaggggccatactgttttcctatcgattaccattttccttgtcatgttgaccccaaacccagatgccagagttgagggaaggggtcctctttgtgtgggtagggatacctttggcatcaagatttgagactttagattctaaatctaagaccagatttggaatytggaagcagatcagatctgcttccaaaattctaacatgggcgtcaggaccaagagagatggtggggaaagccccagcagactcctttagtagacagaagaggggatgaaggaaagggggacaggaaaacgtggttccaaaatgacaatactgggaggatgggttcactcttgaagaagaatggatttggggaccttaaaggcgatgaatgtgcagaggagggaaagaagtcactaaaatcctgtacccttggccagccagcagtgcctctcaggctgctgcagacacagagggggcaggattgcctcagagccggaggggctcttgtgtggcaacagaggacttgaggcccaaaggaggcctgattttgtttgcrtgcatatgcagtggtgcttcagctgttagctctcctttattcaaatgaacagcgttcagggtgagaccatcctcccgcatgtgagcatgcaagtatgcatacacgcacacacacacacacacacacacacacacacacacacagtgtaacacatgcccaccccaaccacttccactgctgaccccagacacctctaactcttgctagaccagttattccagatctgtctgtggtatagaggggtgtgtgtgtgttggggggggtgtatgtgtttgtgtgtgtcttcatatgagcatgtgggtagggagctgaggggtcaggaagcagagaaagaatcatcatatttcgatggtgtaaatgtaccaagcaaggagagcctctgccatgactgcctgcgcgcttaacaacaggtcctgctcatgtttcgtttattatcatggcgctttaatttatttttgtaaagtcaagccattttcacagagtggaaaattgtctcttgatgttcattccccactgtttggcttgaggtttttgggtggaatccacacagtggtgacagctgggtaacccccagaagtgccctttgcagataacagctctcggggccccatcacccacacagtggggaacaatttccccactgtgtgggtgttttgtttttttctctttctgcaagattgaaagagagtttagatgttcttcctgcctgacgcagtgcagcagagtgaagaaggctgctccctcctggtgagtgcccctgggccaagataaaagaggaaacaggctcagaggtgagcatcacccctttggctctcacttgtctgatactggagagaacacgtgaactaatgcgtggaatctgtgcacatgtcacttatgcttgtatttctaagaagagctcgtgaaagtggaggatgagagcagtgaactaattcctaacacaacgattttgctttgttttttcattagttatgtttctttaataaacgaagaaggaagcaaattttccatttggttctgtgatagttaaatggaggtccacagagttgtgactcttaagcaaagtctaaatgcagttctttcccacaactgacttctttctattggcttctcacctaagaaaggctaaatctggyatcctgttcaggcctgtgcccaaacctaatatgggagttatagtcacyggccccgtaagaggccctggcacccctcgagggctggacggggaaagagagagttggggaacctgcgtgtgatcgaactgctcacagtgtgaccgtcctgagctagactattggaggcctgcctttacaacaaagtacagacccggggtgattaagcactcattctgagactgtgctcgtgtttttgtttagaatgagcccagatggcctagaagaagtgaaggggttgtgtacttttgtgttctgatttagattagaagcagagtttgaagttcatagatgaatcagaatgcttattgaatgaaaaagcagcatcaatgagcaaatgaaattgccatcttgaaatacaaaagggaggaaaagaccagaaccacagccatcaggcctattggattttgatttcaagtgttggcaaatacctagcaactcccatttggggctggtttgatcttgtggagacagctgaggagaccgttttcctccaaattttgtaaaaataaacaaaaatgcctttctgcccttttttccccttccagggaatagttgtttctgtcactgaggctctctggtagactgttccatctgtctctttttcagacttcacagtgaggctccaaccagatatacacagggttgccaagaaattattcaaccccaatggtataatcttaaaacaaagccatcttttggatggttgcgtttttgatggccttaacacaaaatattgcccctaaatggcagcctatgaatattcacggagtgcccaagtcatatgcttttccttagtgagactcttgagggccgagggtggttgtcagcatctcatggcagagcgtggcatggggctgtggatttgctaggagaagggtaaatgcccttcggggtccagaggttaatgtagcagatggatgtgtcttttctgtgcctctcctatacccctttagtcccctgtctcctttgggttggtggccttgtgcttttggtgccttctgctctgaccacgtgaccatttcccagtcaaacctgctcatgacatgtatgctgccacacctacacagtggtctccggggagccttctgcctgctgaccagtgaccagaggatctttcgcaaacacagatctgaccacgcccctcccactaagaaggccccttgggcttccccgtgtagacagcagaatcctgacctttagcacgggattcagacctcactcctcacrctgctgtctcctcacgctgagcttcctgccacatccaccccttgcttttgctatttcccatggaggattaacttcccttgtctctcgcygaccagtgaactcaccctccaacagcccccctttatcgtctccttttcagatctatcaaggaaccatgctccatgctcttttctgttgttgggtctcagggcagcttctcaggtcagagcctagctctatttcttctccttcctgtctgcctcaggcaacaggtgggaaaggcaggcggcatccctgttccctccacaagtgcccctctatgtccttacagccaaggccatttaacaaagccctactgtgtccacaggtctgggaggaactggttagtctttcttgaatgatatccccctggaaaatgacccctcccttactttcaaagactaagacatccacatgaaattgatcaggagattcaacacagctcaaattaaaatcccagtaagattttgtgtagaaattggcaagataattcaaaaaattttatggaaaggcaaaagacctaggctgcgtgccgtggttcacgcctgtaatcccagcactttgggaggctgaggcaggtggatcacctgaggtcgggagttcgagaccagcctggccaacatggtgaaaccttgtctctactaaaagtacaaaaattagccaggcgtggtggcacgtgcttgtaatcccagctactcaagaggctgaggcaggagaattgcttgaacccgggaggtggaggttgcagtgagccgcgattgcactactgcactccagactgggtgacagagtgagaaaaamaaacaaacaaacaaacaaacaaacaaaaaacagaactagaccagccaagcaattttgaaaaagaacagagttggaagacttccagtacctcattttcagaatcgctgtaaagctgcagtaatcaagagcagactataggacatgtaggcaaaaggacagacttgtagtccaatgggacataggaagaagtcaggagcagaccccacatgaatgatcaatggattttcaacaaaggcgccaaaatgattcagtggagaaaggataatcttttaaataaatggagcaattggacatccatataaaaattcaaaaaccaagaaaaacccataccacataccttgtagcatgtacaagcaacaaagatggatcatgaacctaaatgtaaagcctaaaaccgtaaaccttctggaagaaaacatagaagaaaatctttgtggtcttggcttagagaaaactttcttcagacacagaaagtatgaactgtcaaggaaaaagttggcaaaaatggattttatcaaaattaaaaacagctgctctttgaaaaacactgcaaagaaataaaaagacaagccacacatggggacaaaatatttgtaaaacacatatctgataaagaagttgtatccagagtatgtagaactcttacagccccttcacaagaaaatgaaacaactcaatgtaataaatgggcaaaaaatactcgaactgattattcaccaaacaagatgcatagatggcaaataagaccatgaagggatgctcaccctcattagtcawtaaggaaatgcaaattaaggtagaatgagataccattacatatatgttaggatggcttaaaacttcaataccatcaaattgaccctcatcaaaacttcccaacacaaacacaaacaaaaaaaccacgctgataatatgaagtgatgatgaggatgtggagaaactgcaactctgatacattgctggtggaaggcgaaatggtacggccactttggaaaaacactttggaagtttcttatgatgttaaacatacctttaccatagacccagagattacactcccggatacttaaaggagagaaatgaaaacgttagtgcacaccaagacgtgtatgcatggcttctccattcataatagcctcaaactgaagacaattccaaatgtccttccattgggaagtgggtaaacagactgtgtcacttccatacagtgagatactactcagcaataaaaagacattctgctgagtggaaaaagccagactcaaaagtgcccttactgtgtgattctttttgcatgacattctggaaaagagcaaactatagggaagaaagcagacccgtactcaccaggtgggtggaggagttgactagaaagcaaagtgagggatttttgggggttgacggacagattctaaatcttgattgtggtggtgacacgactgtatatattttccaaaattcatagtactgtgacacctaaatcaggtgaattttattgtaattaaattatgctcagtgaacttgaattaaagagagttaagataggggagtctctggatcacttttttgaggtgagaacactgtgtctgaggccgtgttgacactttttccaagtgcttctgggtatggtttgagggggttctttatgtggaattacttgttttacgtgcccagggtgaggcctttgagttcacattgagccacattgtcattttcaatgaaggcaggttgcaagctgtgtgactgcactcagtttagcccattcctctttctaaggcgttccacgacaacacaggtgcagtcaggtcttccatcagctctggacgccctagactgtgtggtgcttcagtgaggccctcgtggtggggtggtgcagcccgaggcaccaccttgtttttcactgcaaggtggctgcagagcagaaccagtgctctggtctgtggtcctgagagccctcagggcgctgggatgacatccctccgtgaaatacaggtgcctgaggccatgttcctgaaggcattgctcatctcaaccacctggaaaactctctggtccgcgggcctctcccagagatccgggaaatggggggcagctgtttccagacctcaccagtgagaaaggcgctccatgttctgtcctggccgcagaggtgaacatagccggggtcactccagctcccactgggttgaatgtcgctgagtgcagggcagagagcaggacggagagagaatgagcttggaggaagcccccagcatatttcctggattactgagaggagctgcccttctkccagggccaggggaggccagctctgtcagtgggagacccctatggacgactgtccaggctggtgtttgtgacaggtctgctgggtgtggggaggcacagggttaactactgcagggctagagcccattgctgacttctrtatattcccttgactggcaccgtgtcgccctggcctggtggatcgcttgacagtaagcctgaggctggtgcctacccatttcatggcgtggtggaggggggctaccaaggtcttgctcgtatttctgttgagagggacaccggggagctctctggtcaggctgcgcgtgggggccctggctcccyggctcatattctgtggcctgacctgcaagcccagcttcaggctctcgacttcctcctgaagggcgtttctcaagtttgaatgaacggcttaaattggcaagacgtaatccagggctctgttaaactagccacagagagttctaaatctgcctccctcagtcaccaagatgctgcatttataggcaatttttgctgtatgaatcacattttggcctcttatgtggctcaaactacttacaaatcaagaacattctatagcctctacatcacatgggggactgggcctgtaggggtgctgggacatcccctggaggggcagcacaaaccctgttcgctgtggccaatgcagaaggagttgtgatgaggcagcttttttttctttttcctgaggtggtttgtcactcagattctgcttcctgttgaggttggtagagcctcaagtgccatgcagagaagtccacctataaactgccattccctggtctttcatgaggcagacttgactgctcgtccaagtgctctattctgttgtataaggcaatctccaccctcattagagcccatggtgggtgaagatggtatgtgggtgcttggagcggaaggagagtcacatttatacactcacatgtcagcagccgtgggtccatacaatgttcctcctccagagaacaagcttctttgtctgcatcccctccactgccagcatgtgctgggtccagagtgccgggcctcgggcggggtggtccatcttggtggctgtttacttaatctcctcctcctatacctgtggttctaaactatggtgattttgcctccagagacattcagtgacatttttggttgtccaaacttggggaggttactactgactgkcagctacggtggagaggccagggatgctgttaaccatcccaaaatgcttggttcggctgctcacaacaaagaattatctggcccaaaatgggaaaagtgcctgggtagagaaactgccctcgactgagagctcctgacggtaagcacagtgttgattcctctttccatcttcagagcctggcaggtatcatgtgctcagttggcataggctgaatcaaatctgtgattaaaaggctcacatgcatgttggtttttgtgttgataaaatactttcaatattccgtgataatttttgttctatttgtttgtttgtttgtctaagcatagaaattaaatcagctttcaattagtcatactaatgggtgggagagaagagtagtccctccaaaacggaagatcccccagaatccacttttacggttgtctgtgcaatgatacagagacacaaatgcacagtaggactcactgttgccctctagagccagcccgaggccctttcttgtttggtttacaggcatgggggaaggccctgccttgttgataatctacaaagtgcaacagataattggaaaggaactaattattttaccttgactgtactattccccatcttcctctctcctctccttttttttaatcttaaaaggaaaacgaagtgaaatctaggacacttgtttttttttttttttaatttcaattgaatatagattaatttgttcattcaacagatacttactgagcttcttccatggactaaatgagggtaaaagcacaccatgtctgcctttggtgaccctggtgggagtactatcacaacctaagggtgataaaggaagcactcgatgctccaaggcatgtgtgtgcatgtctgtgtgcgtgtgcatgtgtgtgtgtgtctgtttgcatgtgtggggagggtgtgccctgcccttcaggctgtgcagcatgggctggcagcaacttctgaggggaagaagagagggggaagaagagatttgcaggcacacagtgggtagaggatatgattagcattgttggtacaatttccaggcatcttctgcctgtacctctttgtgatcgtccaggcagaacctaccacatctccatgaaggaggcaggatgtggaggttccacaccaggtggacttggggattcaaactcaggcctctgactcccagcagaagacttttccccraagtgtgtcaccaacaccacccagggtgctgggatggttccctagggctcagagccttgattcagccccagcccccaaggagggtgtttgtttgctctccaccagcagggggataaagtgctgtttggagagtgtcagggctggaagggcaggccatgctcatggaaaatttccctatttaagtaatgactgagtaggtttatggaagagcattaaggagacttcaggtgcagggatgatgtggcagaggccattgagggccaccacctggcagagatctggaaagctcttgcttaacccaagggagaggtggcccttctcaagcagagggaccagtttctattttctcccttgaaaacaagaaggagacagtggcccctgtcctctggcatggggtcaaggatgcagagattactgctctgctcagcctagcaccccacctccaccttccctggaatctgtcccacctgatggccagcagatggccctggggaggaagctaccaactcttgctttaagaaactgtcccagttgagagaattgacctaccccatgggacttgtcttgtttgaaaggaaacctttgagagtcttcttttaaatcacatgtcttctgtgatgagtgtaggtaggaaaaaaggaaacattaggtgttggaggcaaaactgctcatatggaggaaaatcgtttcatcttttatacttcttacatcttttttgtatacctgaaagcaagtgtagaagaaaaaaactgattctgccagttggcaacagttattcctgaccttaaaactagtcttgatgtggaggagacatcagtgtgcaatgctatagatgacatattgcttaaacgcttcctcatttaactgtcatagcccctaaaatgggtgttactaattttgttttagagataagggcactaatgctcagagaggttgaggagtttgtccgaggccacatagccattcaataaagactgtgttctttctagtgtattaggaatctctgctgacctgggcagagctgtgaatatgagatacgatttgagaaaatgcaccaaacaaatcaaaaagcaactttacaggagaagatacaaggatgtacctgattgcttgtcaaagaaataaaaatatatgatatgtactgtgaaatgcagtaatttccctttacccaatgcttcactttctgtggtttcagttacctgtggtcaattttgttctgaaaatattaaatggaaaatttcagaaacaatttattagttttaaattgtgtgccatcctgagtaatgttgtgtccggagttggtttctgctggtgggtttgtggtctctctgacttcaagaatgaagccgcggaccttcgcagtgagtgttacagctcttaaagatggcttggacccaaagagtgagcagtagcaaggtttattgtgaagagcaaaaggacaaagtttccacagggtggaaggggaccccagcgggttgccgctgctggctggggtggccagcttttattcccttatttgacctctctgatgttctgtttctgtcctatcagaatgcccttttttcaatcctccctgtgattggctacttttaggattctgctgattggtgcattttacagagcgttgattggcgcattttacaaagcactgattggtgcattttacaatcctcttgctagctacagagcgctgattggtgcattttacaatccgagctacagagtgctaattggtgcattttacaatcctctcctaagacagaaaagttctccaagtccccactcgacccaggaaatccagctggcttcacctctcaatatgatgaaatctgaagccatcctgctccatcccatcctgaatggaatcctccccttgtccaggttacccacccgttagtcacttagtagctgtctcagtgatcagatggcttgtcatggtgtcacagtgcttgtgtttaagtcatctttatttgacttcatatgtccccaaaacacaagagtcgtgatgctggcaattgggatatgccaaagagaagccataaagtgtttcctttaggtaaaaaagtgaaagttctcgacttcataagaaaagaaaagcaatcatatgctgcggttgctaagatctacagaaagaaggagtcttctacctgtgaaattgtgaagaaggaaaaagaaatttgtgctagttttgctgtcacacctcaaattgtaaaaggtacagccacaggggtgataagcacttaattaagatggaaattaaatttgtgggtggaagacatggacaggaatatgtctggttggcagtggggttcagtactctccctggttttaaacatttagtggagttttggaatgtatccccggtacagaagggggacctactgtaaaagccagaagaccctgtgtgcaaagagaatatacaatgtaaatcccaactcttgtatgggattccaaggacattgatttttctaagactcagatgatgctgttaagactctctgacaattctttgtgctttggagtcttattcattcttcattcatcaaacagttatttcgtatcaggtaggatgcctttagctatgaccctggcttaactattttagataggaagtggattgttttctctcttaatgattcctgaagtggggcagtttcagggtggttatttcaggggctccgtgacacctcaaggaccagastggctttgatctttcttctctgcaactcaacatgtcagttttgtctttgaccractcactcatggtcacaatatggctgctgaggttcttgctctcacatatagatgtagaagattgagaaaagggggacccgtgttttcccatatgtcattttttagcagcatggaaactttttttccggaaacccttcaagagactttccttcatctctcattggccagataaacccatccgtccattcctaaggccatcaaaggcaagaagcattggggtgactgtgattgggttagttagtggctccrtagagaagagtaggttacatgagcagacttaggactttattaccaaggatgggaggaagagggkttgggccaacaactggaaatcttgctacacgtttaaaaaatatttttattatggaaaattttaaacacgagggagagtagcatagtggattccctattatttgtctcttagtttctacaattatcaacattttgacagttttagttcaccctatcctcccttttatctctggctagagtattttatttatttatttatttttaacatagtttttgttgattaattgattgattgattgattgagacagggcctggctctgttgcccaggctggagttcggtggcctgatctcggctcactgcaacctctgcttcccaggctcaagccatcctctcacctcagcctcccgagcagatggaagcataggcgtgtaccaccacgcccagctcatttttgtattttttgtagagacaggattttgccatgttgcccaggctggtcttgaactcctggcctcaagcaatccacccacctcggcctcccaaagtgctgggattacagatgtgagccactgtgcctggatgctggctagggtaccttaaagtgcatctcagatatatatcattttttaggtgctctggacatatatcgagtacctgctatctgcctagttacagccaaagaagatatctgtttcggggacaagaaattagtgaaaactcactggtattagctactttttgctgcaaaagacaaaattccctgaaacaaaggaaaaaggcaatatccaggaaatggagttttctccaaagcttttgtttgttctggctgcatctgacatcctttcgatgttagagaacaggtgtcctgggaagtccgggtggggaacaggggatccttcctacyccccgagacagacgtggagctgagtggaagttccgcatctcgtttgtcatttcccttctcacgctgatgaggccaatgctttctaagagtgggttttggttgggtgacacttgtttctgcatgttaatagatttctggggtaagataaagctcggtgatgtcacctgcaggtgtgtgagcctgtggtagcagtctgctgcctgacatttgcttcayaaggcgttgctagccacatctgtcctcagctgtgagagtgtctgtatgcaccarcaggctgaacagagagatgtttgtaaccagaacagagagtcagatgtaacaagctgactctgggctgcgttgcaaacacatgtactttccctatggcgttagctgattygatttagttatggaacaaaatacaaatgttatttctttaaaatatcacggtgccaggcagagtatatttccttacacctttttctgagtttcttaagcccacctgttttattacaggtttaaaagacccctcttcctctgtgtgtctcaaacaggaagcctgccttctcattttccttcagttttgaaatatttaatcctttgaagagagtttgcatgcttcgtgcgaggcggtacctttgtatataacacaataaaattcgccactcatctacatgcgtttctccatttctatatgacaattaaaggtcaaatygcaaagttgaatcagttatagctctgcgtttaggatacgttcaacctgagctgattttatctgcctgggcttygtaaaatgttagtatttgcatagtgagtttaaaaacagaaaccttttgcataaccatatttgaaaaatccaaaacaaagagaaagagaatggactgatgatatgaaaagatgccatttgaccggacgctgtgtagtctgggtggcttttgtggcagttgtgctgcttctgagcgtagctttctagagtgtgcgagtggtggctagatgtgctttgtttcrtgtgctgtgcatttcagtgctatgtgaggatccatctgaccccaatacattttatttgacatgcacagctgggttgctggaggatagttcaggccattaacaagaaggcaaaagaaaacacagacaatctattcatcagaacactatgaaagggagacttattggggcaagctctggcaagagcacacctggaggaaggagaaggaggaaaaccaactgggtgcctagggagaagggcrgaggaaatgcagctgctgttgacggcagccggctgcatggagaggggctttgccagtggtgaaacccgattccatttccaacttgtggaatcgtattttaggatgctctgcaaacaagagggttggatggcagacataaggtcttatttgctgaggggtctttgctcaccaggcgcttggcaccccagcaggaccccaggctaaggagtgtgatgctcaccttgcatctgagggtggcaaccaagttcctggcctgtgggatcaatgctaggactccccaggcatccctcagactcaccgaagagggaagagaggaggcggcttctagaatccttggaaagccatttccttgcccttcttcagccacagagatgccccagtaacctcagcccggttctcacaacctgcctactcccaaccctgtctttcccttcctgcttcctatctgtgactttgcagcactggtttcacattttgtgcttttatccagtataagatttccatttgtgtgtgctgtggggttgtcrcctaaatagcctttttgtttttgttttgaggtggagtcttgctctgttgcccaggctggagtgcaatggtgccatctcagctcactgcaacctctacctcctgggatcaagcaattctcctgcctcagcctcccaagtagctgggactacaggcacctgccaccacacctggttaacttttgtatttttagtagagacgaggtttcaccatgttggccaggctggtcttgaactcccgacctcmagtgatccattcgccttggcctcccaaagtgctgggattacaggattacaggcatgagccaccgcgcccagccttgaatagccattttctaatcctgtgtagagacccaggaaaaggctccaccgcagctgcagtaagaggctggggtgtctgtgcatcaccttggtcatttggaccttttcggagtggccactctgagcctggcctgggctgagacattgcttgctgtccccaacttgcttactggtcttcgggaaaagatcagtgtgtgtacttaattcaccacgatgaatcttggtgcagaagatggagtgcctggggtacccaagagccttcctttctggccagaactctatccagatcttcagtgcagagaccaggagctttggagagagagactcgagttcatgtctaggtgatctgctgcaagtcaagcacatgtgtagaagagcactcaggaagtggcagccgggcttatctgcatctggggaccacagagggagctggttgtttaacacggccccctgttatccactggttcccctgttctcacagatcggagtcctgctggaagcgagtgttactctattgagctgaagtccacaataaatcctacaagagcttctaggagtaacaaggcatacgcctgtaatcccagctactcgagaggctgaggcatgagaagagctgaggcacgagagtcacctgaaccctggaggcggaggttgcagtgagtcgagatcatgccactgcactcctgcctgggcaacagagtgagaccctatctcaacaacaacatcaacaataacaacggttttatttcagtattgatttttacagaatcctgactcccaaatcaaaccagtttccacactcatcaggcattttcagaaacctctgactttctttttgcttgattataaagctcaatgtaaattctacatcattaaaaaaaataccaaaacaacaaaatcttgacaaataccacttgacaagactgacttacagacaaccagtactaaaaacccaaaccactggaaatgcatatggcttttccyggtgggacagaaaattcaggtgcccatttagttaactgagctctgggaaggcctgaatgaacactgctccctggctgctttcagggctttatttgtcctattccccccacttcccctcacataggttctgcttcttgacctggaacggagaaactcaaaatctaaccccggctatgttgttaaatggtgaacctttaaattcacacagggtagttgatgggaatttcaaaacacggggttaaattctgctcctacaaagatggaacaaaagctctctgtcttttggaggtcgctaatccggtgtttgcaccttattgtcactacgtaatgtctgaaaaacttggaattatttccaattagtgggtttcagtggatcttgctctctgagctgttgaccccttgtgtttgtttagcaggattttctcaccgggctgcaccttgcccagcattgttttgctgtcaaagcctctgaacggctccgggtgacccccgcagaattgtccatgtagtgtcgtgagactgggggagctgttgtgaattttgtgatgacagatggcggaagcataaaaggcacctccacgggctttgtgaaaggggatttgctctctcagaaccttttttcctctctccgttctggaggcacttctgtggttgctgacatagctgcaatgctgcccttttagaatagtgaggccttcgaaccgagaaccctcacgctttggcatacacctgctcactgggccacttcgtccctcccagtccccacagccaagcctcagacaacctgaaggtctcagccacatgcgacattgggaaagctggtgcttccctggaagcttggcaccctggaacactagagtttaatttgattaggatttcacctgatttctggagattacagggccagagttatcaagagggagagcacggagctgagtgcagtggttcacacctgtaatcccagcgactcaaggcagaggagggcttggaagctgaggcaggaggatcgcttaaagacaggagttcaagaccagcctgggcaacttagcaagctcttgtctctaaaacaataataaaaaaattaaaaagaaacagagagagagagcaaaaagggggcctctttggtgctgcttgtgaaatgggcatttgtgattagctgccttctgggctctagctgagacgcagaggttggtagaaggtcatttgcatgtgttgggcggaagcccagagggatacaaaaagaaggaaaaacggagttttaaatttggcrcaaatggctaaattctgtgtgtgccccggcgaatcaccccctggacactcatagccccctcagcaccccagtgaggaccctcctcctggccgagtgaaaccccaaaggctcccagaaaagagttgccctctgtgaaggggccgtggccaatattagaaatcctggatttccagcttgtttggaaaactgggcagtccagcggcacccggggcccttatcccacaggcaaccaccacctagggccccgcagcagctaccaccttcaatgcacccacattcactaggttttttatttttcttataccttgcctgcctactcatttccctgagtaaccgagtaggtgtttgagtttgcaaatttctgatttgctctaattctctcagagaaaatgaaatgtaaatacataaaaaggacctttagaatccattccaataaaataacccaagatgcagaaaacatttcatgcaacaaagatgttcctctccattattcataatatacaaaattggaaacaacacaagaatgggagaggcttagctacattatgatgtgttcttatgatggaatattatataaccatgaaagtattgctcatgtagagtttttaataacatggagagatgctcatgatataatgttgagttaattttaaaaagctccacatcaggttgcgtgtgcaatatgctctgttttccaaaatawgaaggcaatatgcatagaataagactggaacgaaatttgccaaaatattagcagtgattgttttttgatgatgaaaatatctatgattattttctttattttactccagggttttctcctcttctacaatgaatgtgcatagcttccatattcaggaaaaaaaawtaaaaataaggaagaaacagaagccctgaaggttatgtgatttccctgagcaccccccccaactggttggtaacagggcaggactaaaacccaagttccctgattctgagatgggtgggacrcattccattccttagggccagactgccctaaggagcacctggggtttatggcctccagagttctcattcacagcccatgtactttatgtgagtgtggtttctctgtggggggagggtgcatatattatttgggtccttcgttttgcctttaatttcactgtcatgaggaatctttaagaaccagacagctgagcctcttgcatagaaatcaaagcaaatacaggcattactgctagtttcacaactcatgtgacttgtgggtgtgtttccctgggggtgcacctaggctagagcttctccaatttctgtttttcctccctctyctgcttcttcttcactagtgaggacaagctaaagccactcagatcccttcactcaggcacagaagtgacactatgcttagaagagcccctgagtatatataccctgttgactctgcaccaaagatgatcaacgtttcagcaggcgccatgagagccaaagacccaagtgccctttctgactcctgtcactcactgtgttggtgactttggtcaaatctgttctttcccagagcatctcccatagtgggagatgggaaagggaacattttctgctgaatgacgttctgtagagcatgtggaacagggctgatgggagacactcagtaaaggtcctcatggtccttgaaggggaggagttctcaaaactgaacaccaggggctctccatccacaaagggtagactcaggcttcaccaagcccacagaaacccgaagccatttgtttctctacaaccagaaactcaaccatccagtgatccaccctgggagacatgttcttgggaggtcaaatgctctttaagacttgctgagttatgggatattcagaagtgcctcttggctaagggcgtataagctttcttgtatgttatatcttacctcttatattcttgcatggcgatagcctttccaaggagaccaaatgctccctcattttagccatgacgrtctctcccaagaagagagagcattgctaacatatgcctccaagattcagccttgcctgtgtttttggggctctgtcgaattaaccaggctttcactaactgtaatacagtccactttttggccctgtgccttgtgaataatccagctcaccccattggatctctgaggtatatgggctgctggtttcatcctgagcagcctcgtatycaggctgtcaggctgttgtctccctggagcgtcctggccagccagcctcactgtgatcaggcacctgttggcccaggttttctagcaagtgggttgatgtgcaggtggrgacccgggacagttggggcatgggaagtgacaggaaggccgttgccttccaactctgctgagtttcttatgtatttctgtgtggtggatgatttccgtttttccatgcttctgaaaggacttaaaaaatcagggccttcaggagaatttctagttgctgtgaaaatgcatgccaactggaaatgtaggtatcaatatcgaaaagcctaagtttgcctgttacaaaaagtgcaactgcatgttttcacttgcaaatgttgaaggaagagatggacccctttgcctggggtccctgtcacctggctgccctgggttggagtggagcacacggcaggtgcgtagggtggggttgggctggagccagccctgagagctgcctcctcagatctgcctctcaaaccctttcgtttttactttgccttaactttgcatttctcgatctttgaactatggcctgatttcacattctgaaactatgcatgggtctcaattctgtgaagaataggatgtttcgaaggagtgatgagtcaccttttatttcaagccaatgagaagcagccaacctaaggggtattgaagaaaggagcatttgtgatatttcaggataattatatctatttttaaattttgtttttaattttacaagtgatagatggagcacattcttattataaacctcagagcccmccttgtcccctccactctgccccttgcagaggccagcactgccatggatttaatgtgtgtgtttccagacgatttacatgcatttatgtgtgtgtttgcaaggagagaaatatgtagttttatttgcatttttatttttgcatgtaaatgatagcataatctatccattgtcctacaacttgttttttttttcctacaaaactaaaaggatttgccttatttttaactgctgacacctaccatggtaggtttatttagctttatttactcctcttgatagacagaaaatagattgcatttctcggtgtatctcagtgaagctctgtttcaatgacaaaataaaatacacttttatttcctccccagagtggtaaatactattttaagacagaagaaaacacaaaaggaagaatgattcggaaggcggggaggtcaggcagcttgcccactgctggagcgtccaggcctgtggcgtgccgtgtgcctcatttgtggccagcaggatgtgggggcctggggacagcagtgtcaggaaggggccatggggcaagccaggcatgggatgggagaagcactgctgtgggaagtcccatagctggaggcaggagaggaggggcagagggcgggagaagatctggggcagtggtgttggaagagtgtgtggactgacacctgctctcaaaggcagggaggggagctctagggagaagacgggctttggaagggcttctcagggtgatgaagtaggattagttcagactcagttaagtgagtcatttagaatgaagacatgaatagccagagccgaatgcccagggaggaggtgggccaagcaaggcaacgtggagccaggatcaatatttgaatcaggaagatcagagaagaggaaggatccagaggtcttgatggagacaaaagagccgctttggaagaggggaaatacaggggaggcgccagtggagggagccaggggcagagtcgtggctttgctttgggtgactcaagcagaggtgaaagtctttgaatggaggcagaagcttgaggcacccccaggtccctttgtctgtctctgtattcacttgctcacccgttcacgaaatcactcaccagctcacccaccgccccatctccccactcactcatccactgactcactgagcataaacgatgccccaagcacagcctggatgctagggaacccactgtgctagagacgaggctcctatcctttggagcctcctgtctggtctggtcagggagaaagatgcacaaagatgaggtgcagaaagtgctgccccagaggctggccagggtgcaaggggccacagggcttcccccttgygctgcctgaygcatcagggtaggaacgccctgcagaccttggtctggccttgaaggatagaccgtgctttgctgaatggaggagggaagggacagcattcctataagagggcccagcagagtgtcctgggtgctgggaagttaggtgcgactggagaataaggccctgtggggatccgggggatgagggaggcaaggaagggagtggacaggagtgaagcttggaagggcatggagctgggcttctgtctctagcagatgtcagcaagttagcaggggaggactagtgcctgattcatttctggaggaagaggcctgggggtgtggtaatgggtgtgctggagacaagaggttgaggcaggcactgactaggggcatagatccttctgcatctctctgtgtccatccatcattctgtgcacactttggcacttctggagaacttgttctcttccagactctgaaagtcagtgactaataagatgtggccccctgatcactggcatctgtagactgctgaatggtgtcttggataaagtatgtgcccatttatttttcttgcatgatgaataatcggtctgaaaggaaacaaagtcctgtttggacagggctcaggaaggtgagaaggtctgggtggggactggagggccaataaggacttcttttgaattccaggtgtcaaaggagtctttgcgttttagaaattaggagatcaatattaaataccttttggtgtgtagcaaaaagttgacatgaaaaagcaactcaaaaattgcttttttttttgagatggagttttgctctgtcacccaagctggagtgcagtggcatgatctcggctcactgcaagctctgcctcttgggctcacgccattctcctacctcagcctcccgagtagctgggattacaggtgcccaccaccacgctcagctaatttttgtatttttagtagagacagggtttaaccatcttggctaggctggtcttgaactcctgacctcgtgatccacccgcctcagcctcccaaagtgctgggattacaggtgcaagccaccacgcccggccaaaaattgctattcttgatagaaatgcaggggaactgatttatttacacttgtatattttttgcagactacatttttgtgtaacgaatttcatgtagtcaatggagaaaaggtagctaagctttggaaacatctcaagtataaataaagtgagaaccacactatgaagcgagtttctaaatgaaacttactttacaagtttgattttttggggctgctctgtctggtgttatcattttccttaattcctgcagggattgtcatttgtggcaccagagtcttttctctggatctgggtgctctggtttctggctcaggattggctgatgcaccttttcttcttgggaaaaggagcctgccatcaacagtgcatgtgagcaattgattcctttggcaggaacgctcttctctatcgacccacgtgaatctattggttttcagatcacaaccagctggcctggtctttgttttccattctcttcttctagtacacacatcttattcatttttctcagcattgctccactagaatttcttttcttttttcaaaacagtgcctcactctgtttcccaggctggagtgcactggtgcaaccccagctcactgcagcctcaacttcccaggctcaggtgattctttcacctcagcctcccgagtagctggtactacagccatgtgccaccatgcccagctaaatgttttgtatttttagtagagatggggtttcaccatgttgcccaggctggtcatgaattcctgggctcaagtgatcctcccacctcagcctctcaatgtgttgggattgcaggcgtgagccactgcttccagcctggagtttcttatgttgctaatatataggcaaggctgatgtattttccaaaatgctccctctggaaaatgcaccctcatgttcatgggggtgacattgtgacagtggcagctaacatttcttgggtggttgccatggtccagatgctactctgagcaccttaactacattacttacttttatcgtcacaattctgggagtaggtactgtttgccctctttgtagctgaagtgtctgaagcacagagagggtaggccacatggccgaygtcacacagctaggagatggtaagcttctcccctatttgtgctctcactctcaaccctggggcccaccggcattgtgaatactcagcatttcaagtctcatccctggggaaggctgtgtgtattgtaaatccygtatcaatgcagtcgttgttggcattgtttaggcatgtatcagagccacacacacttccagactgtgtgtcaaaaggtcccagaaaactgcatttctgtgttctgtcaccccaaaggccttgctgagtatgtagtttcaccttttgtttaaccttctgtttggaggctcactggccacaatggcaaatgtgtggtgggtgagcttcctggcggggatgtattctctcctgctcccaggggcacatgccagcactcwccagcgctggggctcgcatctcttccagcaaggccaggccaggctctgagtgcatctgtgtcatgctggagtccctgcaagccctgtgcttgcccaggtgaccctccccttattcattggccacaagaggcaaagtagccagtgagtcattcgagcccatagcatctgtctccagarcccacaccctgagccactgtgctctcttggccctcagccaccttggagagctgccactgccccttgccgtcctcctggccacagaagactcctcctccagaggcaaggcagctggtgccccttcctgtgtgaacctagccactgccagcccctacccagataccctccattgtcagatgggcctaaccttctaatcaaaggtctggatgggactgctcagggccaccttcaggcaagtggcttgtaatggattcaccgagcatgtgggtctcacagagccttttagaaaacgtgggtgattccttcacagcctatttaaacccatgggggagtggggagggcggaggactagttatcttatggctgggggaaaattagggctgttcccttggttttctgggtatttagggctgagtctgctccacagggtgtttcccagagtcccacctgaggtgcttcaagggttcagcagccactcaggccactgcctacctgctggacagcacagagcatcccatctttgtggaagactctttaggcagcactgccctagtcagctgtcgctgggcaggccttgtgtagtgccatcgacttccttttcaagggaagccctagacttttttttttttttaaagaagtaaaatcttctaaatcttaactttttgtgacatattcaaatgttaaacaattggggtataggttgaacagaacacagaagtggactgaattccaggggcaggaggggagggcatttatctatgttgtgacaaaccttctaggtggttctggtgcaggataaagtttaaataacatcagcccaaaccatttagtttgcccacagttatgccagggacagtcagagctagaacccaggcattctgatttgcagccaacatcaccctcatgggcaaggccaagtctttagggatgttccataccgtgtacacctggtcaccacccaccccacacctggactctcacctgccacctgtgggtgactctgaaatttttctagatatgatgttttcctcttcctttgtaatttctgatcaaaatcagtttcctgtctcagggtgcaggatttctccttggctccctggaaatggtggggggaggaacccatataggggtcaccaagcctgctgactgtgacaggtggagttttggtttgaatgaggtcaaagtagtgggcagaatcaagggagaggtcaggcctgctcargagggacccctgactcatggcttaaatcgtcccagtgttggaaaatctgttatttactgcgtgggacccatttcctagagacagactaataatgaccttattacctacttttcagaatttgaaattagtatttcttacatgttggagaatgtggtaccaagcaggtactgcttatcgaaactttacgggatgtcatttgataggagacgttttgcattcctggaatgcaaaacatgttggaaaaatccctttcggtgtgcctgcctggacaaggcaacccatggggatctggctttgtttagtagtctggggaaggtctccagtggtttctgttgtgaaagaggcacactgtccattttgggctgagaaatatttggaaataggaccatgatactccacagaccttgctgatactccacttccaggacagaagtaggaaataatatggaagcattagccactggtcccagsccagtggagaaacaaataccctgaagcttgtacaatgaagcacttaaaactgagagaggtattaatgccattcgtctcgggggactgcagatttcattcatcacatccttgccgtaatcttactggttggggatgtggctcaacaggaatcttcagttaactgtgtggaagaatgaaaggggtcttacatcactgctactaaggtgaagttcaagttcaaggtcaaaatcactggtggtaagatgaaagtcaagaaaagcagcatctctgcctccccgggaaccaggagcagcagtctccacttaacctgtggtcagagatgagagcgccatagcacgctgagacgtctcccctgacctcagctccaggcactgtttggagaccaacactcatagtgacctgggagcaaggggacgcttcctttggttgcctgcatcctgcccactcattctgagactcactcctcccacaggcttgttctgcctcctgtttgtttcacatgacctggtgtttcagtaatccacctctgcgtaacaaaccactccaaaacttaatgcattcaactgtaatgattgtcattgctcacaaaatatatgccagaaacttggaatgttgtcattaggggttgttcacacaagctgcatggcagctgggagctcaactgaggctgaaacatctgagttgacctcttgtcctttagggcctctctgctggcctcaaaccatcacatcattgaggctggacttcctggcactgtagtccctgggtgccaagaaggagtacatggaagctgccagacaccctgaaggataagcctggaactggtgtaggatcatttgttctgccttcttttggttaaagcaagcctgaggcccgtcaggattcaagaggaggggacatagagggcatctctagatggctggagtgccagaaatttrtggctcccttgaattcaccaccttcagtttgtagcgggtgcaatacctgggcctgactgaggctagtgcgtatatatagggtggtgcccaaccaggagagcctccttatgggccaggtgtccgtctcctgggggtctcccaaccttcacaaaactggccagagaccattcttgctggctttaggtcacgttgatgggagagtagcctctcccaggttctcatgcccagaggagagctgtcacttccagcaaggccatgccaggctttgagtgcatctgagctgtgtgtcactggccacctgcacccagctccaggaggctgcagggcgtggccggcygccctctgcattaaggtctagttggaggcccaggtttcagttcttaagagtgatgcttgactgtaatgtttctgttaacctggattttggaatcctttggtgtgtgagtgctgggggatagggtctagagggaggggctgcttgttagcaaacccctaagcctcctgaagggcttgttcctggcttgactccagtgaaatgtctccaaggagagaagagaktgacacctcacggggctgcgggagcagcactaggttgtcagttatgctcaaaatatattttgtagtaaaaacttgtgtagcatttctattttgttttttctgcctgcatttgttttaacataaaacaaatgttttatgagtcacattgacactgtaggcaaatgtgctgggttcctccgtcacacaaaaaccccaggcggccctgtccctgaagagggtgacaaaactggggaagttcttgtcataaaactgtgttgtgcacaccatgggtcactggtggtggcattctcccagaaccctggctgtggctaatgggaggatcctcgggcaacagggggctggtggattgggcgcccaggcacgccatcgtttgatgcctgggagtccagtgggagatctgggaggaggctcggtggcagccagaaggcctggccccagctggggcccagtgtggactcaacctcagctctagggaagcagtgtgtcaggcggttgggggatggtccacaggatgccgtgagccccaggtagcaggatgtttgctgagcctgctcttacaagttttaaagtattatcttatgtatgcctctcagcaaccctgtggcagaggtactggaattattcctgtctctcttttgggcacctggtgggtgggaagggggctgcaatttgccccaggtgcctccttgaccactgtccccactgctcagcttcagagcagatggagtagagccaggggaggctgtgagcctccctgctcatccctcaaattgccctgcctcctgccatgggagagggtaaaagggcccccgttgggaggggccaggaggggcccgggcctcccagagtgtatctgttcaattgcgttttctacgtytgtccagtagggcaggtttatatacagggagacaggctctccaagaaaacaatggggccaccccaggttttgagatgttcttgaggaaggtcatgcagcccttccctcaccagtgtatgaggctgaggatgaggcacagggtagctctgtggtcttggcatccaccgtgtggcatcggccagccctagggccctatccatgtcctggccctctgggtacaagacctgaggcccagagcactgtgctgggtggaaaacagaaaacccaccccagagcaagagccggggaggatgcccagagggcaggtgggcgctgcttgccttgggagagagggcagcaaaagggagaccagcccccaccctcagcagcctggggggctctgcaaggcagcaggggacaacggaaccgaacagaatgcttttgggggggtggtgaggggctgccccgctgcagggagagtgggcacgacatttgcgtgccccacgttggttggcatcagcatgacaagaaattgtttagttctgtggtttcaggctcactgcaaaatacgtctctcccacccccaccccagcccctggtttcccttccagccacacctgacatccctcggtcagagctgggcctagaggctggagggcgaagcaaggcagacaaaggcaggtccctgggaagcggaatgagcagaaaaattggagttgagaggccccaagagcccctctgccattcagcctgaccttgagcaaacccatcactgtcctcattagaaggcaagagaggacgagattagcatttctgcacatgactctggatggcctccttcagcacaggggaggggagtggttgctaaaatagtaataatggtrctaccacatgacagtgcccacctcctctgggtgttgcgagggtttaacaagttagagcagagcagagctcacggtggaggccgtgagggctgtgctgcttgtrttttagaatgattgggtttattattcgcatcattttctgaatttcaggaggattcttgggctccatcccggatctcgtgaaccagcatccctcggggtgggaggcaggaatctgccttttatgaaacacgtgcttcaggccccagagccctgaactgggaggtcgccraggtctctctctcctgtgttatctgggagcgggattctcactgaccttgttcccttgtcctgccacyggcaggattttaagctgtgatcaggtgcagctctaaacccaagcactgacactagcttgccacgtggctccgctccgtaacctgaaggcagcctctgagccggtcccttgtctgcacgcaggccaatgacgcagcacagttagagtgaggccgacttcccacgtgcctacctaagccaggatgtacactttgtttcacagggacaaaggatggccgttcatgtgtaaatctcataagtggaaactgccacctttgagaatatttttcttgactcttgaagagggaaggaccgtggagagcattatttcagggttctgtgagtcaccacacacttctgctttctttattaagtgtattttttggacaaagaagaatgcagctttgaacactgtgtcaccgcaagccacacaattctaagactctcctctttacgcctttgacatgcaagacccttgtagatatggggaggtgtggagcgtggagccccagaagtcaccgacccagcagacaggctcaggctgtgcacatgggtgtgggcttggggctgtgagtgtgtggtcctggtgtttgggtgcacaagtgtgctttctggctgcatttttctggctcgtctcctctgggagccccttgctgctcacctcgatcctatcattccaaagggaaagctacttttctagcacccaggtggaattgcatcctgcagtgggcccagctctgcctgatcctggtgctgtgggattcagggaaggccgcctgacctctgtgagccttgggttcctcatttgtcaaatgaggattgtaaattccacccttatggcacctaagtgaagctgttgaaaggcatttgtaacctctacaatggatgaggaggttaaggcacacagactcacctgcaggtgagtccctggctcaaggacatgcaggaaagaaacagtagaaccacttctggggccctggagtctgtgtaaatccactctactgtattttataaagcaccagctggaatcctcaaagaaaagtggggagcctggatgcctctgctttcaaggagactggacacatcatcatatctagcttctttccactgactgcacggtactttataaatgtccctctcaaagtcagaaggcttggacgcatcctctgtgatagtgtgccttggccccagaactgtgtttctagaacttgaaagccatcttgtaatgctccatcttggaatctagacccaggcaactccagcgtggcaggttttttcttgaggaggggcaccacaggatacccacacccagagagaggcagrcagagaaatgaggtgggccagccacggtgccagggagggttctgggctgtgcaggtagagggagctcccccgaggtgcctgtggtgtgccatgcccaggggccgggtcagcagactgggtcagagaggctggggtgcttccagyccaggctgaggcccgtccctctgggagggagggagcaggctgggcagacgggccaggcctgttccaggagcccgtctggggtagattgcatcacactgtgtgcagcttgtcactccagcttgcccaggacccctgtcttctgtggctcgtggctgacaagtgcttctccgcaggcaccgtggggcctctacagccaggagtcaggacagagtaatggcggctcggggtcaggtctcactatgtgatggcatggcgacgaatttaacacactggcacagacgggtcggaatcaatgaaatgattctaaaagtatttttggtccatttgtttattctttcagcaatgtttgtttgagcgccccctaggtgccaaaccctgctctaggcattatagggataccatggtgaacaaaactgatgaaaatctcacctttgtggagctgacagtctagtggaggaaacagagaggaaaaagataaatcaataaaatatgaattatatcagtgatattgaaactgagcctggtaggccggagcttaagtctctctactactccccatccatgctctggtggcttattgcaacctccctgggctgtgcctggtggtggccctgttgccccccatatcacagaacctcaggaggtgcccagtaggtgacagctgaatgaaagcagaatgctcaggaaagtttcctgtttgctgcgagggaccctccttctccagcacagccagcagcagtgggtgtggctgtctcacagttcctgccgtctttgaggcggcacgcagagggtcgtgctggctgcctgggagcttctgccaccctccgcctcatggactatcttctgcctgccctctgctctgcaggcagcagggcgtctctagtcttgatgcaagctgcccttgactcttcaacagccccgaatcaccaacagcagaccaagcttctgctgcggcccgtgtgcttgctttctagatgtttttagaaagatctgtaacttctgtcttaatttatgttggtttaacaagaaatcacatttctgtgggatctcgcaaatagggttttgttcggttgttttttcaaacactgtagatacagctgaaaacagaacttaaccctttgaacgtagccactgggttgatgcagctcacaaacccacaggatttccttttcctacagagactccrctctacttgggtcaccacggagagtccatgtcaccatgttatctcaaagttacaaaggtcagaccctctactgacattgagcctgtgcattaccggaaaccctggagaccagaaaggcccactgggatgagattggtcacctggagggtgaagacagagaggaagggagggaagcagtgcccggcttcactgcctgctggcgtctcacccactggtaataatgactctgcacctgagggccatgatgcgttgcatctggggagagcactgcatcccgcagccgtgcagcaatccttcttcctgagcaggtgctttgtaccctggatctggaggggcacaggcactggaaggttgggtgtgtgagcctcaggaagcactcttggattatttctcaacgtttttaagcaagctcattttgaaggttatcaatctcatgtcaaaatttaaaacaatccccatcctttctgaaaatcacaggcctttcctgagtctgtgaataaaacaataaaagccgtgggttttatgaacagtttcagtttggattttcaagaagcaaaagaaggtgtcaaaagaacgaccaaggaataagaggctttcagaaataaccaagaacatcaaaaataaagaggacttttacaagtgaaaaatgcagtaatcaaaaatgaactcaaaagagagattaaatagattagacacaactgaagagaaacttagtaagtgagaagctctatcagaagaaattatgcctaatacatggagacaaagaaatggaaaatattcaagaggagttaggaaacgtgtaggaaagaatgaacagctttaatgtatgttgaattgatatgcaagaaataggaaatgcaggcccggtgcaatggctcatgcctgtaattctagcactttgggaagctgaggtgggtggatcacttaaggtcaggagttcaagactagcctcgccaacatggtgaaaccctatctctactaaaaatacaaaaaaattagctgggcacggtggtgcaagcctgtaattccagctactcaagaggctgaggcaggagaatcccttgaacctggaaggcagaggttgtagtgagccaggatcatgccactgctctccagcctgggcaacagagcgagactccatctcaaaaaatcaaaacaggctggcacggtggctcacacctgtaatctcagcactttgggaggctgaggcgggtggatcacgaggtcaggagttcaagaccagcctggcaaagatggttaaaccccgtctctactaaaaacacaaaaattagccaggcatggtggtgggtgcctgtaattccagctactcgggaggctgaggcagagaattgcttcatcccgggaggcggaggttgcggtgagctgagatcacgccactaccctccagcctgggcgacagggcgaggctccgttaaaaaaaaaaaaaaagtcaaaacaaaacaaaaataaagtaataggaaatgcagataaataagaggaggaaccactaaaagaaatattggttgagaatgtttcagaattgataaaggacacaatttttgagtcagaagcccaatcaaatccaaagaaaatgaatttaagaagcccacatccaatcccattgtattgaactgaagagcaggttgcccaagagagatgatagatttcccacaccaggacagcagctggactgagaggctgtcttcagcaacagctcaaggcagatgtccgtgccatggaaccttcaaaccgttgaaggaaaaatgatgtagcctaggatttctacttaaggaaatcctcttttgagaaagcaaaatgaagacacttcagagtacaaactgagaacatatattaccaacaatctctcccggaaaagaactgaagaatattcttcaggaataaagaaaataatcttcgaagaatgagatgggttgcaagaagacatgaacagataaattgattaacatgtatttaatctacactgccatcaaatgttgaaatcagtaacggtattgactgatttgtgggagggtagaacttaaacgctccagaacagttgtgtgaggtgcatgtctggagccaagcacttagggcgtttttttgctcagtaacaagggcaactgaggttccaccgggttaaatatgcatgctgaaatgtctatggtggccactagaagaatagaaacagactatataatttccaaatgaatagaggaaaagacatagattgaaaggaaaaaagggctgggcgtggtgggtcatgcctgtaaccccagcactttgggaggctgagggcaggtggatcacctaaggtcaggagttcaagaccaccctggccaacatggtgaaaccccgtctctactaaaaatacaaaaattagccaagcatggtggcaggtgcctgtaatcccagctactcaggaggctgaggcaggagaattgcttgaacctgggaggtggaggttgcagtgaccgagtttgtaccactgcactgcattccagcctgggcgacagagtgagactctgtcacaaacaaaaaaaaaaaaaaaaaaagaaaagaaaagaaaggaaaaaagaatggatgttgtaaaagatacaagaaatgcagacatagacatagagtgaagagtgccctccctgtcccctctcagtccccattcaccttcccagcgtgctagtcctagtcacagggagcaagtatccttctcacctacaatgcatttaattcgaactgtatgaattgttctgccagtttcttttttaaacttagcagtgtgtcttagaaatctttcaatagggtttatgttattgtgccattgtttagatagaccagaatttatgtaacaatccttctactgacacacacttctgtttttatgctttttgttccaccattacacaaacaaggctgtggtgagtgactttgtacatgtgtatctgtgtccatatgtgactgtttctgtaggatgggttcttggagctagagttgttacatacaactgtggcaatttaaacattgccaaactgctctgcaaaagactctactggccgagcacagtggctcatgtctgtaatcccagcactttgggaggctgaggtgagaggattactcgagcctgggaggccaagattggagtgagctgtgatggcaccattgcactccaacctaggcaacagagtgagaccctgtctcartgataacaacaacaacaagactccatcaatgaaactcctgagattgaggaggctcctttctcccaccttcactgacattgggtatggcaaatctggtttagttttgttttcctcattgtttctggatttttaatctcttaggaagaacttcctcatgtgggactacacaaatatctccgaatttttctttctaaaattttttatactttttactacatttcacttttgagatcattagaagattatttttaagtttctaatatattttttccaagtagatagccagttttccctacaccattttattgaacagttcatatatatatatttatatgtatatgtatgtgtgtatatatacacacatatatattacatatcacatacatatcatatatgtagatatacaggaggttgcttcagggttttctagtgaattccacagatctaagactcttcctgtaaaacatgaattacttctctcttgaggttttctagattcacttgtgaaattattaaattatttgtgtctgatgctctttagggataaatctctggtaacttaaaaattatatcataaattgctttccaaaaattattttgttaactcttttaatataacctgttttctttgtaatcatatatatatatatgctttattaaggtataattaacatacaataaactgtgcgtgtttaaaatgtacgattgatagttttcacattcatggcatggcaccatcgccacaatcaaaataatcaacatattcatcaccctcaaaagtttccttatgtctctccataatctctctctcccgtcctctcgcttttctctcccatcgccaggtaaccaataatctgctttccataactatcagttaccttgcattttctagagttttatgtgggtggaagaatacagtatatactcatttcagtctgattgattcttcttttaatcagtgtaattattttgagatccattcatgtatcagtagttaattccttttcattgtagattcatattcagttgcatggatgtatcacagttwgtttacccctttacctgagggacattgggttttttttttattggggagctgtttccaataatgctgctatgaacatttgcatataagtcttttttagggacatatgctatcttttctctcaggcaaataagaatagaatggttagatcatgtagtcggtgtatgtttaactttctgagaaaccacaacagttttaagtggtgtaccatgttactttcccgacagcggcgtatgagagttccagttgctccacactctcaacaatccttagcgtggtcagtcttttcaatttgagtgattccaatagtgtgtagtggtatctcattgtgggtttcattttcatttccctgagacaaatgacactgaacatcttttatttgcctacgcttgtttgctatccatttattttctttagttatctgttcaaatctttcaccatttaaaaaaaattggctttgtttcatattggtgagttttaagagttctttatatattttgaatacaagtgctttatcagatatgccttttgcaaatattttctgccagcatgtggcttgtctttttgttctcttaatagtgtttttcaaagggcagaagtttttaattttcataaaacccaacatattattttttttcttttatggatcataaaaggtcttttggttttgtatctaagaaatgtctttctaacccaaagccacaaagattatcttttgtttattttctagaatttatatagttttaggttttacatttaagttaatggctgatttttttccttaatttttgcatatagtgtaaggtatgggtcaaaattcactttgttgcatgtgggtatccaactgttccaggtcsctttattgaaaagaccatcattcctccatggaatggcctatgctcctttttgatgaccttttcaggccttttattgatcattgatctaatcagttttctctttgttttaggtcaattttgatagtgcatatttctcagaatatcattcagcaatccccagctattggagtaaaagacccatgttaacaaagttgtttgcatgtatttcaaagattgtttctcatattaaggttcatttaccagtttctggctcagctttttctgggtagacccccactgatgtaatagtgccttttccacaacaactttgtgccrgtttccagtgtcccatccctccattcactctgtgtgagtctctgcagaaggcattccatgccctttttgtcactggttttttttttttttttttttttgagacgatctcactctgttgcccaggctggagtacagtgacaccatctcggctcattgcaaactccacttcctgggttcaagcaattcttgtgccttagcctcccaagaaactgggattacaggcatatgccaccatgcctagctaatttttgtatttttagtggagacggggtttcatcatgttggccaggctggtctcaaactcgtagccccaagcaatccacccgcctcagcatcccaaagtactgggaatacaggcatgagccactacgcctggccccctttcatcactcttaataatcagtcctaaactcagggcacacatttgtctggtgtgcataggatagtcctggtttgctcctgttggcgagaatactttttaatagcatcctttttagttaagtgtcctaactttggacagtaaaattctttctcagaaggtctttcattatctggcctctgcctgcctctccagcatcatcttgggttactttcctaagcagtccattccagccataccagccttcttaacacacacaactctaagtgctatttyatgtttaggaatgagtaatacttcctatctgatttaaatrtattttattattacttcaataaccttgattttcaatatttatgaaaattgttcatacatgctgcctttgaactagaaatttcttttctagaaatgtacttaaagacatactccatcctttgtatgagagaaaaaagtatgtatattaaagaattgcattatttatcatagacacatatagtacacacttaaatattaggggaggttggttaaagaaaaagtagttaattcatgtsatggagtacaacgtggtgttacaaaaagtgaaaggatgggtaataggcactktagaggaggcaaaattttacctctaccatcttaaggtttttcagctgggcctgagaattatattgacataagacagattaacaggagcaaagcatrcacatttatgtaagttttaagtaatatgggaactcttataaggagaagaagacccaaaaaagtggcaaaacccaaatgtttttatactaggtcgaacaaagagaagcagttgtggaaaattaaactatgtaaggaagctaaagaagatgagaactatcttaacaaggtgtgtttgtccagaattctctgagttcgtactcctcrttaaagaatgtttcctttttcctggtacagggagggtatctttcaaatgagagtttaatctcctgttttcagaaagaaaagggggagactaggattcccttcttacatcttttgtttttccagtgccttttactcaatataatacttttaccaaagttgcatatttaggggttacatatcctgccacccttaagcactgacataaaaggagctcagagagatgttattaagtgaaaaaaactgagctacagaagagtaggtactgcatgattctatttgtgtaaagaggttggatggatacaaatatatgttgccgattattatcccaaaagacaatcccaaatgctgtaaccccagatgctgaaatctttaaagatcaaaattcctgaagtctaaatctctgaagtctaaaatgcccaatatctaattgaatccccatgccataatgacagatttggagttaggttcaataaaggcttctaaaagtgaatttcaaggtgttaccgataaagttggttttttccgttcagcccaatgcatttggcagaaaattcagatcagtagattggccacgagatacagcaacaattgaaacttcagtttaaaaatgtctcctttatctgcattggcattctttctagctgatgaaatttccagggcttttaatgaattagagccacatttgcctgaagaagccatggaagttactgactggttcaaaaataattatgtgtgtggtaggataggaaggtacgcaaaagtgttgcttctgccaaatttgtggtctgtatatgagtgcgtggggaatggatttctccttacccaaaacaacatagaagcatggcaaaggagatgggaacatttaacagggatgctcacatcagtgtatattgaattataaaagaattccaaaaagagcaaggccaagtaggaaatgaatgtgaaattgtcctctgaggagaaccaggcccttaaaacaacaaaaaaagcagctattcctcttgatgaaagacttcaaaatatacttaatgattatgtaagttggccagctcttaatccctgcgctttcccataattaatccctgtaatacacattttcatgtatcagaatttctttttagttgtttttgtttagtcaccactattttaaattgtcagcattattattattattatttttttacaatttgttatgcttcgtatttcatatttgcatcattttaagactggaggtataaagtatgtaaaggcttttggagagctttaatctgctttatgcattttttgcaaattcgactccacgaaagcccattatcacaacattagctttgtgtgtaacattgtgtatgtacataaaaatgttcaaacttccttagtaagtgaagcgatgtcctttttatacctctgtattttgggtgttttggtgacccatggaggtttttgatcaatctcatcaaaaaacttgggttgtctgtcacaatatttcagatgtatgcagttatataagctatttcttttggaatatggctcagctgctcgtagctgttacacccttgcaaatgttgttagtatatctgagtgtctatacagaaatatgtatgttattattgcctattttattgtgtaaagtggcctatgaagtgttctgtcatgtttttatatgtttctcaaatcaatccccctttaaaaatgtaaatcaatgtcttttaaataattttaaaaattattttgtccagaagtatatttttgggatttttatcttttgggattatggcccaaacccatatatatacatgcacgtgcttgtggatatgtgcgtgtgcacacgaaggcacatgtgctacctggtaggatrtataatatagggagttagcaggggtggagaagtagggtgtctcttcttttcatgtcaatttttaaaccatacacatatattattttaatgttaaaaactagtttggcatttttaaccatgggtcggccacattgcacaggcattttctctgatggtcacagcattcttccccactggcttggactctggactttaccctatccttctttttctttttttttttttttttaatggattctcactctgttgcgcaggctggagtgagtggcatgatgttggctcactgcagcctccacatcctgggtttaagcgattctcctgcctcagcctcctgagtagctggaattactggcatgcaccaccacgcttggctagtatttttgtatttctagtagagatggggtttcaccatgttggccaggctggtcttgaattcctaacctcaggtgatccacccacctcggcttctcaaaatgctgggattacaggcttgagccactgcgtctgtccctcccctatccttctgaatgccaagtttcaccctttgactggagttagccttgcggaagaactgaatttgttgccatctcacttttctgtccctttttctaggtccagaatcatctcccagaactgctgttcagctccagctggtctttattgagcccctcttgtggaccaggctaatttcctgaaaactggtttttgctaacrtttcttacgcttgctcgtgaaatcagccacttaactgttctgggttttcccgtggcagatccctataggcttctcactgcactatcccaaactttttatctgagaatgttgtgtggcaagatgtctgcagagtgccgcttaggagatgctggcctggcgtccacgggtctgctgtgtatgtctctccaggcagatggcctgtctctgcctggcaaggacgatctggggtggaaaaactctgatctgaaagtgaaatcattgactccgttaccatgttctgaattcccagatctccctgatatggaaagtgaaaattggcttctattacacaatgcatcaaaattcttttgtataggaccagaccactgatatcaagggcagtgcactgactttcagttcctctgcatcccttggtcatgttcccacctttcaatgggaacagagaataaaaattccagctctagggcccagcctagtggccacctctcacggacaggcacccggctgctcagtgttatccaattactagaggccattcctagcatttcaacttggggaattaatttactattactttatttttatctttagagacagagtcttgctctgtcacccagactagagtgtagtggcatgatcatagctcactgcagccttgaactcctgagctcaggcaatcctcctgccacagccacctgagtagctggaactataggcatgtgccatcatgcccaactaattttatttttatttcagttgtagagatggagccttaccctgttgcccaggctggtctctgactcctggtctctagtgatcctcctgccttggcctcccaaagtgctaggattataggtgtgagccaacatgctgtccccattattgactgttaccctaaagtgtgtgttgcctttctagtttgagtagaaagtccagcattatctttttggataatatccaggttttgctgtttctttctttatttttcataatgagaacatttgctctcttgctgacattggagggcgtctgtttacctctcctgtaggcacacaaaattcccaacgtttatttgaagaaaaagacaattatttgagtaatttgaataaataaacattttaagtgattcccaaaagactttctctgctgataaatatttagtgtagttttaatgattagtctccatttgttttctttcttttgtagctggggcttctatagtcaatacaatctcaggcatttgctttcttttagagtaaatggctcaaggaagacccaaacccaacccctatcaccctgggcactgctcagtgggtcgtataccatcacgaaattaccccagtatggaactggaagggacgggaagtgtttaggatcaagttccaacatgacctaggcttgtcctgggacttcatgcaaatgatttggctttactgggacttggtttctgctataatagaaatttgggtttactaatacctccctcaaaggattatttactgctgtaccccgtggatgcacccagcagaggccccacatgtggcagatagagtgttgctccataaatcctcatttcctttctttatctcaggtacacttaaacacaacactccatgataaccagaatcttcttcactcctcccttcctatatcccaagaaaaagtcaatggaccctgactaatagggcccatattctcataggatactgcacgaatgtccttctgatttattttgccccatttgtcttgacagtagtgctagaggttggtggcatggatttcaatctgtgtgagtcttaaatccttctactttcccattacttgggctggtgattatmtaaagtcatggctacgcctggaggacagggaggaaaagcaaagatctcatttgaacttaaggtacttttgtggtttgcttaggaggaggaaattgcagattcaaattataatggaacttgaaagaagtttttagtgtctggggtaaaactgtgacagaaggtgccatttaaaacttatgaataatgtacaagcaaaagaaaattcatagttaggagagcaaacctgtctgtctaaagagaattgcaggaaaaaccaaagacgccagaccagtagcttttgttcaagaaattagtttaataacacagccaaatttagaataccttctgcatggagtgttcctgaagtgagttttgtcttgcatttcagaagtcttctactttatcatcaaaatgaacatccgaggacattttaattgctattttgcactcaactgtatagaacctactagcactctgtgcatttaccacacgagtgcacaaagtgccacatggatgtctaaacacctatgatgagatgcaggcagtgcctcatcagtagcagcaagtggaaattcaagagcccatggtgaagtaaaattaaccaccccaactaattttttttaaaacaacagctttattgatatatcatccacattgtgtaaaattgtttcatttaaggtatgccatatgatggcttttagtgtcttcaatgtgttgtgcagccatcaccacaatctaattttacatttctatcaacccttgaaagaaaccctgtattctttagtagtcactcccaattacccctccctgcagccttagacaagaacaaatccactttctgtctctatagatttacctattctggccatttcattttaataaaatcatataataggtggtcttttggaactgatgtcattcacttggcctacagttttccagattcaagtgtgtcacagcatgtattggaatttcatttctttttatattccaaatagtattcctttgtatacctataccacattttattaacccattcatcaactgatggacattgggttgcttccactttttggctagtgtgaatatgctcctatcaacagtcatgcatgtttttatttctctaccttgtaatggaattgctatgtcaaatggtaactctatgtttaacattttgaggaactaccaaatattttttcagtgtagctgcaccattatatattctcaccaagcagtatgtatttcaatttctccacatactmgccatacttgytattatctgccttttataaccattctaatggatgtgcagtagtatctgattaggattttgatttacatttgcctaatgactaattatattgaacatctttttatgtgcttattagccatttgtataccttctctggagaaaggtctgttcagattctttatccatgtttaaaattttgttattgatctttttattagtgagttggatgagttctttatatattccagatatcattccatgatgagagatatgatttgcaaatatcttctcccattctgtagattgtcttttcactttcttgatgattttctttaactttcttgatgacgacatccttggaagcacagaagtttttaattttaatgaagtccagcttatctttgcttttggtatcatacctaaggaaccattgcctaatccaaggtcatgaggatttgctgctatgctatcttctaagagtgttayagttttaactcctgcattaggtctgtgatccattttgagttaattttgtgtatggtgtgaggaagggctcaaacttctttctttttcatgtgaatatccagttatttcagtactattcattgaaaagactattctttcaccatttgtttatcttggcactcttgaggaaaaatcaatggaaataaatataaggatatatttctagactctcaattctwttccattgatctatatgtctaycctatgccagtatcaccttttctcaattactgtagctgtgtatcaagttttccaattgagaagtgtgagtctttcaacattattcttttttttcaagattgctctggctctcctgggccccttctaattcccatgtgaatttcggtacatcttgttgatatctgaaaaatgaggaaacttggattctgatggagattacattgaacttgcagctcagtttgggaagtattgccattttcataaaatgtctttccatttatttagaccttctttaatttctttcaactttttttttgttttcagtacacaagtgttatatttcttttgttaatttgttctgagtcttttacttagcagctattataaatggaattgctttttaatttttggattgttcattattagtatatagaaatacaattaatttttgtatatttatcttgtatcctacaaccttgctgaacttgttttttaattctaactgatttcagtggattcctttggattttctatatacaagatcatgttatctgcaagtagagatagagttacttcttttcaaatagaaatagctttctggatacctaaaggataattatacactcttcctcattatagttataagtatttaaaaagtctatcttgtacaatattaatatattcacctcatctcttatggttgctatttatagatctttttttccatcattttactttcaacttatttgtatctttgaatctaaaatatgtcttttatctagagarttaggtgaaacttgtttttaaaatctagtatgacaatacctgcctttctatttgatgcttaattcacctacccagagaagaccttttgtcacactgagctattggggtaaggtggggagtgtaatataagtggattgtggctcaaatactacagactctcattgtttttactgaaatttagatcttcctccatttgctgtatgccttagagcagtttccagagactttaaatgttttagaaatcaatttcagcaattaaatggaaagtgctttggtatcagtaccatcttatacaggtcagcaaaagcagtggaactaggcatgaaattgggttttgtttttgagcaaagttcagaagtgagctgctatgtcaggtccagtccatgacaggggtggtacaaggaccttggcctcctgactcttggcaggttctctgtggtccagcttccacttgcctcccsaagcctttttgaaatgcattcactcaggctgtcatcttgtgttgcattctttgacattccatgatttggataatttctagtatccaaagatcttacacaaaaactcagatgaccttgtggaagtttattcccaggccatatctctgcaaatcagataaattgcttttgtcacaggcataatacattgttaattttggaaatgctttttgtaaaaataacaagagtcaggttattttctttttaattttcaattatgtgcaaggatacatcaataccaagaaatgaaatgggcttatcataacccagatgatggtgctgacctttgggatggagccaggtaatagattaggcagacaacagatggtggtgaaatctgggtggcaaaggaagaacgccctgaaatgaagtcctgggaaacctgcagctgtattaggtaccatgcagattaatctgtggctgaggggtagcaaaccagtcaggggtctgttggctggctccagctgaggggatttctcattgctgtgctctgggccttgatgacagatgtgttcatccaacacctgacatccagatgttggacataaatggcgctcaaccactgggtcaccagaaagttttcaatggaggatgaagtgtttagtttttgctcggaggggtggttattataatagacccaccccaggattttttttctcttaggaaaatattcctgtgcactgaagacacatattctgttgccagcaaaacagtaaagtttgcttttacttattttttcaattgtaaaatcaaagatgaaaaagggatgcctgaaaaaagctatatccagggaggctcaggacttgtattaacttcctggcagattagaaaataaagtgggagagaggttaaagcaaggacttgtctgtcaagtcagttggaaggaggaagatcaagggaattgtctgggaagagggaatggctattttaagcaggtataaacaggagcctgttcaccttcatagatctttcttggatcagcctagtggcacttgctgcagttaactatgttggtagatttwttcccatatcccactggggtagacctacatctctcacctctgctcatctttaaaagttaaaacaaaccacagagtaacataggcaaagtamaataagtgacccaacatttcatacagttaaaaaatgcttctaataggaaaaaatcccaaagcaaaagtattaggttaaattgtttatataaaaattaaaagtgtacatatttcaaaagcaaagctaaaactatgtcacagtagagacatccaaacaaatatgactaccaatggtttaatttttttaatatataaagagcttctataaataagtaagaaaaatgctaataccacagtatataaaagggcaagctatggacgatttgaagaagacatatacatagctaataattaatatgcatataagatagaaaaattattaataatcaaaaaaaggcaaattaaaatgagataatattttactttgttgaattagcaaagtcatttgaaaggaaaaatactcagctttggtaggaatgtattaagataggcaagttatacactgggagaaggaataaaaattgatataatctttctggagagtgagttggtgatgtgtgtcaagggctttaaaaaaagtttgcatgttttgatacagtaatagttttctataaatttaccctaaggaaataatcatgaaaattatgccttcaagtatagttaatgacaagaggaattgcatacaacggaatattaggtaaatagaaaagcaggatatatacctcttcatgatatagccctaattgaatatgttaatatatgttgaagatattcattatcccttgattgtagcatatatacctgtctgtttttttattttgacattgagatgtctgtaattgtgcacacatttaccatgtaatattttcttattcctcatagattattattaaattagtagtacatctttgagagatattttttaaagggagaaratatgacatatgtgttacgtattaacatctgtgcatggcctctctttctctctctttgtctctgttgtttatcgctctttatatggaagctaaataaatttaacattatcagtcaattttcacacttctgccaggtgaactttctaaaagtcgtatctaaatatgtcatatttgaaacctgcaatagaacttacttccaggaaaatgtagtgggtatacttttctctattcctcccacaacaactaaaaagcctggacatcataaatagaacagatctaagaagactttgaaaggtggagacaagaatgatgcaatagagagctctctggttttctttttgtcttatttttcctagacaaggtactggtgaagctgaccacccagaatcaccagtaggaacagaccaaaaaaaaaaaaaagcccaaatgagcctgctttctctagccagaggaccagaaatgggacacccaccaagacagaaaacttttagccaaatgttctacttcagtcaaacaccaccaaaaaaactggtgtcccaccccatccatgccaacaaaagctgagtggggagtatagacttctgccctccccaggctgtaatgaggttccgtaactccattatcagggtggtgtcaaataaaagccaaacagggatctgggactggtatccctgccctgctaggaagtaacaggccctagcacctgtggcttcaggagagaccatgtggggatcctggacacctacctcaacctagacaactcctgccacctcctgcagtggtggtgttacaggaggccaactagagttagaactgtcactgctcttcagcaattatgacactacacccactgctgtgccagtaaagactatatggggagccagaactcctgcccctccctagcagtaatgaggagcccagcaccatcacttgggtaatagagaacaagtggggaacctggacttctacctctgcctgtcagtaatgactcctttccctgccacaatacagtcagaccagatgcttaaataagatctagagtctcacaatataacatgaaaatatacagtttyaaatgaaaatcactcactatatcaagaatcaggtatatctcaaactgaatgagtaaagaaaatcaataggtgctaacaccaaaataacagagatgttagagtaacctgaaaaatattttaaagcagccatcataaaaatgtttcaaaaagagaaatgacaaacatgctgaaacatgaaaaaatctcagcagaaaatataaagtctaagcaaacaaatagaagatataaagcagaaccaagtgaaaattttcaaatggaaaaatatattaacctaaaggaaaaactaattggatggtctcaacagaaaaataaagaggacagaggaaagaatcagtaaactagaagatagaactatagaaattaccaaatctaaacagaatatagcctggaaaaaaaggaaataaagaaaaagtctcaggaacttgtggaactttaacaaaagatctaacatttgtgtctttcaagtctcagaaaaaagaatgaaataggagggctgaaaaagtgctcaaagaaataatggctgacttcccaaatttgacaaaagacatatctatcgatgaaagaagctaagcaaacctcaaacaggataacccagagcaattcacaccaacagccatcatagtgaaacatccaaaaactaaagacaaagaaaaaatcttgaaaacaatagagagagagagagagagaaacaattggaatcatagcaaattttacatcaaaaaccatggaggccagaaaaaaagtggcatgacatttttcaggcactgaaagaactatcgagccagaattctatatccagtaaaaatgtcattcaggaatgaaaaggaaatcaaggcactttcagatgaagggaaactaaaagaatcctaaaagaattgctaaggaaatttttctaaacagaaaggaaacaataaaagaaagaaccttggaaccacaaaattctatagtaagcaaaacaaacaaaaaacacacaaatacaatagactttccatctcctcttgagttctctaaattatgtttggcagtaagcaaaagttaatacactgcctgatgtggttctaaattaatagaagaaatatttaagacaattatacacaggggaaagaaacgagatataaaagagttaagttttctgtacttggtttgaactggtaaaattctgccccaagtaggctgtaatgagttatgtatataacattgtaatagttagagcaaccaggaaaaaaacctatacaaagagatatactcacaaacactataggtgcatcaaaatggaattttagaaaatattcaagtaacytaaagaaaggcaagaaaaataaaacagaaatgaaaaacagagaaaacattttaaaaagtcggacttaagccctaacatatcaataattacattaaatgtaaatggtcaaataattcagttaaaaaatagagcttgacaaagtgtatttaaaaacgtaactgaactctatgctgtctataagaaactcacttcaaatgtaacaatataggcaggttaaatgtcaaagaatgaaaaaagacatatcgtgcaaagatttgccaaaaaaagaaggagtggctacttwaatttcatataaagtagactttggggaaaagtaaattttcagagataataaaaggactttcagtaatgattaaaagggtcaatccatcaagaagatacagtaatcttaaatgtctatgtaaaacacagcacagcctgcaaaatacgtgaagtgaaaactaacagaactgaaaggactatagaccaatctacagttgtagtaggagacttcaacagtcctttctcaacaattgatggaactaggcagaaagtcagcatgaatatagaaaaactcaacaatactatcagccaataggatctaattgacatttatagaacacttcgtccaccaaaagtagagtacaccttcttttaaagtgcttacctaacattaccaagatacaccatatcttatccagaaaaaaaaaactgcaacaaatttttaaaaattgaagtcatacagagtgagttctctgaccatgatgtattcaaactagaactttgtaacaaagataacaggaaaactcgccatcacttcctaaataaacaacacaattctaaataactaatagtaaaaagaggaactctcaggaaaatttttaaaaaatatgttgaactagatggaactgaaaatatatatcaaaaattgtagggcacagctaaagcagtgctgagaggaaaattttgtaacactaaatgtgctaaatgcatatattagaaatgaggaaaagtctcaaatcaatatctaagctctcacttaaagaatggtctttttagtccattttgtgctgttataacaataccacagaaatttatttcttatagttctggagactgggaagtccaggatcaaggccctggcatcttttaagggccctcctgctatgtcctctaaagaacaagaatgctgagtcctcacatggcagaaggcagaagagcaagagaggtcaaaatagagtgcactcctctcatcaatccctttacaacagcattagcctattatgagggccgagcccttatgacctaaacacctctcgttaggcctcacctcccaacactgttgcattggggattacatttccaacacatgaattttgggggtacatattcaaactatagcaagaacctagaaaaagaagaacaaaatacgtggaaaggaagcaaaaagaataaagtaataaagacaagcgcagaaatcaatgaaatggaaaacagaacaatagagaatatcagtgaacaaagaaatggtcctttgaaaagattaataaaattgacaaacgttttgacagtgagactgtcaaagaaaaaagagactacacaaattactaacatcaggaatgatacaggggatattattgtagacactgagaacatcaaaagaataataagagaatactaggaacaactctgtaaacataaaattgaaaacttagagtaaagaataaattcgttaaaaaacccacaaaatatcacaactcccccaatgtgtaagataatttgaataaccttttaactgctaaggaaattgaactcatgattttaaaactcctaagaaaatctccaggccagatgttttcactggaaaatcctgaatgtttccagaagaattattaatagcaacagtctatacaactcttttagaaaacagaagcagaaagaacactttccaagtcattttttttgaaagttagccatatactgatcccggaaccaaataaagaaaatataataaaaggagaatgcaggacaatattcttcatgaatatagatacaaaaaattttagcaaaatattaggaaatggaatttagcaatataaaaaaactatatatcacagccaagtgtgatttattccagagatggaatgctggtttaatatttaaaaaccagtcaatttgatctaccatattaacatgctaaagaagaaaaatctcataatcattttaatggatacagaaaaaagtgtttgaaaaattcagtatacattcatgtgaaaacactcattcaaggaagactaaagaggaacatcctcaactgaataaagagcacctacgaaaattgtacagccaacattacacgttatggtaaaggactgaattatttccctttaaaatcaggagtaaggcaacgatgtctgctcttgctactgctattcagtgtagtgctggaagttgtagccagtgcartaggcaagaaaaggaaatgaaaagcatatagattggaaaaggagtaataaaactgtttctatattcagatgacatgcttatttatgtagaaaaccccaagatatctacaaaaaaatcctagaactaagagatgaattcagcaaagtcatagggtgcaaaaataaacatgcaaaaatcaattatatttgtatataccggtgatgaacataagggtatcagaattaaaaatataatataatttataattgctcaaaaagttgagaacttaggtgaaaatttaataaaagcatgtgtaagactcctgagaacaacacaacactgatgaaagaaatcaaagatctaaataaatggagagacataccatgtttatggattgaaagattctgctgttgttttaagagcctatgggcaccctttacctttgagactgtggattgagaggggaagtggaggcttcagctcttaagctgctcgggcaatttccattgccaagagcagtctaaggtcaacttggagcattaagaaatggatgcacactctgaagygcatttgattacctattgactcatgatgttcaacctcagtgacgggaacctggagaatgttggggttctgcatttatctccttgctcacacatggtggtcagacttgctacctccaagatgacagcaggttctggatggcttttggggcagacaggatggacagagactctgcatctgccatgaaatggaagggaaagaggagagaaggcctggatccagagaggattggccctctttcttccttacttttatggccaaggtgctggggcttctgcaagatctctgcagtggtgctgatgacggaaggtgtttcttcatgcaattttttaaaatatgaaattaatacaacagtgaaataattagctcaccccaggcagcctcagctataatttatggctccatgtctcccattttaactttgttttgcattcattagtatacaatttwaaaaaaaatctcaaggaatcacagttctgacgactaacattaaccactctgtcactcacagatattgctaaggctatcattctgaaaagtaaattaatttcccttgggtgagaactgtctgaaaaacattcaggctcctctctagggtcggctgattgactctggaaagaactcgcggcttctatggcaacgcattgtgctaggaggccctgtccacaccactttcctaggtttttgttttgtccaccctgtctctacatggaatttgggaagaagaaaattggctggtgttttggggaacataaaaggtgcaggtgctgttagaaagcttttcaacacacacacacatacacacacacacacacacacacacacacacacacacacacacacttcttctaaaaaagtcagtggacttagcttgttttcttccctctcagcaatctcattatctttaatttaaggtcgagtagaagagactttaaccctgaagctctttttacaacagttttagtgatgcagagtaagttagtgctttgtttgggaaaaagaaacaaaaagagtgctttttggkgaaaatttaaaatggctttcctagatcaaggatgagcagcatcgcaggtaattttagagactccagagttaatggtaatgactctaatgatgaagccttctatgccttgaacacctgctacrtgtcaggcatcacttagtcctcatgctcattatcagccccagttaatggttgaggaacctgaggctcagagggtttctgttacttgcccaagataacacactggcaggtgttagagtctgtgtgcaaaccaggtgtgtctgatccaaagcctgaatttctaaccattctatcttgtgctggtgatgcaggtggggatatgatgttgacttggtcccaggatggtctcctacaggcagcatgagtcactagagaggacaagaacagactcagtacaaaggcagccaggttccttggtgtttattttaagtaggtttgaaccatagcgtgatgggttagacccacttttgtttgtgtaattgaaccctcaaacaaagaatctgaaattggccaatatcagatccagggtgaccctactggtccttgtcagtcagggttataacactggctagaaatgacccactcaatggaaatrcagagccagggctgcaggtttatcctgggtggtgttgtctcctatctgaggggcttctgtggtctccacgggggtcatccctcagcttgtgggaggaggcagcctgatcctaatcctgtacggatctgcagcctgctccattcagcattgcttttgcagtgttaatagatggggtagacagtctttgcagtctccagcagcagagtgtcagcccctgctggatacttggccacaactttaaatccatggcacttgttggggagggtgtttatgttccccaggtttttgatctggcatgaactttgagaaaggaaaagaataattggcaagggctttttctctgaagagctacactctctggccaaggaaatctgagctttagtgtctgtgtttgcaggtttgggggtgctctcactgctctgtatgtagactatgtgacattgacaccagagccacagactctcatctctttccatatctgaaatattcccgtgtttaaaaattgccattgtcattgaactcttcaccaccattgagaatcatgtattctattctggggtggttggattgatagactgttgagggttgggaggaaaagaggtgatgagaaggtgsaaaagttatttgttgagttttctcaaggatctgaagggcactttgagaactctttcctggggccattttgtgtatttaatcacagtcaagtctactatcaaagaagcatatatctctacgccacacacacacacacacacacacacacacatatacactcacttacacacacacaggcttcttccatctcctctacagatggattgaaagttgcccattgggtggtgtgtggtggctcacacctgtaatcctagcacttttggaggccgaggtgggtggatcacttgaaaccaggagttcaagaccagcctagctaatatggtgaaaccccatctctactaaaaatacaaaaaattaggcaggtgtggtggcatgcacctgtaatcccagttactcaagaggctgagggaggagaattgcttgaacccgggaggcagaggttgcagtgagccaagattgtgccattgtgccactgcactccagcctggatgacagagtacgattctgtcaaaaaaaaaaagaaaaatggaaaaagaaaaaattgcccatgggaatgacaggtaaaacacagaggatgttatatgttaagctgatgtttcagtgtaggattgctcaggcccaaagggcaaaccattacatgttcaacttaaaaaaacaaaaaacagggctgggcacagtggctacacctgtaatcccaccactttgggaggcccaggtgggcagatcacttgaagccaggagtttgagaccagcctggacaacgtgatgaaacccagtctctactaaaattacaaaaattagtcaggcgtggtggtgcaggcctgtagtcccaactgctcgagaggctgaggcaggagaatctcttgaacccaggagatggaggttgccatgtgctgagattgtaccactatactccagcctgggcaacagagtgagactctgcctcaaaagcaaacaaacaaaaaaggaagaacaagaaacaaaacaaaaaagcagcaggaattgtgtgcagcgaggtcccttccatgatcccaaggtggagggtgggatcacctggtgttggaggtggtgaggcttagggctgaagatcagggtgtctgactctcacacattcttactgataataagaagccagatgtttacatcctggctggccagctgggccaaatcttccaagttcaactggtggcattaaaaatatcctactttgtaaaatatttgccctctgagtttgtatgtctaggagtgccccagagaagggggagaaacaggacagatgggctgtggactctgtgagaggttggagggtttctgtgggagccactgggaatggggtgcagtggtccagctgccaggcacttacaagctctcttgaatcctgcctgtggtcaggttattaatgaaggaaggtggccacaaaggaaggtggcctgagcccaggaaggaactgagcttttatctacagaggtcagcaccttgacggtggaggaggttttgttcctccttcttctggttgcagggatacctgcaaacaagtttgcaccctaagaagtctcagagtccagggtgaggcttagccccaaagctcctctcctttgaagttgactggwtgcaatggtactgcagagcaggaaacatgggaagtaattatctttttagtaggtcactggcctcctttgggagaagagaccagagggagaggggagaaggcgaatggcgcggcccccccagaggctgcgcctgcagtagctgccttggtgattaatagccatgtcacatccgacgaatattgccttaagcagccgcgttcaaaattgagtgggaatgaaataaaacaacccaaaataaatgtttcctctattccttaggagttgctggaatctagaaatagcttttcaaatctataattttaaatggcatcattcacagcactctgcgagcccggctttattctcacatggatatcgctgtgcgcacaagcaccactttttgattttaaagaccatgaaaaatttgagctaagtgacttttttttggtattgaaataaaaattatatttacagagagaaatatagcctttgtatgtgtttttaaaggaaaatagtaacccagtggaggaaaaggatgggaagaatattgtgtccacatagatcataaactggaacaataaaaatgtctggcaggcggtaattgctggccagctgcagggattacagccctgtgagctgtgttcagggccctgtgccaggatgctggcaaccagagtccaggcctggactgtcatggcccttggtgaggccaatggggcctgagagcataaataagagggtgaccacagcatggcagggcagggtctctcacgggccaggccctctggggaccctaagtcttgaggccctcggtctctgctacctctgctgttgccaggctgcctgcatggggctgatggtggcagtcacagggctgacctcttgctgcatctttgggtgggagaagcttcagtagccctcagtgtcattcctccttggagaagccagagagcacatctgatgggtggtgagaagtgagagtaaactccctgctsagtgcttggggattgtcagggtcttgggccagagggagggaaagaaagagttgggtggtgcctactcttctgcccacccacttgtttccctctggcccctggcaggaaagcctgtggtggaatggkctattgggcataggggaggctccttcctttcatttcatcttctatccctgtcctaactgccctggctcccagccagcacaccagtgtctgagaattgaattttgttcagagcatctaatgacaagcaaacgttccaaggagaagcagggaagggtgggtggaggggttgctgtggagctgctgggagttggcaggacattcatctgccctcctgcctctgtctttcctgggtgcatatgtcaggccaggctggggcaccagaagactgagcgggccttccctcagtgggctgagtccagtgacaggtgctgttttaaaatgtaggttgtattattactcagtatggtgagcttggcagatcagaagaggacagccattgaaagcatagtttgttactcacagttcccaagagaaggggcacgccatgccacgcagggccacacggggaaacaatagcattggttagaagggagagggcatgaagggaaaatgtgggcaagagcctttattgtggtttccacaggaagagatgggcagggttggtaagcaggtttaagactggctagtatggataacttcagaaggctctgaggcataggatctgtctgtcytgagttgtctggtacctggccctggggagactasgttaggccctgagtggaagagacagataaaggaagcagcgggaatggggtcytgaactgattcatttgcatatgaaaaatgcactcaaagggagtcgtttgctgtcttcagcaattagctggccctgggagcccctgtccctccagggtcagtaaagtctcagatgtccaagcatcagaggcacatggttaacacaggtgcacatgacaccagctggaaagggaaggtgctgggcctcgcaggaggggcaacatgaaatgctcagggcattccagggaaaagcaacttcctgctttggttggtttggttctgtttagttttgaaggggtgtgccaaggagaaggggagaatcagagaagtctcaatttggggagagggcatgtggctgagccaccaaaaatgagtccaattagacactggcagttaggggtggggtcagctgcaggcagagagccctgcttggacagaggtccaggatgggaagcrtctgaaggggcttagtgggagaaaaggctggaacactcaagtcaagctatagcggactcttgaatgccaagctgaggcgtttttggattttattccctacaagctggccagagccgttttgctccctagaagttcttccagtaaattcatagactcacatagaatgtctgtgcttggctgtatatcacagttacagaacataattaacaaattaggatgctgatgccaatttattctggatggaataaaaaatgcaatgtggctaaaaactcagtgctccctgggccagcaggtaatgtcagggagtggaaagggctctggcgtcctcaggggatagccgtttcctgcctggagggttgggcttctgagttccagcagattgcattatgggaatagagtccggaggtgccagatcttcctatttttaaagaaagtctggacatttagattctcgtgaacactcttgatttttgtgaaattacctgggaactcagcagtggattaggagaacataactcctctctgtcagcacagggagaggcactgcgaggcctgccacatggagccttggtggcctctttctgctcttcacccatcaccccaattgtggggtcaaagaggaactgtgagggtcaaagaggaaatggcaccgctacaaggtgtgcctccattgggaaactgaggcacaacaggtcggggtcagatctggcatccaaagaccttctctgaggtctccagtggccactctgctttgctttttttgcatttcctcatttgtgaaatgaattcattctttcattcattaaatgaatattgagcttatggtggccaagacaaagagttcgccatagaaacaaattttgatgagatgctgtttaaaattgtactattggccaggcgtggtggctcacacttgtaatcccagcacgttgggaggccgaggcgggtggatcacctgagttcaggaattcaagaccagcctggccaacatggtgaaaccccgtctctaccaaaaatgcaaaaaattagctgggtgtggtggtgggtgcctgtagtcccagctactcgggaggctgaggcagagaattgctagaacctgggaggcagaggttgcactgagccgagattgcgccattgcactccagcctggacgacagagcaagactctgtctcaaaaaaaaaaaaaaaaaaattgtattattatcgtacttatttttcagccaaaaaaaaaaaaaaaaaaccaacctaacaaacaacaacaacaacaaaaaagaaaactaaatggtgttgtggtcaatcactgcttttgctgtcactgtgtgggtaaaatgtcctcaagtgaagctctggagcatggggccatgcccaaggctctctctgcacgtgccgccttttctgggttttctccatgtcccaggctctgggctcagtggctgggactcagccttcttgacctggtaaatgtccagtgcctagcatgatgctgggcacagggcagacacacagatgtcccccagtggggtggattgcatgtggccattgtctggttttggtaggtaagagtctagccacaacaaccatagataaagctacagtagaatcacagcatgtaaaaatggaagttaagtgagaggaacacatggaatttgtaaaatgattatgttaatcagcctgggctgctgtaacaaaatgccatagactgggcggcttaagtaatagaaatttatttctcacagttytggagactgcaagtcaaaagtcaaggcactgacaggtctggtgagggcgcttttcctggccggcagatggctgacagccgccaccttgctgtgtcctcacatggtctttctcagagcatgggtgtggggagagagggacctttctcttttctttttataaggccaccaattctatcagataggatccttaccacctaatttaattgcctcctgaaagccctatctccaaatagtcacattggttgttagggcttcaatatgtgaattctggggcgacacagttcagtccttagcagtgacctaacatcatgatgacaccactactggctttgggatttttttttgttattttcaccgtgatccagcaaaagctgagaggtttccctgtagactgacagccttttcatttggagccacgagcctgctgtggttgggcgtgaactaggatggaggggcaggcatggatgaagggcgggttggggtggtattcttgaaacagtcatctgtggggtggttagactgtgcctgggggaagtctgtgctcttacaaaatgaggctgtactcacggtgcttgcacgcggccttccttgtgtgtgcttatcatttgtcctcaccacccacatgacagcaccagacttatgagatgccttaaacactaaaaagattatgatgcccttctttcaattacaaataaacacaatatttaagtataagattatgtttaagaaagtctttatcaaatataagatttttaaaacaattgcttcttctctttgagtggttgatggatgttctcaccccattggtgtgtgaagcaaaggtttgcccaccatgcttgataacatagcacaatgtatgtgtgtgtgtgagtgaaatgttgttctttcataaaccagcgttaaactcagagctgttcaaagacagcatgctgctgaatgtaggatgtagagcatcaggctgcaaggggcagagggtgacctctatgaaaagcctgggctctttgcaatctacaactatgagatcctgggggatttgtccctgggcattgcctgtggggacaatcccacaccactttaaaaattgttccaaggaaagcctttgttcacctgacatagcagcctcagagtgcaacgcagatgctgtctgcagggcacagggatttaaggtgggatatggagaacaccttttccacatagaattgcaggggggtttaggtgggctaaaagtaatgacctacctgtgaatctgacaggagcaccagggttaatgtcaccctccttgttgagaatgtccttttgaaatatgttctagggtattgctcctgtcctattaattatgtaacaaatttagcaaagctgaataattaatgatcatggggcacttggaactataaaatgtcatgtaaatgttaaggagtaaaaattactctggtgttagatagatgtgctgctttaaaaatgttccacgctgggaaggttaacttctagaagagctgaaaagcttcctgttgggctttcctcaraaacttaggctgtcttgccctaaccacattttaggaaattcagatttctgcattctggagtctttggaaggcaaatggctagccagcatttttagctctggaaatgaagttacctcccgctcctggattttggtaraaatcgtgtctgttgattccctctassyggaggcagtttgggcccaaaaccaaggaagaggtgaagatcattgagcaccaaacacagaccctgcggctgatgccccacctggccacagccttggccctgaccttcgtcagcaggtgagatggctctcagggtttgctctcttagggtaagtgtgataccctggcatgagtaagaattcagagcagcaggcacaggatgtcattttctaactgtgatcaggaaagagtctgttgttaaaatcggatgcccaggttaaaagcatccttggatgcttaaaccactgcaaatgtttttaacctggacatctgattttaaaggatgccaaggtccaaatcttgattgtctctatattcagatgaatggaagccacagagactttgagaaggcwggagccaatgtttctccagagttttcaaaagtagcagacttgaacagttaaaagttctttatttctgataaaggttctaatttacagtaaagttttcaaaaatacgtccaggtgtgtgtgtatttggtgggggtacaggggaggcagggagtgaggagctttgaataaaacgtgtaccataagtacacctggaaattcacattctaccacaggctttcatttctgcctctcagctattcctccccaagtgctaggccattgtccagcacttgtgtgtcgtgttatcatcatccccgcattataaagataagaaacttaagatttatctcagatcacagagcctagaagtagtggactgggagtggagctccaaactctgggccctattctgtgttctttcctccctccataagcaattttgcttctcagtgttaactccartcattcatttctgaataatttagaattggcttatgtttgaaatttaacatgctgatggggaagctagtgccagggtttataaaaggatggtaatcagagagcccttggcatatctagtgtgctgctgactatggattgcccaggcgtcgctggcatggcggggagggattggatgggtgcacctgtgttcttattgtacacaagactggcaagtggaatgccagtgttccaaggtgcaaggacactgaaccctgcaggctgagctgcaggtaacaacagtaagatccatccatgccacctggaagaaaattaaaagcacttgcttccaccgtctcttacctaaaatgtttctgaatggtttttttgaggtttaatttgcatacagtgaaatgcatagattttagtttttagtggagtgagttttgacgcacatatactcttctcgtgtaataaacactaaagccaaatacaaaacatttccatcatccccaaaagttccctctgrcccctttgcagttgaccctcacctctccaccacagcagagccagttttctgatttctattcccaatagcttagttttgcctgttcttgaacttgatgtaaatggaatcataccatatgtattctttagtgtccaatttatttcattcaacagaaggtcttgatgttcctcaatgttgtggatagtttatttttattgctgaatagtaacatgaaatgactaaactgcaattagtttatctcttctactgatggacatttgaattgtttccaggctgtagttactatgaaaaaggcaaagtgaatattcttgtacaagtgtttcatttttcttagaataaatacctagagaggacttgctggataattaggtaaatgtatttttaactttataagaaattgccagtttttcaaagaagtggtactgttttacaggccctcaagcaacatgtgagagtttcagttgttcttcatcctgaccaacatttgtttcagttctttcttaatcatattcacactagtaggcatgaaatgttgtcacattgctgtttaaatttacacttatctggtggctgtcgacattgagtactttttcatgtgcacattggccattgtatatcttctctgtgaaagatctatttaartctcttgcatatttttctaaattgacttgtttatcttattgttattgacttataagagtttatttataacaaaaacaagcacttacttattttaaatatttttggtcagtgtggattttgcctttttattttcttaataatgttatttgggggagcagaaaattttaatactgcttaagtctaatttatccttttcttgttttatgattattgctttctgtgtcttttctaagacattgctataactgtaacttaatagtaagtcctgaaatcaggtggtaggtctgaccttacagaaataaaaaggaatataagagaatactatgaacaatagtatgcaacaaaatatacaaaacctatatgaaatggatgaagtcctagaaggaaacaaactaycaaaatataataaagaatacatagaaaattctaataaaccaatcacaggatattaggtaaataattttaaaacttcccacaatgaaaatcccaggcctaaacagctttaatagtgaattccaccaaacatttaaataagaattaatatcagtcctccacaaactcttccaaaacatagaagaggaaggaacacttcccaacttatcccatgtggccagtattactcaataccaaaataaggcaaagacattagaagaaaactatagagcaatatcacttatgaatatagaggtaaaaacccttaacaaaatactagtaaacttaatccagcaacatataaaaaggagtatacaccatgaccaagtgagatttatcccaggaatgcaaggttggtttaacatatcaaaaacaacatactacactgtgttaatagaatatgtgaaaaaaaacatgatcatccccatagatgcagaaaaagtatttgacagaatcaagtaccttttcatgataaaaacgctcaacaaactaggtatataagaaaactttctttacccgattaaagtcatctgtgaaaaacccacagttaacatcatatgtaatggtgaaagattgaatgctctctccctaagattaggaacaaaacaaggatatctaatttttccatgtctatttaacatcatgttgaggttctagtcaagacaattaggcaaggaaaataataaaagtcatgtaaactggagacgaagaagtaagctatccctatttgcagatgatgtgccttcatatatagaaaatcttacagaatccactaaaaatttattagaaatgacatgttcagcaagactgcaggatagatcaacaaataaaaatcaattgtatttctatagactagcaatgaataatccaaaaatcaaaaagaataaaatacttaaggataaatttaacaaagaagttaaagaagatgtgaatatatggaatatatgttcatggatcagaagatgtaatgttgttaaggtgactatactccctaaattaatctgtagatataaagcagtctctatcaaaatcccagaaacctgatctttttagaaattgacaagctgatcctaaaatttatggaaatataaaggaaccagtatagccacaacaatcttgagaaagagtaacaaagttggaaggctcacatttctcaattcagaaacttaatatgaagctgcagtaatcaagacagtgtggtactggcattggatagatacacaggtcaacagaattaaatcaagagacagaaacacatccctaaatttatggccagtttattttttacaaagatgctaagacaattcaatgaaagaaagaatactcttttcaataaatggtgctaggacaactggatattgatatgcaaaaaatgaagttggacccctatacagcagttaacttaaaatggagcataagcctaaatttaagacctaaaacaataaatctcttagaggaaaacaggagcaaatctttgcaactgtaggttaggcagtggtttcttagatagaataccaaaagcacaattacaaaagaaaaaagtgtatacattggacttcataagaggtaaaagattttttgtgcttaaaaagtcaccatcaagaaagtgaaagacaatccacagaataggagaaagtattttcaaattatatatctggtatatacatctggacttgtatctagaacatacatgaattctttcaattcaacaataaaatgacaaataatccaattgaaaaatgggcaaagatccaaagactttcctccaaagaagatgtacaaataaccaataagcacatgaaaaagttctaaaagtcattatttgtcaaggaagtacaaatcaaaacagcaatcagataaaacttcacacccactaggatggctataatgaaaaagatgataacaagtgttgacaagtatgtggtgaaatagaaacctcatacattgctggtggtaatgtaaaatggtatagtcgctttggaaaacagcttggcagttctccaaaatattaaacatgaaattgccatatayctcagcgcttctactcctaggtatataccccacagaaatgaaaacatatatgcacacaaaaatgtgcacatgagtgttcttagtgacattttttgtaataatgaaaatgtggaaaaaatccagatgtccatagattgacaaatgggtaaacaaaatatggcacattcacaaagtggaatattatttggcaatgaaaaagaatgaagtactgatacatgttataacatggataaaccttgaaaacattatgctaagtgaaaggagctactcgcaaaaatcatgtggtataattccattgatatgaaatttccagaatagtcagagtgatagagatggaaactaaatcagtggttgccagggactgaggggtaaaggaggtgtatttaggccagtcttgcattgctctgaagaaatacctgaggctgggtaattaatgaagaaaagaggtttagttggctcataattctgcaggctatacaagcatggcacaggcatctactctgcttctgggtaggtctccgggagcttttattcatggcagaaggtgaagtaggaggaggcacatcacatggcgaaagcaggagcaagagagagtaggataggtaccacacacttgaaacaattagattttgtgagaactcagtacagtgaggacaccaccaagcctggaggaatccacccccgtgacccaaatacctcccaccatgtctcacctccaacattgggaattacaatatgagatgtggaggggacatccaaactatatcaggagaaaatgaggagtgattgctaataggtataggctttctcttttgggtgatgaaaatattctaaaattagatggcaatggttgcacaactccytaaatatactagaaatcactgaattgtacacttgaaaaatatgaatgctgtggtatgagaaatatgtctaataaagctgttgagaaagagagaggaggaaaaaaaagaaatcaggttatgtgagtcttctaagtattttttttcccctcgaaattgtcttgctattctagagtctttgcaagtctgtttagatttatttgtgattgcattgaatctataaagcaatttgggcagtattgcatctttcagattaatgaagatgatgtatctctttgtttatacaggtgytcaatttatctaagtaatgttttataatttacagtgtagaaatcttgcacatttttcactaaatgtagtcaaaaggcattgatttttaatttaattcccaattactaatattttatagaaatataactcatcattgtgtactgacctgtattatcactaaatttacttattagtcatttatttgtagaccatttagaattttctacctgcacaataaatcaaatgtgagtaaagagagttttacttattttttccaatatttatttcttttaatttttgttttgttttgattttgccttattacactggacaaaaccttcagtacaatattgagtagcagtggtgagatggacatcctatattgttcttgacttcaggtgaaaatgcgttcagtatttcaccattaacatgaatgttcactgcagattgttattgtctttcttgtttgttttaatttttgtgggtatatagtaggtgttacatagtaggtgttacattgccggtattatatttaaggggtacgtgagatgttttaatgcagacatgcaatttgaaataagcacatcatagagaatagagtatccatcccctcaagcatttatcctttgtgttacaaacaatccaatgacactcttttagttattttaaaatgtacaattaagttattactgactatagtcaccctgttttgctattaaatagtaggtcttattcattctttttaactrtttttgttgttgttgttgatgccctttattagactgaggaaattcccttcaattcctagttggctgagtgtttttttcatgtatgttcaattttgacacaatttttctttctctatttagatagtcatgtgatttttctccttcattctattaagaaatgagttacattacttttcaaattttgagccaaatttgcattctttgaaattttttgttatatgcattttatatatatatatatrtgtgtgtgtgtgtgtgtgtgtgtgtgtatgtatgtgtgtgtgtgtgtatatacatatatatatatatatatatttttttttttttttgagatggagtcttgctgtgttgcccaggctggagtgcagtggcacaatctcggctcactgcaacctctgcctcccaggttcaagcaattctcctgcttcagcctcctgagcaactgggattacaggcaactgcaaccacacccagctaatttttttttgtatttgtagtagagatgggttttcaccatgctggccaggctggtctcaaactcctgacctcaggtgatccacccacttcggcctctcaaagtgctgggattacaggcgtgagccactgtacctggccatattatatattttttatattactagagttaattggctaatgttttgataaggattttttgtgtctatgttcatatggaatattgatttttaattttggtgcttgaaatttccttggaagattttgatatcagtgttatattgtcctcataaaaaaaataggaaagtgatctcttctctatttttcttaaggagtttgtgtaagattgctcttatttcttccttaaatgcttgatagtatttactaagatggtatggatatgggttttttgtttttttattggaaagtttttaatgactttattaatttctttaacaaatgtgagtcttcagtcttgccaattttttctcctgttttgttaccctgtattttttgagaaatttgttcacttcttcactaatttataaactatatgtgttaataatatttccttattataatattaatgactgtaagatctgtgacaatgtcacttcttttatttgtaaaagaaaacaatttttgtggcttccttttttttttctttttctcagccaattttgctgggtgtttatcagcttagttaatcttttcaaataacctgctgggtaaataatgaaattaaggcagaaataaataagttctttgaaaccaatgagagcaaagacacaatgtcccagaatctctgggacacagctatagcaatgtttagggggaaatttatagcactaaatgcccacaagagaaagcaggaaagatctaaaatcgacacactaacatcacaattaaaagaagtagagaagcaagagcagacaaactcaaaagctagcagaaggcaagaaataactaagatcggaacagaactgaaggagatacagacacgaaaagcctttaaaaaatcagtgaatccaggagctggttttttgaaaaaattaacaaaatagatagacagctagccagactaataaagaagaaaagaaaagaatcaaatagacacagtaaaaaatgataaaggggatatcaccactgatcccacagaaatacaaactaccatctgagaatactataaacacctctacacaattaaactagaaaatctagaagaaatggataaattcctggacacatacaccctcccaagtctaaaccaggaagaagtcgaatccctggatagaccaataacaagttctgaaattgaggcagtaattaatagcctagcaaccaaaaaaacccaggaccagacagattcacagccaaattctaccagaggtacaaagaggcgctggtaccattccttctgaaactattccaaaaaatagaagaagagggaatcctccctaactcattttatgaggccagcatcatcctgataccaaaacttagcagagacacaacaaataaagaaaattcgaggccaatatccctgatgaacatcgatggaaaaatcctcgataaaatactggcaaaccgaatccagcagcacatcaaaaaccttatccatcacgatcaatttggcttcatccctgggatgcaaggctggttcaacatcaatcaataaacataatccatcacataaaccgaaccaatgacaaaaaccacatgattatctcaatagatgcagaaaagacctttgacaaaattcaacacccctacatgctaaatactctcaataaactaggtatcagtggaacatatctcaaaagaataagggctatctatgacaaacccacagccactatcatactgaatgggcaaaaactggaagcattccctttgaaaaccagcacaagacaaggatgccctctctcaccactcctattcaacatagtattgggagttctggccagggccatcaggcaagagaaagaaataaagggtattcaaataggaagagaggaagtcaaattgtccctgtttgcagatgacatgattgtatatgtagaaaaccccatagtctcagcccaaaatctccttaagcgtataagcaacttcagcaaagtctcaggatacaaaatcaatgtgcaaaaatcacaagcattcctatacaccaataatagacaaacagagaaccaaatcatgagtgaactcctattcaaaattgctacaaagagaataaaatacctaggaatccaacttacaagggatgtgaaggacctcttcaaggagaactacaaactgctgctcaaggaaataagagaggacacaatcaaatggaaaaaacattccatgcttatgtataggaagaatcaatttgtcgtgaaaatggtcatactgcccaaagtagtttatagattcaatgctatccctatcaagctaccattgactttcttcacagaattagaaaaaaactactttaaatttcatgtggaaccaaaaaagagtcckcatagccaagacaatcctaagcgaaaagaacaaagctggaggcatcacgctacctgacttcaaactatactacaaggctacagtaaccaaaatagcatggtactggtaccaaaacaaatatatagaccagtggaacagaacagaggcctcagaaataacaccacacwtctacagtcatctgatctttgacaaacctgacaaaaacaagcaataggaaaaggattccctgtttaataaatggtgttgggaaaagtggctagccatatacagaaaactgaaactggaccccttccttacaccttatgcaaaaattaactcaggatggattaaagacttaagacctaaaaccatcaaaatcctagaagacaacctaggcaataccattcaggacataggcacaggcaaaggcttcatgactaaaacaccaaaagcaatggcaacaaaagccaaaattgacaaatgggatctaattaaactaaagagcttctgcacagcaaaagaaactatcatcagagtgaacaggcaacctatataatgagagacaatttttgcattctatccatctgacaaagggctaatatgcagaatacaaagaacttaaacaaatttagaagaaaaaaacaaacagccatatcaaaaagtgggtgaagaatatgaacagacacttctcaaaagaagacatttatgcagccaacaaacatatgaaaaaaaacttcattatcactggtcattagagaaatgcaaatcaaaaccacaatgagataccatctcacgccagttagaatggtgatcattaaaatgtcagaaaacaacagatggtggagaggatgtggagaaataggaatgcttttacactgttggtgggagtgtaaattagttcaaccattgtagaagacagtgtggcaattcctcaaggatctagaaccagaaataccatttgacccagcaatcccattactgggtatatacccaaaggattataagtcattctactataaagacacatgcacaggtaggtatgtttgttacagcatgttcacaatatcaaagacttggaaccaatccaaatgcccatcaatgatagactagataaaggaaatgtggcacatatacaccacagactactatgcagccatgaaaaaggatgagctcttgtcctttgcagggacatggatgaagctggaaaccatcattctcagcaaactaacacaggaacagaaaaccaaacaccacatgttctcgctcataagtgggagctgaacaatgagaacacatggacacagggaggggaacatcacacaccggggcctgttagggggtgggggggcaaggggagggatagcattaggagaaatacctaatgtagatgatgggttgatgggtgcagcaaaacacaatggcacatgtatatttgtgtaacaaacctgcatattctgcagatgtaccccagaacttaaactataatagtaaaaaaawaaaaatcacactttgtgttgtatggttctataggttttgacaaagacacagagttgttccattcagtatcagacaaaattgtctaccacttcagtatcaaacaaaattgttccacctcccaccaaattcccttgtgctgtctctttttagttaacttcttcccacagtcttaccccagcaacctgtattttacacctatagtttttccttttctagaatgtcatacacacagaattgtaaaatatgtagtcttttggatataccttctttcacttaacaaaatgaatttcagattcatccatgtcattgtgtgagtcaatattttcctactttttattgctgagtagtattcgtagtattccattgtatagatgtaccacaggctgtttatccatttaactagggaggaacatgtaggttgtttctagtttttacaattataaataactactaaaaactattctcaacaagtttttgtgtgaatataaggttttgattgactagggcaaatacttgtaagtaggactggtaggtcaagtggtaagtgtatgtttaactttataagaaattgctaacgtgttttccaaagtggttgtatcattttgtgttttcatcagtgatgtataagggtgcagttgtcctgcatccttgccagccattgttattgtcagattttgttttgatttttatttgttttctgtctttctgatagttgtctctaatagtttgtagctttacatttttataacactaataactaataatgtttagtgtcttttcatgtacttatttgccatctgtgtatcttctttagcaaagtgtccgttctggtcttttatcagtttttcagttgagttgtttgttttcttattgttgagtgcaagagttctttataggttctaaatagactttttgcatcatatttttatttgcaaatgttttctccaagtttgtcactttttaaaattctcttaagagtgccttaataagagcaatagttttaaatttttgtttggttcaacagctttaaattttgatttgtcttgaaattgggtagtgtcagctctctaatgttcttttttgagaattgttttggctattctttttttttggcctttgcttatatattttagaatcatcttgttaatctctacaaaaaagatagatgatgtttttcttgggatagtattgacttagaaatcaatttggggatagtctgcctattaatattgagtctttcaatacatgaacactgtatatcttttcatttatttaggtcttctttgagttctgttttgaagtttccaacatacaaaccctactcatattttactatgttgatacctaagcattttacctttttgaaggtacagttgtttatttctaatatgtaggaatactattgactttagttctaggagcttttgttgggtagattttaataaatataggacttttcagattacctaattttttgagtgcttttcaaatttattttatctaatttgtcaaatttatggcgatagtgttggttgtaacattcccttttctttttaatgtctgtgggatcagtgcgatttctcccctgaaatcctgatgttttgtgtcctctttccttatccccactgttttgtctctctcacatcagtttggatagaggcctatcaattttgttgctttttccatattttatgtgattgattttctctatttttaatttaaatttcattgctatctgctccaatctttatttctttccttttgcttgctttaagttgctctctcttgctctctctctctctctgtgtctctatatatccaccccccccccccttttttttttgaggcagagtcttgcattgtttcccaggctggagtgcagtggcgccatctcagctcacttgcaagctccacttcccgggttcacaacattctcctgcctcagcctcccaagtagctgggactacaggtgcctgccaccacgtccggctaactttttgtacttttagtagagttggggtttcaccgtgttagccaggatggtctcaatctcctgacctcgtgatctgcccgccttggcctcccaaagtactaggattacaggcatgagccaccgcgcctggccttccacccccctctcttaaggtgaaaggttagattactgctttgagacattgcttcttgcctaatataatcaattcacactaaaatttcctttaagcattgctttagctgcatctttctcattttgacatgttgcaatttcaattagttaaaaatagtttaaatttctccttaagacttccctttccacccccgaattatttataactgctgtcatggtccaataacatcctttgtatgaattttattctttgaaatttatggctcagtaaaaatagtgttctatgtacacttaaaaaggatgtgtattttgttgtggttgggaggagagtattataaatgtcaattaggtcaagttggctaattgtgatctgcagatcatatatatcattattggttttctgcttacgtgttttatcaatgactgcaagaagggggttggcatttccaactgtaattatgaatttgtttatttcttctttcagttttatccattttttcctcaagtattttgaaagttttttttggttgttgttttggtgcatacacatgcaggtagcttcctagcatgacctggaaatttcacaaatagaaaacaggcaacagtgttatatgatcatgaaagtttaaattggatcaaaataacttgatgatgaaaccggaaaatttttcatatgcatgccaaaggaaaacagtttttttcttttttttctttgagttttccccagtgtgacttgtaactgttacagaggcaagactgtgtatacatttgcttctcagtcaactatttgcaaatttgtgacacagaagttattagactacataagaaagagctgctatatattctacatttataaatatatatctgtttgtcatatatctatgayaaaagtgttatatgtatcaacatgtttcctttttcttcagctctttttatattttggcttgatttaagcttgattttataagtgctgtgttacactgtyaatgaaaattaaagtttctcttgatcttagttagacactctccaggtacctgtatcagagacgtagacaaatgtcacagtctagctcaaggaaagaaacaagaggtgatcaatagaaattcagtaattgataaaagaaagaaccccagagcccttaccatgtgccattcatgaatgccgcattgaacaggacagatcgacacttgccttcaccagctgtcagtctaattgcccccaaggaccttctaattttcttgacttgggcctccttgcaccctccatggtctctggcccacctcattgtccccattatagctctgcagcttctttcctttcctcctgcttctttcattcccrgtctccctacatcacagtagggggttgacccatggaawatctggtcataggaatctccaggaaggcagtgtcccaattaggggaaagagactgccttcactttaacacaagcccaggaaaaagttggcacattctgcgacaacgttctggttttctagtttgctcctagtttactgtccctgctacctcttctccaacttgtaaggaratagcttcataaaattggttggagcatgacaaaattttatgctgactacttccccccaacacacatcttttctttttctttttttttctctactaagggtgtcacatcttggtcgtagggcccatctcctaactttccatgaatgtaggctgccactcaattggtttcaaggttcagggtctgggtaagtggaggtttgactggttagatgtttattcaatacatttgatcctactcaagtgcaaggagagtatacatctttaggtgtacaggtctggagttaggtgagcaggaaatggacagtttccagactatcctgagttcaaatcccagtctctccacttaccatcctaatgagcaattacttaaattttctggatgtgcattcccttattagaaacagagcatgaggcctggtgtggtggctcatgcctgtaatctcagcactttgggaggccgagatgagcagatcacttgaggccaggagttcgagaccagcctggccaacatggtgaaaccccatccctactaaacatacaaaaaaattagctgggcgtggtggtgggggcctgtaatcccagctactcgggaggctgaggcaggagaattgcttgaactcaggagtcagaggttgcagtgagctgagaacacrccattgtcatctagcctgggtgataagagcgagactccatctcaaaaaaaaaaaaagagaaacagagcatgaatgtcagtacagatatacctcagagacattgcagatttggttctagaccactgcaataaagtgaatatcgcaataacatgagtcataatttttttgtttcccagtgtgtataaaagttatatttacactgtactacagcctattaagtgtgcaacagcattatgtctaaaaaatatacatacgtctgttaaaaatactttatgctaaaaaaagactaatgagcatctaagccttcagtgagttactctttttgctagtggagggtcttgacttgatgttgatggctgctgactgakcaggttggtaattgctgaaggttagggtggctgtggcaatgtcttaagataacaacgaagtttgccgcaacaattgactcttcctttcatgaaacatttttctgtagcatctgatgccatttggcagcgttttacccacagcagaatttttttccaaaattggagtcagtcctttcaaaccttgctgctgccctatcaactaagtttacatgatattttaaatcctcacttgttatttcaacaatgttcacagcattttcaccaggagtagattctatctcaagaaaccactttctttgctccttcatgagaagcaactcctcatctgtgaaagttttattatgagattgcagcaattcagtcacatcttcaggctccacttctaattatcgttctcttgctgtttccaccatatctacagtgactttctccaatgaagtcttgaacccctcaaagtcatccatgagggttggaacatcaacttcttctgaactgctaatgttggtattttgacctcctcccatgaatcacaaatgttcttaatggcctttagattggtgaggaagattttcaattcacctaggtccctaagaggaatcactgtctatgacagccatagccttatgaaatgtatttaataaataataagacttgaaagtcaaaattactgcttgatccagggactggagaatggtggttgtgttagcaggcatgaaaacgacatgtatctccttgtacatctccctcagagctcctaagtgaccaggtgcattgtcaatgagcagtaacattttgaaaggaattcttatttctgagcattaggtttcaacaacaggcttaaaatattcagtaaactatactgtaaacagatgtgctatcaaccaggtgctgttgtttcatttctagagcacaggcagagtagattcagcataattcttaatggccttaggatttttgaaatagtaaatgaccattggcttcaacttaaagccactagctgcattagcccctaacaagagattctctctgttctttgaagttttgaagtaggtactgatgaaagtcctagatgaaaccaaggctgtttcacctatgctgaaaatatgttgttgagtgtagccactgtaatcactgattttagctagatcttctggataacttgctgcttaagctgtagcttctacatcagcacttgctgcatcacyttgcatttctatgctatagagatggtgtctttctttaaaaatcaagaaccaatttagcctcaaacttttcttttgtagcttcctcacttctctcagcctttgtagaattgaagagagttatgaccttgttctggattaggctttggcttaatggaatgttgtgattggtttgatcttccatccagaccactaaaactttctccatatcagcaaaagtctgttttgctttcttatcatttgtgtgttcactggagtagcacttttaatttccttcaagaacttttcctttgcattcacaacttggctaactctttgacacaagaggcctaacttcagcctttctcagttttcaacatgccttcctcactaggcttaattacttctagcttttttttttttttttttttttaaagcatttctagctttcgatctagaaagacatatgactcttcctttcacttgaacactcagaggccactgtagggttactggcctaatttcagcatagttgtgtctcagggaatagagaggcctgaggagcgggagagagacggggaaatggcaggtcagtggagcagtcagaacacacacatttaccaattaagttcactgtcttatgtgggtgcagtttgtgatgccccaaaacgattacaatagtaacatcaaagatcactaatgacagatcaccataacagatacaataataatgaaaaagtttgaaatattgtgagaattaccaaaacgtcacaaagacacaaagtgaatatgtgctgctggagaaagggctctgatagaattgctcaatgcaaggttgccgcaaggcctcaatttttaaaaagtgcgatatctgcaaaatgcaattaaatgaggtatttctgcacctactttgggttgtcaagggattaaatgaattaacacatgaaatgggcttgagacagggcccggcatatcatacatgctccagtgtggcagcaaggagcaggccctctgtgaccctactttgagggtcctaatyctgatcttgccacttgctaattgtataacatcgagaaggctgctgacatgctgtgcgtcagtttccccatctataacataggaataataatatctgacctagagggttattagaagaattgagtgagtgaatatttgaacatgcttagattagggtctggaggataataaatgcccaataaatgttagttgctattgccatcccctccagtaccctcaaactttctatccccctgtcccaccaattaccacattgtgatgatttttcctcctacattgaaattactcaaagccttccttccctgtcatctctccccgaccatccctggttgcacactctctccccattcagcctggccctcttcaaatccactctccaggaatcaccagcgccctacctgaaatgaaatctaaattcctacttgccagctgcctccctcctggggccttccagcatcttctgtactgggttatattagtttgttctttcactgccacaaagaactacctgagattgggtaatttatgragaaaagaggtttaattgactcatagttccacaagcctaacaggaagcatgactaggaggcatcaggaaacttacaatcatggtggaaggcaaaggggaagcaagcacctttttcccatgtcagcaggagagagaaggagcaaagcgggaagtgccacacactttcaaccaaccagatatcatgagaactcactcactatcacaaaaacagcaagggggaagtccacccccatgattcaatcacctctcgccaggcccctcccccaacacatgggaattacaattcaattcaagatgagatttgggtggggacactgagccaaaccaaatcatgggtcaagctcaagctcccgcatgtggccctggggtgccttccacctgctgggccttcccacttccaccccacccacacctctctgtcctctactgaggcctccacacctgtcctgtgctcctgctgtggcctttcttatagacgtctttcccctcacactcttgcttccctcacctgataatttagtgcttatcttttgagacccagttgaggctgccaacttctctaagacactctccctgagccccttctggaataaggagcccccatataagcttcctggagtagcagcctgggcccatcttgtcattgcactgttacttttggtttgtgattgtaaattctgtgagcacagaagttgcgaatcctcaatttggcatcatcacacctagtagcgtctggctctctgcacagattaattcacctacaaaatgaaattgccttgtgtaactacatcacacctggctgtgggattgcttggagctttgcctttaaatyatgtgatcatctttgaaacgtacatttctgaagggtccatgaggtagctggccaaggaagttgggagctgatatctccctttggaatcatctagtgggatttgctacagggatgaatttcctaacttagaaaatgattaacaattttaaaaaatcaatatttgcagtccaccagccaaagtgagtattttagggtctgcctctcctctttattccaggcgagcaactcaagcagtccaggatgcatctcaggcaaggaggggccacagcactgtccctgctgctatctttcaactggattcacttgttctcttgggcaatctccatttacccaatacctgtaagggtaaaattaagaaaatagctaacacayattcaagttcttgccatttaccaggcactgtcctaagatttcatgtgtagtaactcatttaatgtctcaagacaaatcaacgggacagagatttttctctttgttttttkattgatgttacaacagcacctgaaatgatgccttgcacaaagttagactttatgaatatttgttgaataaatgaatgagtgtaataaccctccacagtttacagaaattcaccaagtcttctctttgttaaaaaatgaagttaaggatagttaagcaccttagacattactcatccctgccatttgtgcactagatttttaaaaatatgattctaatagcttattgccaaaaagtcttgtttggtctttttatacaaaataaacttttataaatagaawcttgccatctcattgactttatggttttagatatattgtggtatttctcatgaatcttaccatgatggtgggttcctgatattgtttggctgtgtccccactcaaatctcatcttgaactgtagctcccataattcccacgtgttgtgggagggacccagtgggagataattgaatcatggggctggtttcctccatactgttctcatcatagtgaataagtctcatgagatctgacggttttataaggggaaacccctttcacttgtctcccattgtcttcttccctgccaccatgtaagacatgcttttcaccttctgccatgattttgaggccttcccagccacacggaattgtgagtccattaaacctgtttttctttataaattacctagccttgggtatgtctttatcagcggcatgaaayggactaatagagtaaattggtcccagtagggtgttgtgctgttgtaaacatatccagtgactttgaaactgggtaataggtagaggttggaacagtttggagggctcagaagaagaaaggaaaatgaggaaaagtttggaacttcctagagacttcttaaatggctttgaccaaaatggtgataatgatatggacaatgaaatccaggctgaggtggactcagatggagatgaagaatttgttgggaactggagtgaaggtgactctttctatgttttagcaaagagacaggtggcattttgcccyggccctagagatgtgtggaactttgaacttgagggagatgatttagggtatctggcacaagcaatttctaagcagcaaggcattcaagagatgacttgggtgctgttaaaaacattctattttaaaagggaaacagtataaatgctcagaaaatttgcagcctgaagatgtgatagaaaagaaaaacccattttctgaggagaaattcaagcctgctgcagaaatttgtataaatagtgaggaaccaaatgctaatccccaagacaatggcaaaatgtctacagagcatgtcagagacctttgcagcagcccctcccatcacaagccaggaggcctaggaggaaaaaatggtctcatgggccaggcccagggtcttcctgctgtgtgcagcctagggactttgtgccctgcatcccagctgctgtagcgatggctaaaaggggccatggtatagctggaggcatggctttacaggatgcaagccccaagtcttggcagcttccacatggtgttgagcctgcaggttcacagaagtcaagaattgaggtttggaaacctctgcccagatttcagaggatgtatggaaatgcctggatgtccaggcataagtttgctgcaggggcggggccctcatggagaacctttgctagggtagtgtagaagggaaatgtggggttgaagcccctacacagagtccccatcggggtactgcctagtagagctgtgtcctccagaccctataatgtcagatccactgacagcttgcaccatgcacctggaaaagctgcactcactgccagcttgtgaaagtagctggggtagggggctgtaccctgcaaagccaggggagcagagctgcccaagaccatgggaacccacctcttgcatcagtgtgatctggacgtgagacaaagagtcaaaggagatcattttggagctttcagatttgaccaccccactggactgtgaacttacagggggcctgtagcccctttgttttggccaatttctcccatttggaacagctgtatttacccaatgcctgtaccaccattgtatctaggaagtaactaacttgcttttgattttacaggctcataggtggaagggacttgctttgacttgctttgtctcagataagactttggactgtaaacttttgagttaatgctgaaatgacttaagactttgggggactgttgggaagggatgactggttttgaaatgtgaggacatgagatttgggaagggccaggtgtggaatgatatgatttggctgtgtgcccacccaaatctcatcttgcattgtagctcccrtaattccatgtgttgtgggaaggactcagtgggggctaattgaatcatgggggcagtttccgctatactcttctcatggtagtgaataagtctcatgagatctagttgttttacaagaggtttcccctttcacttggctttcattctgtctcttgcctgccatcatgcaaaatgtgccttttgccttccatcatgattgtgagcccttcccttgtgaaactgtgtgtccattaaacctttttgctttataaattacccagtgtcaggtatgtctttatcagcagtatgaaaacactaatacagttctaacagtttgtttaatctattttttgagtggatgtaacccataaacaaataccttgcatttcttgagacatcacctattaaataaacatgtttggaaatgagaaataattttgcctcaagaatccctatttcctaatttatcttttgggccacgatgagtttcttatatcagattttcttaagacatactcctcctgtactctaaaacacactgaacatggaagacttctcagactccttggttaaacaaatgtaagggtacagcaaagagtaagagccactggtgcacctctccacctggcagctggaagtttggctggggcctctcacagttcttttcttaaagactatttatttcttatttcccacctatttccacccctggggaatggggagagatgggggtgtgtgtgattggagagatcaatggggaatcatgtatacatttttttaaatacccatttctgagattctctgagagtcattgtattatagtcacagcccggagcatgggtgatgataatatagcatagatgaaaatgccacagacttccttagggcactgacaggaacattatctataatgaaaagaacatgctatttaggaatagagagccctgggtttaaatgctagctctgccctcacacatgagggaccttgactgaggtatgtttacttcagttgagcctcagttttcccaacaactctatgaaataggaaattatatctccattttacagatgcaaattcaaaccataaggagataccattacatatacactagaatgactaacattaaaaagactgtaaagaccaattgttggcaggaatgtagaacaactataattattacacaccgctggtaggaatgtaaaattgcataaccactttggaaaattatttggcagcttcttacaaagcctgaaatgcatctaccgtatgactgagccatttcacttcaatgtatttactcaagagaaatgaagacatgtattttctctaagaattgtacatgaattttcataacagttttatttgcaatagtcccaaactggaaacaaccaaaatgttcatcaacaagtgaatgcataaatgaatgcggtgagtacattacgtagaatagagtactactagcaataaaaaggaacaactacaaatatatattgtaatgtggatgaatttcaaaacagcatgctgattgaaagaagcaagacaacacacactctgcaattccatttacttaaaatacatctcacctatagtgtcaaagaacagttcagtggttgccttggggtgggagtaaagaaaggaatggagtgcaaaaagacatgaggcattttgttctgtagcttgattgtgatgctattctcatgggtgtgtacggttgtcaaaactcttcaagtggtgcactttgaatgaatgcatcattgtaaacatattatttctcaatattgttgattagggaagaagataagttgtttaaagcaaaaataggcatgaggtttatcacacatgcagaagatctgtatctatattttatacataatatgtatacatatctttatatataaaatctcaacagtagcaaagtggatgggggagtggaattgaggtatactgcattgttgtaaggtgcagaatttcaagggaagtggaattaaaaagttacaaatacaagaggcatgtgaaaccttttgtgtgtgtggttaaaagaaaataatttggaacctgatcctatgtgtgtagaccaaaataagaggagagttgagcataggtcccactttgtgctgggtcaaggggtgcctagacagatgtcagcgtaagcagtgaggcctgtaaatggattggaagaaaagttaacttggacagaaagcaaaggagaggttttccaatgggagaacgatgtggtggagactcatggttgcacgtatggtcatggtgcagggtgacagttttgacagacccatgaagactttggtagactttggaggagcaggtttaatctcgaggtctacgtcagatgccgacaggcctctgctgttcctctggttcgtgtttgcaggtataaatttttttgttatttttcttttgacctatttctctttatattttgagtgggtttcttgtataaagcatctagttgaatcttgattttttaaaagtcatgtctgacaatctccaaattaaatagtactgtttaaaccatttgcacctaatgtaactatcaataaacatagagttttagaatattatcctgcaactttttctctatatatcccatatgttctttgttcccttttccctctgctcttgtgtttcattgactaattaaataatttttaggtttccactggtagcgttttaactatgccactgttattttttagtgactatctacagtttaaaatctgcatcactgacatcatattctttcctcaaatagcgttatagcacttcacagataatgctccttcacacatgtgctgactgcaccgccacttccatcacacatgtctgctttgtcctgcaggtatgctggggccctcctggatgaggatgtcttccagggaaaggagctggtcaacagtcgctcgctgcaggctctggtggcrgggctgaaggcctacagcacctgggagaacatccgctgcctgcaggactgccgcgagtgcactggaggcatggtgagccccaaggcctgcagcccccgtgggtccccacgatacaacccacactgggggagcactgtggggcgggcagataacatgcttcagagtctaatagaaatcccaactgcccatgactctgggttccttccttaccagcytcatagtcttgtgtgtctccatcatatgatgctgccaggactgatagaatacatgtttgtaaaatgcctggcccatgaaggcacacaataaatatcatgaaacttmgtggrgcaaaggtagtagtggacagtatgggaaagggccactgaaggttcagatgatcaaasctctgctccaatgttttaatcccttgggagaacacaggaaatgaccccaagggtttccctcacccctggtgaggacacaggaggcagagcattcagagacttcctggtgtgtctccagccccagtctcagactggattgtgtggtgagaagcacaaggtgttagaaatcccaatatgaatatttgagggagttgagggggactctgagagcagctggatctgtgtgcagctgtgagaacagaagccctgcaggactctgcaggtctccacacccatgcgggggtccagagcccatgacaaagtgaacccaagttgggtgtctgagggcaggacacgcagcatgaggctgtggacctgtgacatggtggcacggcaggactgcaggatcagctgtgcacttcattygaatgcaagccagatgtggcagctactggaactccagaccacacccccagaggagaatggaaggagggagcccctgttggtctttggtctgaatttaatgctgaacttcatcaaatatttgcttataaacagcacctctgaacatgaaggggaagatgaagagttttagcttcagaagagaatggatcaagggcaagtcaagggcagctgtagaaaataaaagggaaaggatgagtttctggaaagccgattccctgccatccgtgtggagctaacggatggcacagaggggcaatggtgaagaggggctgagccttcataagaggcagagctgcgggcacagcctgagggcctctcccatgtgatccatggtgtttgtccacctgaaagctagcatgatcatttcttttaggtggctaagtgaagatgtgtccctgatgatggtggggggtggggcatgtctgcttcattcctatggggttgttgtgtggggtccacatggaaaagaaagggaatggagaatgaaataatagctggcctagggtgcagctggccaggagctgaggtcctccaaggcagctggggcaatggcgcgatgtgactctccttagctaaggagggccctgccagggggctggtttctacctgcatctccaggaggtggctgtcccttcagtgagcaggctgggagcagctgggaacacagcccagggattcgggggtagagtaaggaggttaggtcagcaggtggggggtatgacctgaagtggcccctcaggcagggacagcccacacagtggggtgttggggcactgctgggggccctgagctcagacactgtggccttgacaggtgactcakcctgagggcttgcgcagaacctcttgcaggctcctggtcctctgggctcccgtgactcattccctttctcgcagttcacaggtgggcaggcccaggggtctctcacccccaggccttcatagcctccctgcacagagaccctcctgcacccctcttgtcatcctaaccctcatcccttcgtcctggcctcagtgcttgttctgggaggccgtatttccccagggtcaatgctgagccctggcagtgccacccggaacaaccgccctcgcctgctctccagtgatccagcctgtcatgttcacctgtgctgccgaggaccacccagcagtgcggaaataaccccaccctgttagagaagacgcagtccatgctggaatgccagccccccaggcacgctgcctcacagaactctgcgcccagtagctcctgagcaacctggggcagagggccctaaaaggcaaatgctgtgtcctctgctcacaataattctgacaccagatgtgtggcttttccataacaaccagtcctctaattctctgtggacactaacagggtgctctgcaacagtggcctccaacctgtttggcaccacggactggtttcgtggaagacaatttttccatggatggttttgggggtggggggtgcggggtaggggagatgttttcgggatgaaactgttctgcctcagatcctcaggctttcgattctcatgaggagcgtgcagatctctcacatgtgcagttcacaatagagttcacgctcctatgagcatctaatggtgctgctgaactgacaggaggtggagctcaggcagtaatacttgctcccaccacttacctcttgctgtgtggcccggttcctaataggccatggtctggtactggtccatggcctggggattggggaaccctgctctacaatttaatttattctgacgactacctggagtgcatgcagactccacagattaaggcctcagttccataagtcttcccccaactttggatgctagtcacaaatagtggttctctgggttacccgcactgttattattattattattgagacagggtctcactgtcacccaagctgaagtgtagtggcacaatcacagctcactgtagccttgaactcctgggctcaagcaatcctccttcctcagcctcccaagtagctaggactacaggcgcataccactacactggctaatttattttttgtagagatggggatctcactgtgttgcccaggctggtttcaaactcctggcctcaagtcatcctcccatcacaccctcccaaagtgctgggattacaggtgcgagtcatggttcctggtctacccacacttttgcctaacctgtctataaatcaggagttcccatgaccctctccttaggttcaataatttgctagaacagctcacagtactcagagaaacacttaaatgtttactggaaataattaaggatacagataaacagccagataaagagatacatcggctgaggtccagaagggttctgagcacgggagcttctgtccctctggagttggtgtgtaccgccctgcttggcacaaggatgtgttcaccagcctggaagctctctgaaccacttattttagggatttttttttttttttgagatggagtcttgctgtgttgcccaggctggagtgcaatggtgcaatcttggctcaccrcaacctccgcctcctgggttcaagcaattctcctccctcagcctcctgagtagctgggattaaggcatgtgccaccatgcccagctaatttttgtacttttagtagagatggggttttaccatgttggtcaggctggtctcgaactattttagggatttttatagaggcttcatcgcataggcatgatcaattattaactcagtctctagctcctctgcccttcctggaggatggcaggggtttcagggagggcgataaaagctgtgagcttctaaccatggcttggcatttctsatgaccagcccccatccagaagctgaccaggagcccactaggagttgcctcattagaacaaaagatgctccagcacccaggaaataccaagaggtttaggaactctgtgtcaggaactggggtaaaagagtaaatttagaacaaagaatgcttctagcacctatcactcaggaaataaaaaatgttttaggagctctgtgccaggaaccagggatgaaacacgatgtacatttcttattagatcacagtatcacggccctgatttccatttttgttccttcccttctcctctccactcccaatccacttgacacctagcatggagatatttgtagagacacaaatatttgttgaaagaaaagaatgaacatcttctaattgttttaagctcatatgcatacatgctgcatcttcaggttggaactccctgggagtgaagtgtggacttgagtctgggggctactgagaggaaaccaaagaccatctctttttttgggttgtaggactaggcacatcttgcttcaaaaaaatatatttcaacacacatttactgcctttgaagccagtaatcctgggcatgattttgggccagttattcccaccctatgcctcagtttttccwtacataatatggagataacaaaccttcccttgtagaggttgtgggagttaaattctatgmgacaaagagcatcaaatgctcaacacatagactcaggaagtaggagttgatgtttcctcgatgtgcccaggctggggatttggagaaaagagataccacatggtctcttttgcttgccattgtaccaggtagacaggtggctgcagagcccagcacgacgaggcaggccctgtgcagctgcaggggctcagagtactcagtgcgaactgtggagggtccgcaagcagtgccacttgagcaacttaaggaatgagcaagagccttccaggtggggctggaggacctgctaggcaggggaacctgaactcaggatgagggtgtgggagtctgtggtgcactgagggacaccatgacaggcatgggctgggtctcagtgaggatgcaggggaggaaaggaataaagggaaaaagcgggaaccagacctagagaaggcccggagcctgtctgcacagctgcctacagcaggcactctgtggtgccttcaggccccagcaccacatggtgcagctgatccagtgcacagaggctcagcctgcagcactgcagcatggtgcttggcacatatggacacttcacgtcagctattctcacttatttccattttacaaatgagtaaactgaggctagaccatgagggcagtgagggcagggaccaagtccttgatcactacagcctaagtctgactgttgtgtggaatattcaggagatagctgtggactgagtgatgaccagctgacagacagatggacagatagactgatgtgcacagacattgaatgaatgaatgaatgaatgaacgaataaatgaatgaatgaatgaatgaaagaatgtcctgtgcatctgttttctttcttacccttaaaacttggaattaatccacaaaacttggcccccttgatcttttcttgctttattatttttttaccctgaacacttttttttttttaaaaaaacatgattttattgttacttttggagggagaaagaacactgtattgcctacagactactcataatgagagcaatgatgacattcattagctttaaaacctgcacaacccatmttgacagctcatttgttggggacagatttttatgttagtgtgtctagtttaggagatggggacttgagaagaggggagcatgagaaattattgtaaaatttaccaagatatgggtgcatcttgcacctaatttttgccactactctaaacatagggccctgtgaaatctttttcctctcaactgctaactttagtgtttgttgctatagcctaaaatgagcatcatctgtggagggcagcttcttggctgagcaaagtctatttgaaatcacatttattgcattatttttatcaattacaaaagtaatatatatccattgtagaaagttttgagaataaagaaaagcacaaaaaagtaaatatatcccaaaattatacttctcagagatgattcttaactgtctgcagtatattctttctgtgcagtgggtgtgtgtatttgaaattttagaacccccctaatttacctaagacttgatatggatattacttcaactctttactacaaccttactttgaagtaaaattttcatagccggtaccatttatcttgtaggtgtaccataatgcattcaatcaattcctcagcttatgtaaaattgttccattattataaacaacactatagaaaacattctagtaccttggcacctaacttttatttttgtgcatacctgggattgctttttgggaatcaagtatttaaatcaaacctgtccaacccgtggccctcaggcctcatgcagccctggatggctttgaatgtggcccaacacaaattcataaactttcttaaaacatttgggatttttttgcaatttttaaaattagctcatcagctatcattagtgtttgcgtgttttatgtgtggcccaagacaattcttgttcttccagtgtggcccagggaagccaaaagattggacacccctaatgtaaatgatgattggtattgtcagtacaggttaaaccaatttccactcccaccagcagctgaacacagaatgcttaattagtttctagaccagtggttttcaaattattttgaccttaacctgaagtaaaaggtatgctttcctttacaaatctttacaacccagtatttacaaagacacatgtatgaaattgaaaaaaggaattttatgaaacagtaccggcctcactattgtgaggtgctctcatattttcttattttgtgtcatcttttaaaaagcaagtcatgatacagtaagttgatttcatgacctgctcatgtgttgtagcctactgtttgcaaaacacagcccagactcactgatcaaacagaaagggtcttgctatatatagttgagagctgcaggtcatcagagtgtgtctgtggtgatcaaaagaagctggagtttccrgggaatagatttctcagccctgctagaaaccaaaatctggcttctgttgagaccaaaatatgatcatttagttttcactggaatgttattaatttggcccttgagacttmagatttgtatttgaaagtgggaaagagataaaggcctycaaatgtctcctgagcattgacacagaaagtgatcagttttttctaactgcttggtttatcttggatctgggcggaatgagtgcacacagcagcccctcacgtttggcctcactgagaattcatggtcccagcactgctgctcttgaactcctctgtggaaacctttggattccaggattctttctctccacaaattgatgtttccataacacttgatggtcaattttaataacattatcactctgtgttaggaaatcacgagaaagtcttaaactagctatttctacaggaaccttggcaattgtgctttctttgggttgaatgttgcaagagtaatattctgttacttaaggaacgttcttagcagtgaggtagacacgtgcagagtacaaatagaagggaaactttggaattaaatcatattttagtcttttaactcctttgtttctgagttctaatttttcaaactatctttacctttgtggtataatctgttcctttttgtgcataaaacctgcgataaatgagatttcacacaagaaagaaaaattgtccacaatatgatcgttaaatgaacgatactggttggaattttcataattcatattcatgcaagcacctcatagcctcaatgactgctgattaagaatcattgctaagtattgctaaattctctttatgtgcagaacagtgtactaggtacatgttcccgggaagccaggtaatttgaggggcactgtacactgtgcatggaattgcaaggccctgaggtttcagcattagcagacttctgatcaagatgcagcaacaggcagcagatataccctcctgactgaaataatcaaaaaatggacaatatatgtatgctaaacagtttgcaagacaccggacgtcactggacagctgctgacattcccctgtgcaagcttccagcttccttatctatgtttgcagctccatctttcaggctgctgtttgttagaaaaaaaattatttctggggctgtttttgttagaagggaagttttgctgaggactcatttgccctcatatctgcctaaataatttctatctcctatatcattatgtgtaaaagaacaaagatgaggatgacaacagatttctcattagaaacaaggcaagtaaagagacagtagaatggcatctttaaagtactaaaagggaagaaaatcaatctaaaattctatatccaacaaaattatgtttcaaaaataaaggtataacaaagatattttcagacttgcaaaacttgagataattcatcaccaacagatctttatcataagaaatattaaagaaaattcttcaggcagaaggaaaatgataccagatagaaatatagatttatacaaaggcatgaaaagcaccaaaagtagtaagcatacggataaatacatgatgtttttagcacttaaatatctttaaaagataactgcttagacaaaaataataacaatgtagtgtgaggtttataacatccatgaaaatagaatgcatgacaatagcataaaggccaggagagaagaaaagaaagtacactattgtgaggtccttagactatgtgtgaagtcatttgctattatttgaaagtagactgtgataagttaaagatgtataaggtaggaaaagaagaagtatggaagaatgaaaagattattcacatagaaaacaaatagcaaaatggtatatttaaacttgactatattaataaacactttaaatataaatatcccaattcaaaggcagaaattgtcagactggataaaaaagcaagaccaaattatatgcctacaaaaaacccacttcaaatagaaaagtataagtaggttaaaaataaatggatgggaaaagatgcaccatgttaatgctagtcaaaacaaagctggagtgacaatgttaatatcagacaaagtcgatttcagagcaaagaatattgccgagaataaataacatcatttcataatgaccaggggcctgttcctcaggaggatattacaattctaaacggttaggcaccaaatcataatcctatgaggtggctactttggttatcttcagtttacagatgagaaagctgatgtggccaggcgccatggttcacacctgtaatcccagcactttgggaggctgaggcaggtggatcacttgaggtcaggagttcaagagttcaagaccagccaacatggtgaaaccccatctctactaaaaaaaaaaaaaagttagctgggtgtggtggtgtaatcctggctacttgggaggctgaggcataagaattacttgaaccctaagaggtggaggtcgcagtgagccaagatcatgccactggactccagcctgggtgacagagtgtgaccctgaaaaaaaaaggaaggcaggaaggaagggagggagggaaagaaagagaaagaaagaaagaagaaagaaagaaagaagaaagaaaagaaaaaaaaagaagagtgggagggagggagggaggaaggaaggaaagaaagagaaaggaaggaagaaggaaggaaagaaggaaggaagaaagaaaaggaagaaggaaggaagaaaagaagagagggagggaggaaggaaggtaggaaagaggaaggaaaggaagaaggaaggaaagaaggaagaaagagaaagaaaaagaarragggagggagggaaagaaggaaggaaggaaagagaaaggaaaggaagaaggaaggaaagaaggaagcaagaaagagaaagaaaaagaaaagaaaggagggagggagggaaagaaagaaggaaggaaggagaaagaagagagaaagagaaaaagaaaaagaaggaaaggaaggagggaaggggaaggaagagaaagaaaraaaagagagaaaattgaggctctgagcaattgggtggacccaaatcccattaggggatttgaagtctgatttatctgaccctagagcccacggtgatatggtgaagctacaaccagaggagagggggaaatcacccctggagcacctggggaagcttccccaagcagggtaagttcagctttgcagtacagaatgagcagaagtcactgggtgaatgagacccccttactctctgcatttgcacacaggtcctatttcagctttacacacctcttagtgttaggaaatccttacctcccaaagatgaggtactaaactccatagggcttagtgcttctgataccccaaacctgaccttcctacggattctctgtgctaatgaaaaggcagcttattgccgtagcagacacagcatatttagggccccagacccaggtatgtcctggcctggggctgcagggtctttttgcattttatttgttttttttaatagtcaaaagcacatcctgtatgtgtagatacctttattagtgcttacgtggagtaacttagctaattctcaaattgagtgaatactattattagtcttactttacacaagaaggaaactgaggccagaaagattaaataatttgccaaagtttaagtgagtttaagtgctaaaaaatggcagagccatacttttatttttttatttttatttttattttttgagacagtcttgctctgttgcctaggctggagtgcagtggcatgatcttggcttactgcaacctccacttcccaggctcaagcgattctccggcctcagcctcagcctcccaagtagctggcacgtaccaccacacccagctaatttttgtatttatagtagagacgggtttcactatattggcaagggtggtcttgaattcctgaccacaagtcatccacctgcttcagcctcccaaagtgctgggagccaccgtgccaggcctcatgctttttttttttaaacttttattctaggttcagggttacatttgcaggtttgtcatrtaggttatttgtgtgttatgggggtttggtttacagctaatttcatcacccagctaatagcatagtcctcaataggtagtttttttatcctcacctcctcccatcctcaagtaggccccagtgtctgttgttcccttctttgtgtctgtgcgtactcaatgtttagctcccacttatgagtgagaatgtggtatttggttttctgtttctgtgttggttcgcttaggataatggcctccagctccatccttgttgctgcaaaggacacaatctcattcctttttatggcagtgtagaattccatggtgyatatgtaccacattttctttatccagtctattattgatgggcatttaggttgattttatgtctttgctattgtaaatagtgctgccatgaacatacgcgtgcatgtgtctttatggtagaatgatttatatttatttggacatataaccaataatgagatttctaggttgaatggtaattctgttttaagttcgttgataaattaccaaactgcttttcacagtggctgaaccaatttacattcccaccagcagtgtataagtgttcccttttctctgcaaccttgccagcatctgttatttttttgactttttaacaatagccattctgactggtgtaagatggtatctcattgtgattttaatttgcatttctctaatgattagtgatgttgagcattttttcatatgcttgctagctgcatgtatgtcttctttgaaaagtgtctgttcatgtcctttgcccactttttaacagaattgttyggtttttacttgttaattgtttaagttccttctggatgttagacctttgttgaatgcatagttggcaaatattttctcccattctgtaggttgtctgtttactctgttgatagtttcttttgctgtgcaaatgctctttcatgtaattaggtctcatttgtcaacttttttttttttttttttacaattgctttggcatctttgtcatgaaatctgtgccaaggcctatgtccagaatggcatttcctaggttatcttccagggtttttatagttttaggttttatatttaatctttaatccatcttgagttgatttttgtatatgctgtaaggaacgggtccagttccaatcttctgcatatggctagccagttatttcagcagcatttatcgaatagacagtcttttcctcattgcttgtttttgtcatctttgtcgaagatcaggtgatcagaggtgtgtggccttctttctgggctctctattctgttccattggtctatatgtctgtttttgtaccagtaccatgctgctttggttactgtagccttgtagtrtcatttgaagttaaataatgtgatgccttcagctttgttcattttgcttaggattgccttagctattcaggctctctttggttccgtatgaattttaaactagtttttttttttctaattctgtgaagaatgtcattggtagtttcataggaatagcgttgaatctgtaaattgctttgggtaatatggccattttaacactatcaattctttcaatccattagcatggaatgtttttccaattgtttgtgtcatctctgatttctttgagcagcgttttgtaattcttattgtagagatctttcaccttcctggttagctgtattcctttttgtggcatcacgttttgtggcataacatgtgaacgttagctttattctttttgtggcaattgtgaatagmactgcctttctgatttggctctcagtttgaacgttgctggtgtatagatgctactgatttttgtacatcaattttctatcctgaaactttgctgaagttgtttatcagctctaagagcttttgggtagatcctacgaggttttatatatctagaattatgttatctgcaaacagagataatttgacttctgccctttctatttggatgccttttatttctttctcttgcctgattgctgtggctaggatttccagtactatgctgaatataagtggtgagagtggcatccttgtcttgttctggttctcagggggaatggtttcagcttttgcccactcagtatgaagttgagagccatatcttaaacccagagactatgtccaaactcatgctccaaaccattttgccatatgaaaattgagttgtgttggcttctgccctctctgcttcagaaaatagyagagtcctccttaatgggatgagcacagtttggctctaacttgtaattttccaactatctgaatttgggtaagtcctcacttcccaagcctcagtttccaggtgtccatagacatgctttgctgagctgccccgtggttagtgttagctggaggggaccttctcatggcggtggaagtcagccaccaggaccagacccttcttttcctattagtctttctgagatttcctgctgtttccccctgttgtccagctgagagaagtgaggtgggatttggttaaattactcaccccagtcccctttggtgagtcaaggagaggctggaactggagttggcagaactctgctcttggcgtgcagctgtgacattcccagtggccagtgcttcatgcttacacatgttctgcatttcagcctctaatcgcagtatgtaaggggagaatcaaactgacctcctttgaacgtgttgaaaacccttcacctgcccttgtgggaacactgcctgagagccgaactctgctggctctgattagtcatgtgacgcaggcctggcagtttcgcttcrtttcccactttcttgctttaaggattgggtggggtcaaccaarttcttcagactgttgatatttagttctgctttcacattgcctcttttctccatattcaagcaaacctagattgaatttctaaaatcctgagagaataataggggaaacagccctggatcttgcatttctgccttacagtggagagggggcattctaagagatgggacaggtcccttgtcatggaaggggagctgctggctttggtgtggttggaatctcatggtcagggctctgtgatcttggactttaccactgggagcctcagtttccttctctcttaaggcccagaacatggtagatattcaataaaacttgattctctttcctttcccttttgctggttgtagtaacagatcacactgaaagatccgaactctttccccttcccttctccccctctgcctccaggacccattagacatgggagctgcctggttggggttccttgggtgtggcttgggaccatggaagaaagccatcttctcggccactgctgacaccaaagcatgggggtctacaggtctgggaccagaacacaccacagggtctccactgccyctccacttgggagagctggaactcaagcccagctgctggccttggccctgcacaaccacattcttyacaaggacctcctgcagtgtctcctggcccttgtgttacctgagcccggatgcccatggccagggccggtgccctccatcttggctcctttgaaaccaacactagaaggtgccactctcgtgtcaccgtgccctcagggccagtctccacagcaggactttgtcttcccacatcagtggagacccttctcatctctgcccccagctgccctgtttctcctcagtgcgttccagaatttcacaaagaagaacagaaacagccaaagcagggtgaaaaaaatatctacaaaattggagcgcagtgaagtctcraaaaagctctgcaacctagcacaatgataaggttatcagcaaacatgcactgatccctcctttcacgttagacgcagagctgctctttgctgcttggagatgtaatccatccgggcagcgactgagcgattatatttaatgattgcatagggaacgctgaagcaattccaagtgtttgtaaattttttcagaaagtgatgtgaggcagagccctctgcttattcagtagactttgtcccaggactaactcctcagggacattcaacaccacctcatttatctggcatcagccaacscttggaacagagccaaggcctgaaataaacaaaacagatctctgggaatcacaaagagatgttgcaaagcccacgtactggagctcaagcccttactccactcctgaaggagcctgtggcctctgttcctgcttgttccatgtggcttctggtttctgtgggctgtagaggaagggcagagggattgtgaakgtagacagctaagaccactcaggagccagggaccaaggaagatccagaagaactaaaaaaaaaaaaaaaaaaaaaaaatagactgaaaaatccaaaagcacagtgggctcctgctcagccctaggcgggactcgaagctcgtctggaacagtcctccagscaaagtgggcaccaggcaagcagcagactggtgcgagcagagacagtcattcgggggtctcccctccmmcctggatgctgcagagttactattcaytggaataacatagatggtgtttgtttaaatacctcacagcaacccccgagacacgtacatttcactacagaccagtaggtcagcttgacttagatctgatgtggcagaggcccttttgctccctatacaatttcttaagaagcagaaccatgaaaaattctggctggtgcttgggtcatgaatagctgagtccagctggctgggattgcatttgtgggcaggacagggtcgagctgagcttcaccataatgccaagtgacttgtgggtagggtggaagaagttcaggcatggtccatactcagagggtccaaggctggatctggcaaacctcccaagaaggatctgtctggggtccaagtgtcagtaaggccccctagtagaagggccttctcagtggttactgtgacaactttatcagccagactctttgctcaagagtctcatttttcccgggcatcaactggtttctgaccaactccctttctattttattggtcagagatctctttctctggaagggttgagagccatcaagaaaaaaccccaaagttctggggctctggattaaagcctaggcttcccctttcctctgctgttactttctgagaattctgctgaccctaacctatttggctatagggatttacaaagacagacgataaaaatcaccttgtgattataaatgattcaactttgaaagaaccttgctccaagattagaggaatcagctcttattttttttwaaaaaaatcatttttgactccctgacattctcttgagtccctgctatgaagaagcactagggacatgtatagatgctgccacctttaatcctccaatagtcctgtgagtaggagttattatccttatagttttcccatggaaggacgaacaaggccagaagtgagatgttatttctcyaaatctactgaaagacagaggcaaaggttctacaggccttccaaactaaggctattatccctaattcaggaccttgtccccttttttggcaggtgataactttcttccctggccctctgggttccatgttaatgaatgttctacacttaaccctcatttaacataagtccttggcttttaaacaatcctctgtcttttttttatttttatttttattttatgttattttattattattatactttaagttttagggtacatgtgcacartgtgcaggttagttacatatgtacacatgtgccatgctgggatagcattaggagatatacctaatgctaaatgacgagttaatgggtgcagcacaccagcatgtcttttgatgttaatttgtggttactggaaaaaatcgctccccagtgagaaagtccgtatgtcatctttgtgagtgtcctaggttagtaggtcctatcttgtcaggcaaattagagggggaaagtagccagcagtaaaactgaccttcatcactgataaggaaaagagagattgctaaaatgacccagggataatccattttatttggcaacattcctttgagggtctcagcccaaaatttttaacggcataaacaaggcaattataaatttcataaggaatggatagcggccagacatattagagaataatggacagaactggcatagatcctgggccaatttgccaaattttgatccacggtatgttgtttaactttctcattttactctcccttgggccagttcagtccagaaggattcaccccatatcccagcaaggaaacaagaaggttggtggcagggagatgaagttttacaagttgacttctgaatttgtgatcatcttacatcttagttaagattattttggatgcaaataaaagagatcaattataaactttctccagcaagaatgaagaatcaatcttaaggaggaagggtggggggtggagagagagagagagagagagagagagagagggaagttctggaatttagctctcatgagaaccagggactgggaaggggtctggagtccccgaatctgtgctagagggtctctctctctctcatagtctgagcctttgcacctcttggtgtctgcccattcttgctcttctctgcatttgtgactgtccatttggaatttatagcatctcttttccagccacactctgagatggtgtttctcagatcaaatgctgaatctgcatctcagttgagtcagagtcctctccaactcagccacttctggttagggaatggggtcacgtgttatgaacgtgccagcggacgtcccatctctgtaggtgctaagacagttcccaaaaaatagcagctgagtagatatctattataaagtgtgtggtagttttgaaaatattttctaatactttgaagctggtgtatagaaatggagtttaattttgtatgttgatcttataatcaacaacctagttaaagtgccatattaattctaacgatctgtttgtagttcttttgggtttcctatgaagatagtcctatcacctgagaaaaatgwtagctttgtttcttcctttccaatmatttacatttgtttctttgcctatattatacaagtggcaagagtttccaatgccatggttaattaaaggaagtggttcataacaggcacctgtattttatccttggctttaaaagaaatgtgtttactatttcaccattaaggatatkattcggtgtgggacttgtgcagatattctytattatgttaaggaaaagcctgttttactcttcctttataaacagttttgtgcatgtgtgcatttattgagtggttttaaaattaaatatattcattttatggaattatttatctgcatttattttattgagatgattgcacattttcttccttttaatctgttaatgtgatgaatttacattaacagattttctaatgttaacaaatcttgagtttcaggatctatacaactcagtcatgatgtatgtgtgtgtatttaaaaagctgctgatttcatttggtaatatttgtttagggttttctgctctgtgattatgaatgaggttggcctctgctattcctttctaggggtgtccttaacctagtttggatatccaggctacatcactctcattaaatgacttgagggtgtttcttatttttctgttctctggaagagtttgtatagaattgaattatctgttccttgactatttggtacaaatataatgataaggctaaacagaccttgtggtttctttctaagaacatataaaatgattggttttgtttctttccttgatataagctattcaggttttctgttcttgagtctgttttgctaatttttattttcctagtaatttgttcatttcttcttagttttaaaatttatcaaccataaagtccatgatacccttttctctttttagcccctgttgtatgggtatttatgcccctttgccattcctaatattgtttgttttccacagccgccttgtcacttgatctattttgtatattttttcaaataataagtttttggctttgttgatcctctccactatatctgatttttctatttcattgatttttatctttattacytcttttcttctgagacaaggtttcactgtgtcacccaggctagagtgcagtagcgtgatcgtggcccttgggctcaagagatcctccctcagcctcccaagtagcgtagctggtattacaggtgtgtgctatcatgcccagctaatttttaaaatttttgttgaaatgggggtctcactgtgttgtccaggctagtctcaaactcctgggctaaaatgatcctcctgcttcagcctcccaaaatgttgggattacaggagtgagccaccatgcctggccattacttattttcttctactttctttgggtttattctcctgctcctcctatagtatcttaatttgaatgttatcttctccatttctctttttctattataaacacttaaaatgataacttttctttttaaatgctgctttggtcatatcaaccatgatttgatatataagattttcagtttattgattctaaatttattttaatttccatagtgactttatttgacctatgaattagttgattatgtttttcagtttctaatgtctggtgtttaaaaaatatagccaacatttgttgaattcttactatatgtcaagtatctgtcttcacgctctacattcattaacataaattctcacaatggccctatagagaaggactgttctgatcccaatattatgtatgtgaaaaatgggacactgggagtttaagcaagttacccaagatcacacagctcctgaattggcggagctgagattcaaatccaggctgtttgactagggagtataactaccatacactagtggctttttttttastcacagttcttgttgttgttrttatcattataattacttttatacatatatatatatatatttcaattaattccatcgtagagaaaatggcccgtgtcataaagatcttttgaaatttttttatggcctgctctgtggtctagaggctggtcagtttccatgtatgcctcagaggagtgcgtcttctgcaattggatgcagggtttcaaaggagaccaatagatcragcttcttagtggcattattcaaatatgccctattcttactgaggttttggcctgtctgatctatcaattattgagagatgtgtgctgaaatctcccactgttgatagtggatttgtcagtgtattcgtccatttttacactgctataaagaactacctgagactggataatttatgaaaaaaaaagaggcttaattaactcacagttccacaggctgtagaggaagcatgggtgggtgtcctcaggaaacttacaatcatggcagaaggtgaaggggaagcaattatgtcttaccatggcagagcaggagagagagagagaagtcggggggagccacacacttttaaatgatcagatctcgtgagaactcacgcattatcatgagaacaacaagggggaaatccaccccatgatccagtcacttcccaccagaccgctgctccagttggacatgagatttgagtggggacacagatccaaactatgtcagtgtctctttgtaattctatcaatttcagtctcattattttgacattgcattattagatgtttgtaagttttaaattatattttcctagcgaattgagtatttgacctttatgtagttgactccctttatcaatagcaatgccttaaaatgtattttgtctaatattaacataaggacaaaagcctccatttgattggcatttacctgttatatgcttatagtttcaacttttctgtgttattgtgtttatgtgtcttataaacaacatttgcctatttttaaaactgaatctaccttgacaatctcatttttatctgtttagtcccagtagttattgtcatcactgatatatttgaatttatgttttccatctcttattttctatttgttgagtcttatctctgcttgtttggacttacaaccttcagctttatggtgtttattttcccttttccatttttcccttttatgttttcactctacttatgcttattttgtggccaccctagcaattttaacatgcacatttaacttacgaagtcygaagtgaattattagcattcttttctcccaataatagaagagcttagattgctttaactaatcatgagctcccaccctctaaactattgttgtccactgctccagtactgtgttttctratcccacarattagccatcatgtttattattctatggaatcattttttctttagagttaccaccttttaccaatttctttgctcacaattccttcttgcatctctgtagtcatttcctggtttctggggtactttcttctaaacaccatttagtgtgggtctgtagtttttgtctgaatctgtctgttccatcccagtctatagaggttacatattgttcagtatagaattcattgttgatagttattatctcttagcactttgaagttttgcttatctggatttccttattgctgaggaatcagctatctaatagtaatttttcatggcaatctgttttttctttctgtttctttttaagtattttatttgttgtcatgacctatggtttcactataatatgtataaatataaatttggttgtatttttcctatttggattcatttgaggttagtaagtaygtggatttgtgtcactaacaattctgtaacattttaggccactcattttgaatattgttttccatgttctttgcattatctccttctaggcgtattaggctgatatcaatatctgctgcctctgcarttttgattctgttgattttttaatcttctgcttgtcttttatttgcccttgtgttttgtgagcagcctgtgaataagtaggtggatggtgcagtgctgactgcctctttcattctcagccctcagcaagcccttcactgtctgcctccatcccccacccccagctagtccacctccctctctctctctctctctctctctctgtctctcgccacckatggtctgtgytccactaagcagctggagtcatcttttaaaatcacaaatcatctgactccaaagcttagaatttatttttaactttacattgcacctaaactaacataaaataaatccccaagatggctgctgaggcccctgtgacttgacccctgtctgcccccaaaggcttctcttcaggcccctccccctcactcatcacctccagcccagccttctttccaggccctggacattctgtaccccttcatgcctcagggcgtttgcacaggctgctctctcagctggaacaagcgtcctcccattcccagattggctgaattcccttctttaagtttccaagttaagcaagccctctgaaaaccttctctggcatccgggttggaggaggtctctcttgctatttattttctcacagaacctccctgcccccatcttttcctttytggaacttgccacagatttttttttttttttttttttttgagatggagtctygctctgttgcccaggctagagtgcrgtggtgcaatctcagctcactgcwatctctgcctcccaggttcaagcaattctgcgtcagcctcctgagtagctgggattacaggcaagygctactacgtccggctaattttgtatttttagtagagacgggtttgttggtcaggctggtctygaactcctgacctcgtgaaccacccacctcggcatctcaaagtgctgggattacaggagtgccacagatttttaattacctattttatttgtccacctggccaatgtctgtctctctcatgaggacagggccatggctgtagttcactatggrtagcgtagtgcctaagatggagggagccttggtatgcatttggtgacaggatccatgaaggaactcttttctgcccactctgtccagcgaataagtcctgagagtgcagggcagcagcgatagggtcccctcaaagcatgcggcaggatggggcaacctgccatcactccactggactcagaatcctgaattcaggagacccaacccagatctcagctgtcacgggacaggttgcagtgactctccatgctcccagatcccctcacatacggtttctgcaccactgggcacggtggaggtcacaggcataaagttagtgccacccgaagacacggtgcctcctggttggtgggtcagtctctgtatttttaactggcctcctctaacacataagataagattgatttaatctgttttgtctttttcaaattaacagaatttctaatttgttctgatacctttattaaatgtratcatatagtgaaaaattcagtgatgttaaaaacagcaggaaaatattaaacttgccatatacaaagtttggatcataaaatatgtttcatggggctgtcactgaaatgggacacaaccttcatgacactcacaatagttgctaagaggctcgatgtaacccagaaggcagagagcggaggagctgtctaccgagtgagctcttgcttcccagagcccaggttctggygcttccctctctgaggattctgctggtgtttggaacatgggtttagagttccctctgtctatcccatgtttctttctctcctgcttaggaataaagtaagctcacggaaaatcttactcacttttttttttcggatgaatctgttttttctgctaccacccttttttttcctaccacccatcgaccccaccaagaatatacaaacaaatatccccactctggagtccaatgtagaaaggagaacaatttcatattgtaatgaaaacctaaggtgctacttactgagtggcttgagttgatggcttaggaaaggacttcctcagactccaaaagatttgttcatgttggagaagcagttaacattgatttatctctggtcaggaacagacatggtttgagctaacacttcccacacgctgtatttgtctgtgctggctgctatacgaagtgccatagactgggtggattacacaacaggaatttcttttctcacaactcgagctggaagtctgggacccaggtgtgggcagggttggtctcttctgaggctctcatcctgacttgtcgatgaccatctcctgcctgtgtcttcacacgttcctctgtgtgtgtctgtgtcctgatatcctcttataaggatgccaggcaatattgaattagggctgctcaattacctcctttaatcttaattaccccttttaaggtcctgttttgaaatacagccacattctgagattgtgggagttaggacttcaacataagaattttgtgggggaccaggggtgctggcttatgccggtaatcctagcactttgggaggccgaggcgggcggatcacctgaggtgaggagttccagaccagcctggccaacatggtgaaaccccgtctctactaaaaatacaaaaaaaaaggcgggcatggtggcgggcgactgtaatcccagcttactctggaggctgaggcaggagaacctgggaggcggagattgcagtgaggcragatcacgctgctgcactccagcctgggtgacagagtgagactccgtctcaaaaaaaaaaaaaaaaaaaggaattttgagrggacacaatgatgtagcccatagtacctgcatatgcacgcgcatgcatacacacgcacacacacatgcacacacacactctcatgcatactctctctacttttctataggcctcttccaactaaatttttagttttaatctgagatatagcaaaggcccagtgattaggtcttgcaatgaagcgattcccaacagagacataaggggtgagagccccacgcaccttcagcgaagtatcattggccacatgtcagccatggggagagcaggctggcccagcacgcaggccagtctgtgtgtggaatggtccctgacaactggaagaaccgctattggttcaggggccctcatgctgcaatcagcaccaccatagctgggaaggacagggatgaggttttagggaactgatcccccaggcttccattcrgttggcagctccaaatggacacagaagcttgtgaatcatgtgtgatgtggcagccttcctgctcagcagacatctgtggtaccctggttaaagccaagacaattcagaggctgagagaaatgaaaccaaatccccagggcactgagggatcccatgggcagcagatggaaggaaaatgccccgtggcaggagtgggagtggagagcatgaaatgcaggtgtggcaatttccccagaatactttggactcccctggacaatgccacagaggaccctgggcatcctgggacaccaaggagcctgtgcttcctcctaggcataggcaggttctcatctgtcagctgttggagggctgcactggagaggagaacatttggcacctggtatgtctccctgtagagcagtccccctgggagctaatggatcttttccacctgtggcaaaaatagacttgattcagataccttgtcctgagattggcttacccaggcctgcacggcccctccaggcagatgagacccctcgtgcattacctctgaatgaaacacagggtccaggcagatggagttccagggacagagcggggcaaaccttggaatcttgcttggctgagtgtgaatggccccttggcctgactcaagacttgagggagatgacagagggttaattgaggatggcagggccctccatgtggctctgcactcagccctttctctcctgagcctgaggccacagccctgccctgcaccatgaaccccaggcgggaggctgtcggctcttggcccagctcccctggggcctcgggtgatattcagcttcagaagtcctgctcttctcccagccctgtggatcccactcagcatcaggtggttactgcaggaagccgtctgcctttgtttttcttgggcaccrgctcaaagtccctttaagtgcgaagtctttattcctggtttcctccttctccacttcctccccctgaaaacagctgrtggcccgttgtcactagagcccaggagrggctccttccttccctcccacctgggctatttttctgtgccacacctgtcctggtctttgtgaggcatggccatctccatgctgggctgattagaagttcacctcacatcctttgagagagcttgagtcacctctagttgccatttctagcctacctccccgccaccccctgagaatgagggatgctgggacactccccaggatcagcattcagcaccccaggctatagaagctgaggcaaggtttacattcaccattctgcacccattcttctttcagcgatgactgcatatatcattagctgtgttcagtaagggccaagcaagaccaggatctcagagtcaaagttgggtaccacatacaggccagagtagcacaaggcaggggttggggacaggtgggaaaattgctacccaaggccacaggtgatcccagtcagatccaggggctggaagggaggagcataaggctgcttgtcttaaataaaggacaaggggctagaaagcaaaggtggtgggtgaggcagctgttttaaacagagaggtagggacacctttcttgcagtggaacttcttcaracctgagatggaaatgaaatgagggagcccccatggaggtctgaggggagtgttccaggcagtgggaacaggattgcaaaaccccacggaagtgggcaagcagccggtgtggccagaatgaacccaagcaaggttcagggaaacctcactgaacttcagttttttcatccggaaaactggagtgatgagatgtgaaaagtagaaatgacacattgtatgtagtgcatacgaaagttgaccctcagtagtggcctccatgactgtcccttctctgggcacacgccgtggtgctggtctgtaaagacgtgtgaaggtctcctctaacygtaccttccatgtgcagtcgtggccctcctcctctcacaacattccwtggctcctttttacccagatcagctccgttgttggcttccgagtctttcatttcctccccgacctatcccgccaactcctccctccatccttgtgatccttagtccaactctgagcctctttcttggggtctttctcaggcacccatttaccttccaccttgggagtttgtgaatgacttttttcttttgggttttttttttttaatgtataaattttctgggtttttttttttaacattgcttgtgtattacttttagtaattaattaaaaaacccaaaaagttcatttttagttaaaaaatgatgcagacacagatgcataaactgtttataatcatttgtctccaaagaattcaaggcctcaagtgtagaatttaagtyactcaagaagatggctgcaagccccattcagtgactgctctatgccatgggtctttctgtaagccscatagacgtttacccaggacatggatgctgggactttctaagcctgactagtttctaagtgggtcacctcagggtcccaaggattgagactcctgtgaggccaggcctttctggcttattctaaagaaattagatcataaatacaccttgttactttcaggagatgggaagcaacatgacaaccacgagcctgcctcccatgtggttggactttgatttttctcgttgccatttcattttcagctccctgcaagctgtttgagggctgtgagccctgttacctcagttctcaagggccaggtagagtccagaatcaacatccagtttcacttgactttcaaactagaagaggagctcacagctgagtttcaccatgtaggagagaarggaattatattgcatgtgaagagctgatacaaaacatttttgtgctcccagaactccattgcctgttcttttagagactactggtgtctgtttgctggttctgccctttgagtagattctctttctggtcattttaaagccagattgcctgacttccagggcagggtggaagtaagtttaaaaagtgtcagaaaacaacaaagagcctgttgccctctcctccaccggaaaagaggagagcaaaatgctcagaaaaaaaacactttgtttcttcaacattagtattttgagtgttttgcatctgaacttcttaggtataaccactgcttctcaacactgaggtgctgtattagtctgttcttgcactgcttaataaagacatacctgagactgggtaattattaaggaaagaggtttaatggactcacagttccacatggctggagaggctccacaatcatggcagaagatggaggaagagcaaagtcacgtcttacatggtggcaggcaagagggcacgtgcaggggaactacccttcataaaaccatcagatcttgtgagacttattcactaccatgagagcagggcagaaaaaacccactgccatgattcagttacctaccactgggtccctcccatgacacgtggggattattacaattcaagatgagatttgggtggggacacagagccaaaccatatcaggtggtatatttagtgttactcttcttccacatcagaacttgacagatrattcaagaacattccaacacaatcctgrgcctcacttgcttcatctgtaaaatagggataatgccttcttcacagggctgttgtgaggattaaaggattctgtgaggtaaaggaagtctgtgtgaagtcccagcacagtatctagcatagagggcactgtagaatgagaagggtggaaatgagtccactgtagccttatgcggaaatcactctgcggcaggaccgcactttatcggaacctgmtttcatgtggtttgcccacaggcagttttaatcctgtgattattatggggtggggggaagtgaacttctggttggaaatgttactgatttacttactcataagcacaatcagtttaaccttatgaaggtaattaaggcttctgctggggactcctttgcttctgtaaactgcaggtggtaacaccgcccagtcagcattgatggagatgagggaaaggtggccgggccttccagggtggttctccccacaggagcaggactgatgctaacaagttttcaggcatctgagggcagcaggcacctggaaatccagacttctaagacccctgtggccattttcagaaatgaagcaggtcccccaggcatgamaggtacctggagattcaagagtatgactgcccctgggcctctgtggcttgaaaatattatcagagcaaaacttgtcattccttattcagagctaaagtgctcactgcacatactcctgggagaagtaacaggacagtcagctctgacgtgactgacacaggcagaagtgatttgtggaagcaggcttggacgggggagcaattctggatatttcatggggaaaacaaagagctggaagaaggaggtagtgcagaggccctcagaaggggaaggacctgggacccacacaaagacaggctttgcttctttcatgttttacttggggccaaacttactttctcctgtgtagctgattctctggtttgtgtgcagaaacactgccaatgctgccatttaaataaggatttcaggaagtaaaaggaaaaaaaaatactggagtgagaattgatggcgcagagtatttaatgatattaagatgcagagtggcaatttaagacatttatgctgcctcccgaggagttttgtaggtatacaggctaattttcagaagggttgctgggggtgggggaggcatcatttgcctacatatggtgaggtataatcactagtaccttggcatttattagaatttkgaagaacgaggtaaaaaaaaaatcagtccactttattgaaatcttttgcagaaatatgacacaaccattttcaaatagtttttactaccaccaaaataatattcgtgaactaaaagctaatgtaaggaatcaaaattcttacagtggttattttggctaggagaaatatgattgtttacctcttttcaattttctgtatattttttaattttaaagaaaatgtgagtcctatgtagtgatgggatcgcaaatttgaaatgtgtgtgtgtgtgtgtgtgtgtgtgtgtktttttctctttctgcaacagggttacatgatggaaaatcgaatctcaggcttaaagtgtgacacagatgtgtttgccacttttgaaggtgacgatgttgttatgcttcaggtaagattcgggaaatgttttcaagatcaagagttatccagaagtctgaagtgtttcatatattttatctttatctgattgccttctttaattggcaggtgctttcctgttaggcacttgatatttgttgtagctgaacaggggattacgttatttctctcttagctgatctttgactttgaattttatctttttggtttaagaaaaccacttatacatagtgagtcagattcttctactaggaagggtattttgaaagagtatgtaaggccccagragatgaacaagcaaaaggcatgaaaacccagtttacaaaagaacggcaatggatcagcctcctaatgatcaaggaaatgcatattagactattcggcaatactcttttcctttctcaatccaatcggctcatgttttcaagtatgttgaagtccccatgttggcacaggggggtccctttgcatgttgctgttgaactgtgtataattctacttctgggctgtattttaagataacagcctgaaatacaggaaactttaaggcacaaacattttcaccagtacattatttattgtagcaataatgttggagtccaaattttcaacaataggaaaattattatacagtataaatcatgctctggccactcagtggggaattatatggcttttaaaatagtgctttcagagagtgctatttataacagaaatttaaaacttatgatacggtaagtaaaaatgatacaaaaacatacagttatgcattgcttaacaacaggaacatattctgagacatttgtcattaggctgtttcatcgttgtgtcaacatcatagagtgcactcacacaaaccaagatggcacagcctactccgcacctaggctatgtggtggagcctattgctcctacgctacacacctgtacagcatgatactgtactgaataccataggctactgcaacataatttttgtttgtttattgatacatagtatttgtacatatataagggatacatgtgatgttttgttacatgccttgagtgtataatgatcaagccagagtttttagggtgtccatcacctcaagtatttatcatttctatgtgttgggaacatttcaagtcctctcttttgtgtattttgcaatatgcaatatattgttgttaactatagtcactctactctgctatcgaacattataacttattccttctgcctgactgtatatttgtacggattaatcaacttctgttcattccccctacccgcccccacacctttcccagcctctggtatctatcattctacgctttactgctatgagatcaacttttttagctcccatatatgrgtaagaacatgccatatttgtgtttctgtgcctgacttatttcacttaacataatgacctccagttccattcatgtagctgcaaatgaaatgatttcattttttatggccaaatagtattccattatgtgtatataccatattttctttctccatttctttgtgtgatgggtatttaggttgattccacatctttgctattgtgactagtgctgcaataaacatgtgggtgcaggtgtacccttgatatattgatttatttttcctttggataaatacccactagtgggattgctggatcgtagggtagttctatttttagtttctgtttgtttgtttgtttttgttttttggaaacctccatactgttttttatagtggctgtactaatttaccttcccaccaacagtgcctaaaacaatttttatgtttaagtatttgcatatggaagcacatcaaagcatagataaggtgatgtgttgtgctatgacatcatgatggcaaagatatcgctaggtgatgggaaatttttcgctgggcacttgactgtataaagaatgtgatcatgatttggagttctcaaaaaaggacartagggactcctggcctgctaagatagaatagccccattccttacagattttcctcttcacagttaaactccctggacaaaatacaacagacaagcatgggaagagaagaccctggaagggggaaggaagaaggaggctgcctagggactttgggacttgaacaatgaaacagcaataaggtctctggatttccttattgtctcccatatatcccagacaggatacacatcccctgtatctctaataggcacacacaaaatatgctccaggagacacctaatcccctagccaagggaccaggaagatggtggcctgatgacmgaaaatctttttggtgatacccatgctacaccagccagacacaacaaaaaaacataaccattctcccsaccgccgttgacaatttctgcctcgctgggagctgatcttccactggatccttgacctaaggaagcaggcaaaagcaggggtagtactcccatcccccacccagtggccttagtggggctgagcagggagctcatctttcattcctctcctggtggaaacaggtggtgctcagattccccaccagagtagtgtcagcaaggcccggtggcraatccacccccactcagcagcaacaagaaccaatgaagtggcttaaggtggagcccatcaccagtgtgcttctgctacccaccctggggccagcaggggtccagcagggagctgagtctctactcccacctgatgtcgattagactaaccaggaggtgtgagcagggactagtcactactctgtgttctccccacccytggtgtctgtgggcccagtgaggagctgaagctctatacccacaagatgacaagaaactggatcaagtagcgtgcagcagagccagtggacactttgacctcttccctccctgccccctaaacccctaaaggggatttagtggggagctgagcctcttgcctcacctgacatcaacagaatgaaataggatgaagtgggggagttaatatccttcttcctcctcccctatttttagcaggagycagtaagcagtggagccttcacctcatccagcatcaatgaggcacaatgaggtggtgggaaaaggggrtagttggccctgtgcttccccactcccttccctgaygtcagcagggcctagagggaacagaacttgcccccaacctgtctccaacaaggcaatgtgcatcagcactccttttcctccagcatggtgtcgatgggacctagcaggaaagtgaacatatacccatcaggaccttttgctacccttcaagattaaatgtcatctcataatatcatatctaaatacactgggtacaacaaaacatcacattataaaggaaccaagaaaattgcaacttaaatgagaaagtcaatagatgcggataccaagaagaatccaatgttggaattatctgataaggattttaaagtacccactataaaagtgtttcaaaggtgcataaaagtactacaaatgctcttaaaacaaattttaaaaatagaaaaaatataagcaaataaaaggggaccaaattcaaatgatagaattaaaaatataatgactgaattaacaaacttgcagtctgaccccaataatagagtagatatgatagagggtggaatcagtgaatttgaggccagatcaacagaatttacccaatctgaacaacagagaagacaaaaatgaacagaatcacacagatcagtggagcaataacaaaagagctagcatttgtattatcagagtctcagaaggagagaagtgtgttgctcaatatacataaaggaaatacttcagacaattaaaaagtgaggagggcaaagagacctaaatggaggtaaggtttccacacttcactcaaagtggtaaaacattaatatmactagactgtgatgagatatattacaaatttttacatgtaaataataagactatataatgtgatactgtgaggttctgggggaaaacctgaaagaaatgaaaggasaaatagacaaatcaacaattatagttggatatttcaacacatttatttcaatggttaacacaactactagacagcaaatcagaaaggatatgaaagaactgaaaaacaggcactgctgggcctgcaggtctctgttgagccacggatgtgggtctctgttttgcaggatggggtttgttaaagttgttaagaataaggcctactttaagagataccaagtraaatttagaagacgacaagagggtaaaactggttactatgctcggaaatacttggagatacaggataaaaataaatacaacacacccaaatayaggatagtagttcatctaaccaacagagatatcattagtcagattgcttatgcccgtatagagggggatatgatagtctgcgcagcatacgcacacgaactgccaaaatatggtgtgaaggttggcctgacaaattatgctgcagagtattgtactggcctgctgctggcccgcaggcttctcrataggtttggcacagacaacatctatgaagrccaagtgtaggtgactggcaatgaatacaatgtggaaarcattgatggtcagccaagtgcctttacctgctatttggatgcaggccttgccagaactaccactggcaataaattttttggctccctgaagggagctgtggctggaggctcatctgtctctcatagtaccagatgattccctggttatgattctgaaagcaaggaatttaatgcagaagtacaccagaagcacatcacgggccagaatgttgcagattacctgtgctacttaatggaagaagatgaagatgcttacaagaaacagttctctcaatacacaaagaacagcgtaactccagacatgacggaggagatgtataagaaagctcatgctgcttatacatcaagtctatgaaaagaagcccaagaaagaagttaaaaagaagaggtggaactgtcccaaaatgtccattgcccagaagaaagatcagatagctcaaaagaaggcaagcttcctcagagctcaggagcgggctgctgagagctacaccaaacaattttctatgacgatttttcagataaagacaataaacttatggacagcaaaaaaaaaaaaaaagaactgaaaaacataaccaggcaacaggatttatttaacatgtatggaacactctattcaacaggaacagcatacatgtttttcaagcacttgtggaattttcttcaagatggactgtatcctgggccattaaaataaaactcagcaaatttaaaggaattaaaaaggtacagaatatgttttctcatcataatagaatgaaatgagaaatcaagagcagaaagaaaagaagaatatctctaaatacttggaaattaagcaacatgcttcaaataatccataggttatataggaaattttaatggaactttaaaaatacatagaaatgagtgagcatgaacacacaacacatcaaaacgtatgggaggcagataaaatagtgctgaaaggaaaattcatagtactaaatgcttatttaagaaaagaggaaaggtctcaactcattcacctaaatccctacctcaagaaaattgaaagagaagagcaaaataagtagaaaccaaacataagaaaggaaataataaagttaagattatacattaataaaattgaagccaggagaacaatagagaaaatccatgaaacaaaaggctggctctgaaaagaatcaacaaagttgataacactcaagcaagattgacaaagttaaaaattaagaaggctcaaatcaccaatatcaggaatgaaacagaatatgtatctagagatcatgaagtcattaaaaaataatgaggttgccagtcgtggtggctcacacctctaatcccagcactttgggaggccgaggtgggcagcttacctgaggtcaggagttcaagaccagcctgggcaacatggtaaaaccccatctctactaaaaatacaaaaattagccgggtgtgatggtgcacatctgtaatcccagcttctcgggaagctgaggcaggagaatcacttgagcttggggtgcagagrctgcagtgagccaagattgtgccactgcattccagcctgggcgacagagtgagactttgtctcaaaaaaaaagaaaaaaaaaagaatgctagaaaatagctttacattgataaatttgacaacttagaggaaatggaccagttcctcaaaaactggaaattatctgactcaacaaagttgaaacagacaaactgaatagttctatactcttaaagaaactgaacccttaataataatataaaagctcctgaaaaataaatctcctggccttgaagccttggagaattctatttaccatttaaagaagaatgttactctctcctcttctattttcagaaaattctatttccagaaaatagaagaggagaggtactccttgattattttagaaggctagtattactctgatactaaaagtagacaaagatagaagaaaaaaagaataaagctacatactagtatcactcatgaatgtagatacagaaatcttcaacaaaatattaacaaattgaatctggtaatgcacaaaatgaattacacatggcaacctagtggaatttatctctgatatgcaagtatgcttcaacattcaaaartcaatcaaatgcaatccaccacatcaacagactaaaggcraaaaagtcacatgatcatgtcagtttacacagaaaaagcatttgacaaagtccaacaaccattcatgataaaaactcagcaaactaggaaagaagggaatttcctcaaattgaaagagtctacaaaaattatagctaacatcatgcttaatcgtggaacattgaatgcttttcccccaagattaggaaaaaggcaagaatgtccactgttattcaactagtgctaaaagttttagcagtgcaataaggcaataaaaagaaattaaaacatagagattagaagggaagaaataaaaactgtagctttctgacaaagttgcaaaagcaatccagtggaggaaagatggccttttaagcaaatagtgctggagtaattggacatccacaggcaataaactgaacctcaacctaactctcacacattataaagaaatctaactcaaaatgaattacttaaatataaaatgtaaaattataaagcttttagaaaaaagttaggagaaaatccttgagacctagggayagggaagaagttcttagggttgacatcaaaagcacatttcataaaaggaaaaattggtaagctgcatttcatgaaaaataaaattttttattctatgaaagaccctgtgaagaggatgaaaagataagctacagacagggagaatatattttcaaatgacaccttcaacaaaggacttgagtctagaatatataaagacctctcaaaactcaacagtgacaaacaaacaatccaattagaaagtggtcaaaaaaacatcaacagacatttcactgaagaggatatacccatggcaaataagcacatgaaaataggtacatcattgtagccattatggaaatgcaaatcaaaactcctagaagatattactacatttctattagaatggctaaaatgaatattaataacacgaaaattgaataagctttgtggcttgcaccaacactattttcctggttgggatgccagtaaatgttttgtaaagtgttaccgctgggagaaaatggataaagcctgcataggatctctctgaattatttcttgtgcttcattgctacagttacattcatgcaaatgctacatttaaagaattttgtaaaaaggtataaaacaaaaacctatgcatgaataagtttagaaagaaatagagcaaaatattgatatctcaatgttgtaaacggtcttgatgattaaaaaagaacattctttccattgttatatatcttaaaaagtgtattagaatgaggacagtggcatgtagtggcagctccccattccctcttagcttttagcaatatctataggagagtagattatttgggggagaattgagacttataatttaacttgggctagattaaaagttgtctgttttttgtctccctcctgcttaaatgtcgtatcaaaaaatcttcttaagaatattcagtaattcagacattacattaattcacattctccatctcagcttgtgatccaagtgaggttttttgacaactttctctctsggagtatattttaaacataagcatgtgattcaacagcacttgaccctgaagttgtgatttagtgctttaattggaagctctagcttgtaagcattatggaaaggctgtttagtgtgttatgggaatgatcacaatttctaaatgtgaactcaagtggaagtgtggggaaaaacagggactccttgttgtttatcacatacgtgggagcatggaaaatgaaatgaggaactctgaaccatgaacagcaggaacgtgcagggatgctgggctgcagggaggctgagcacctggttgggagaatgaacatcagcacagaaagcagggcaccctgtgcactaagaacacacacaagtgctccaaggcctaggctggggaaggaaccagggcatggtccagttttacagtctgctaagaaagagatcaccacagaccttaagtccagactgtaagccttgttttgaccaatttgctagacagatatcttccagacacatactggaaaaatgctacctcaagtgatgatccagccggaaacacttcttgtataagtggggtgtgtcaacggtccccagggtcacccccaggattgatgattcactaggagaactcacaggacttgacatatacttatactcatggctatgatttattacagcaaaatcatatgtaaaaaatacatatatacacacacatgcatctctgtctctctcacacgcacatgcacacacacacacgtgcacacacayacacacacacacacacaaaattcaaggtcagcaaaggaaaaagacacatgggctgaagtccrgaggaaaccagaagcaagtttccaagagtcctctctcaatggagtcatgcaggacatgcttaattcctccaacaacaaattgtgagaatacctgtgaaatgtttaccagggaagctcagcagagactccgtgtccatggtttttattgggggctggtcatgtagacaccctctgcctagcacatatcaatgcagactttcagaagaaagcacaygttcagcataaaccacattatgtgctcaattggtttaggcacagtgagccacccttatcagtcaaggaatggtgggaatcttcccaaacccaagttcccagatgaaatctcaggctagcagtctcaggcctttcatgttaactttattttgcacatggtgccataagataaagcatatgcccatcctgattggcattagtgctcttccctcttcaaggtcaaatcactagaataaataaaaagcaggaataagtaaatgacaatgtcaatgacactgacagtgggagagaagccatcagatgactgagtatttttattactttctggagaatgcaaagcatggaatgaaattgacaggccaacctgctacagcctgaatgtttatgtctttccatgattaatgtgtcaaaacctaccaagatgatggtataggaggtggggcctttgagaggtgattaggtcacgatcackctgccctcatgggtggggttagtgccttatcaaagagtgcttccttgcctcttacaccatatgcagactcagcaaraaagtgccatctgtgaacaaggaagtgagccctcagcagacactgaatctaccactactttgatcttggacttcccagactccagaactgtgagaaatcaatttctgttgtttataagccactcagtttatggtattttgttatagcagcctgagctaagacacaagttgagtggacacagctggaggtggggttgtttcttctggatgaccgtggagagacactgggtcacaaggattgagagcaggagagggattcaggcagagagtcatgcatttccataaaggcctgtttaatagcaggacacccagttccccacatcagagcgactacagtaatagcatctgccacagctccagaaaccttctctgggaagaaaacttaacagcctggccaggcagtgcttggtcccttggggtgagagaccgagacccctgaatacatagcttagtgctggggagggtcagcctgcttgtttgccatcagtcagcaccccctcataggaagcctgccaggtgactgccctgcgttggacccggagttttctgctgctgggcatccaggggtgatgcctccacagtgatgggaggttgtgctggctgcctgtactggtccactcagccttccacttgtgtgttggaatctccccattytggggaggccacccttctgtgggctggatcctgctttgattctccttattgaagtagagatggaaatttcaggagacacaggggagaaactggccagtgagtttcacaatattctgatattacctacagtgctttcagctttctaccagaaggtaaaactttcaagatcctgaaggtgctaggttgctgtcccatgattgaggggatgtgctgtggcatttctgcaggctttacatgtttccctttaagcaagatggaaagttttctgacccttttattatttgccagggcagaggttgtagccccttggtgaaatttaattataccctccaccaaatccaattactacccacacccatgaaaccccattataactttcttttgcttcattagagatacactaagacaggtcccttcctaatccattatggcagattccctaaagaatgttagttagagattttgcatatattgttcattacttcgcagtgcagatatgcaaaaatgcagatgacctgccattaacttgcttaaagaccaggaaggggtgtcctcttcctgactgatctggctggcttctgttgcagagacctctgtcttggaactgcccatggcaagatatgtgcctgctgacgggaagcctggtagtaataccatcaagccttatgtccagaagagcacaaaatgtttctccaatcagaagggagcattgggttgttttggggctggactgtggcaggtggccaagagaacgaaaccccttttgtactttttccttgcttaaaacactagactcagccgagatgtggtttggggtaggacagacctttcctgcaggggttggggaacctagctgttcttcccctgcaggaatgcctgagccatgctgtggggcaggccggctgatgtgtgctgcgtaccagcggtggggcatcagcccagtgtagtttctatcaaatttgaactgaggaagaaaataaaagagaccaagcacatatctgttttactataagaaagctgattccttagggatttcagactcccgagggtattttcctaaggataatcagagaatgaacaatcaagcatcatcaaatatttttgtttcatttttattttcaacttttacagtcaaaaatttcaaacaaatttcaagacagaagttgaaagactagtacaataaatgtctgggcacaccgtccacctagtttcattatatgttaacactttgccatattaaaatttctcttttttaccgtctatgcatatgtttgtgtgaktgtgtgtgtgtgtgtgtgtgcatgaaatcatttgagagtaagttgcagacgtcaaaacacttcacccctaagagcttcaatgttcattttctaaaaataagaatcttttcttataaaatcataataaccatcatcacacctaaaaaaatgagcaatgacttcatagtattatctaaaaaaaattaaagaaaaatcaacagcgtgaaaaagaaggagcaagatgcacaaacacaacaacaggcactggaggaagcaaaatagagaaacaaaaactaattagtaaccctagggatgtgtggccacattgtatccataaagcaagaacagcctgctatgaaacacaagcattcagagacccatgaagtgcttggaaaattaaaaataaagattgcaaaaaaaaaaaaatccaatgtaagggctgaagaacaaatttgagaaaacttccaagaatgaagatcagaaagacaaaaaagggggagtaggattaaagggaaatttccattccatccatttttgatggataatcagtctaaaatctacaacatttccaagaaagggattggagaatacagagaggcagtcaaatgagagaaatagaagaaaattcttgagatatgaagaaaggcaaaaaaagtctggagattggcgggacccattggaagagattagaacctgaaaacaacctggagaatttcagaacatcaagcaaggacaaagaaaggcctcaaaaccctcaagctgaaaaaacgtgggattatttaccaaggcctgagagtctgattgaccacagacctctcaagcagcactgaaggatgcaacggcttctcaactgtaatgtacccatacatccttggatatcttgttcaacttcagactctggggtgggggaattctgtatttccagcaatctcttaggtgatattatggctcctggcctatggatcacactgagtggcaagggcctacaggtctaggataaaatggaataatacctttaaagttctgaagaaggttgctttgaatgtaaaatttcacagctagccaaattattgatcaagtatgaggcaatataaagacagatattcaaatgcactataagttcacttgatatgcattttctgaaaaatgttacttgtggatgaactgcaggaaagcattcaagaaatgaagaatttaaaagacatggatgcttttgggagctaacccaagtggagtatgtgtgaagaaatacctggatggtagtgacgtgacaagcccagaaaacaattagtccaaatttgaacaggaagtcagaggggtcaaaataatgactttaagaaggaaacaatttctgttcaacagaaagaagcaggaagattctagtgatatgatggaaaaggcatgtttcttcttgaaacaagagaaagaatagtccattaagactccaggaaaaacaaaaccactcaagaaaagcatgctccaactacgagcaaactaaagcatgacatgagaatgtatttgaccttcacactgggaagcttccccttctaggagaacaaaaactacttaaaaatggttatttctggagtgagttattaaaggtaaaagattgggtaggagatttttgctttttatttaagactatttaatagagcttttaatttttagagatcaagtatatttaaaaccattaaaaaatattctctcccggctgggcatggtggctcactcctgtaatcccagcactttgggaggccgaggtgggcggatcacgaggtcaggagattgagaccatcctggctaacacggtgaaaccccgtctctactaaaaatataaaaaattagccaggcgtggtggcaggtgcctgtagtcccagctactcaggaggctgaggcaggagaatggcatgaacccgggaggcagagcttgcagtgagccgagatcgccactgcaccccagcctgggtgacagagtgagactccgtctcaaaaaaaaaaaagaaaaaacacaaaaaacttctctccttttgatataaaatgtcagggagggaagaaaaggaatgaagagtgacaaagaaaggaagggcttttcaagagaacaaaccaactcatgatrcacacaaactcaccccatcctccaacataacaaccctcttkactcccacgaatgaacagacaagttctgtttttctctttccaaatccattgacccatacgcaaagctggcactaattttttcgaaaccagatgttgcagcatctaaatatttacattgttcctcatcaggactccacgtgtgagattctggagaaagggagccttctggatygggggcctttgcttgtcttttcttctctgctccccagaatttgattttaatgtagtttttcaaattggggactatgagttcttgacaaaatgtattaattttgtgtcttaattttgatgatcatctaaacagatatagtctaagtagtatacacagatcatcaggataacaaccatataaccagagattgccgtggggattctggcctttgtcttgcactgctaagcccatcagcaccagagaacaccttcttgatgaccaggaaccaatgaggaaagagcagatgtaggttttctatgatttaaaaatctgtgtttagtggaggccgaagactggtatgatgtgcttgctgcttgaagaggtatcttagtccatgtcttcttctgtaacagaataccactaagtaattgataaagaacagacatttatttcttacagttctggaggctggggagtccaagaycaagatgctggcctctggtgagagctactctctgcttccaatatggcaccttgaatattgtatcctcacatggcagaaggcagaaggggagaaaggggtgaactcactccatcaagcccttttctaaaggcacctaatcgcatccacaagggaggagccctcatggcmtaatcacccctgaacgtctccaccttttaatactattacgttggcaacacctaaattttggaggagacacattcaaaccgtagcagagagttttacagaccgcagagaagtgtggcagagggatctctttgcccagccctcagaggtgtgggtataactcccccaaaggaaccggtgcaggctggaaaaaaacaagttcatgctgcaaaacacagtctgtcacatgttattagggctgttgatttgaatcttattggttttgtagttttgcttgtatttaatttcatagtttagagttgaacaagagctataaacataaggtgtttatatctagttttatgtttgaacatgtttgagtaacattataattcgaaacaaatcaacattgggggttaaggagaattgtttttctttcagaaagggtttgcacgatgctcaagttgtaacaaactaagtagaatttcttttttaacattctgcccattgccatttcattctttattttgtcacagctttaagacaagttactttctcttttcagttgaaaaaaattccacaagtaacatgtattccagcaacactggacggtttgttgttgtcatcagggcttgggtgttgggagggggctgacacacacatgcacatgaggaggcttgctggaaatgagggcgattccgggggtgagtgcagggtagagggaggccaggggaggtgagaatgggatgggaaaacacttgggaacaacagccggccctgcgctagggaaggtggacacatccacttccctgagttcggttcagacccagtcactactggggttagcagtcaggacacatttgtctgcttgtaataaatacccatctaaagtggctgaaaccataagaacgccaaccatgctccttggtgaccccacagctggggcctgtctgcccttgagtcccttgcttctgtccagcgtccagttccattgacactggagtgatttctggattatctcatcagtgtctcaaaatagctgccacaattctggggaagacagcacgagggaaaaccttccccagaaaccttcagctgaattcctcataggtcccattggccaggacggtgcccgtggcccagctgtatgagaaatggcattttctacctctttagtgagaagtttgggccagaagtctgtgtggggtgtgagggccccagctgcctgcaggagtggtgtgctcctgagctggactccactgggccagttacagatggtgacgggaagagcacagggggtgcggggcaggggtaccctcccaggctctttataccatgtgcatgggacccttggactaggcccacagcagggatcaccaaatcaatcactttcaaggccgggcaggtaccttaataactgtagcacacccgagactcagattgccatgggcagtggtgcaaacggagggcctttgcccctttccaagggggctgtaacctctcctcagctcccactgaccatcgctttgggggaacattggttcaggctttgcagaaattctgagttttcaacagaaggtaagcacataatttgtttttaatgtgaaatggccatgggggttatgaggggtgtgtctaacaaaacccgtctttggcatggggtgagtcacagagccttgcacacaataggctgcaaaggagggagctctggaggaagaatacacgcttaggccagggcggcctcatggccagatagcccaggctctgtttcacccacaytgaggaactgtgaaatcctgggcttagcccctctgagagttacagccctcacctgcaaaactgggaccatcacctgtaccttggaggactcttacagttactcctgtagagcactcagcacccagcaggggctcaattaaagctgtgttgtggctactagaataagctatgggttctgcatatggtgatggtttggttgccagacaccagggctcacgcccctactgtggcatgaagtagcctgggcaagttccaggtaggagagcgaaaatgtgtgcaggggactgatgtcatgtggtgcaggtgtgtgggatgggaagcgaagggaagaagagaccccaagaagggagaaagggactggaagagctccctgttcctgtctattgtggcacagcaaagcaccccaaacttcctaacttaggagcacacaaccacaaccacctcattgggcctgtgggctctgcttcaggtcagaaattctaacaggaaatcgcagaggtggctcatctggcagcctgctgagtctccacgctgggctccaggtgctgacactgtcactcagttccccaaagcgcctggataaaggcagctcttcagacagcagccaaggccctggtgtctagccctgcccctgccccttcctgcygtacaccctggccgcccaggcttctccatgctgctgcrtctctaaagccgctctgcccgcggccctgaaagcctttgttgctgctaccgttccttctcagattgagaatttatgtcaagtgtgagtgcgcagcccctctctgtgcccactgagctttgagttcacctgtcatctcgtcacattatcctgacatgctgtctgctcttgcccctcccccagcacaccaggggttcctgcattctctttgtatccccagtgactacacagagcctggcatatagcaggtgcagcttaggtgtggaattattgaaagcatggactctgggctgggtgtagtggctcatgcccataatcccagcactttgggaggctgaggcgggtggatcacttgasgtcaggagttcgagaccagcctggccaacatggtgaagccccatctctactaaaatacaaaaattaggtgtggtagcaggcgcctgtaatcccagctactcaggaagctgaggcaggagaatcgcttgaacccgggaagtggaggttgcagtgagctgagatcgcaccactgcactcctgcctgggcgacagagtgaaactccatctgaaagcgtggactctgggttgaaatcccagccccaccgcttcctggctatgtgaccctggcaactggctgaacctctctaggccytggttgtattattggaccatrgggtgagcgattccatgaactacccaaagttgtcatgaagattaaattaggtattccatctaaagagtttggaacagagcttaagtttggaacagagcttagccttagtagatagatgctcaaagaaaatgagtagttgctgctattaggtgttgtatatatgaatgaacaaatgaatgaagctcattcgttctttaaggcttaggtcaaaagctctcctgttccataaagctttccccagtcctcatagtaaagggatccacttttaacttgctgtgcttctgtacctgtcatgttctttacaggtccctctgagaatagttgcgtgtgcataggctgatctctctatctgcactggaagaccccgagggacggctgtatcttatttatctttttaatgttccctatactcaatataaacagtaggtgccttgtacatagtaagtgctccataaatgtagctggaaggaaggagggaaaccagaaaggggaaaccactttatatctaactggaaagagacaccaacaaggtccagatttaactgaaacaacaacaaaactaaccgctcttaagttcgattgaattgtgcatgattttttgctgggcctaaatcactgcttcagatccatccatccttcctggtttgaagttcaaatccgtggttttttgttttggtttggtttggtgtttttttttgtttgtttgttttttgagatggagtcttgctctgcgcccaggctggagtgcagtggcgcaatctcagctcactgcaacctccacctcccgggttcaagtcaaatccgtgtttaaggcccagcaattactcagagctgcttacttgttggtttctgtgctaaagtagtccttccgcttccctttgcccttccctctcttctctccccgctccttctcctctcgtctctcccctctcttcctctcctctattcccctcccctcctcttccctcccttcttcttctgtcatcccttccatctctgcctatttcttctagccagggaatttttaaagattctccccgaagacatcttgccttgatgggatgtccagcatctaaaagaggtaaagagttaaaatgcatgatggtggaaaatcaagaccatccccttagtcttttcttcattctcatacccatgggtgacccctgaaatgcccttcaggaacctaggcttgccagatgtaggaaaaagaaatataggatgcccagctacatttgtatttcaggtaaacawgaatattattttagtataagtatgacccatgcaatattttggtgtccaaatacaaattgggtgtcctctcttttatctggcagtcctgttggaacccctagggccagggccagcttcatggggtgagatttgtgcggtggtacaggaccctgccctcagaagggaccatgcttggttcagtgctctgttctcatcatcataaaattcttaataatttttgaagaagggggcctgcattttcattttgcgttgggccccaaattatgtagccagtctacctagggctccttggagcatgatatggggcccagtgccgtaagtactgccactttgagtcaatctcccactctatggtacaaacccaagtatggtcccactgcctggattcataatggatatctggtgggatctccttggaaatcacatttttctattataattggctctaagtgtttctgctttggcagcaaactctacttgttaggctctttaatccaagtttcactgtacctagcataaatcagtgaaatacttagtgtgaggaaatgctggttgcttcatagatgccttgaaaagtgatttgaccttagaaataacttttattggtgttacataatcatgttgcatgatgtatatgatatttattgcaaatgcatgttgatgatgtcatcattctgcacaattgccaaactcacagtttccaaatgttggctgtagatttgcttgattcctcctgcagatgggaccttttttaaaagaaaagacatggatgttttgactgctcactcaccctagagttctactaagaaaggggctcctgagcaggtgtatatgaaaataaagagtgcagaaccagcagaacatgcagaaccagagacctgtatgaaaagccacagaaacaccacccacaatcacctatcacaagttgtcttaaggaaaccttgaataagtaaaacaccaggcttacaggagagtgtaatcacttgtgttgctgaaaataatgtttcactttacaaaacaatctactactaggtccattttaagtaatgaaatatctagaactaaaacatgtaatgaataaaaatttttttgaatttcttagttttgatagtcaccattattatgtaagagatcacttttttattttatttttggagacagagtctcactctgtcgcccaggctggagtgcagtgatgtgatctcagctcactgcaacctccgtctcccgggttcaagtgattctcctgcttcccgagtaactgggactataagcacgcaccaccatgcccggctaattttttaatgtttttggtagagacggggtttcactatgttggctaggctggtctcgaactcctgacctcaggtgatccacccacgttggcctcccaaagtgctgggattacaggcgtgcaccactgcgcctggccaagagatcactttttaggggaatctgggtgttggctggagagaatcattctatgcgcttttaactttgcaacttctgtgagtctacgattatttttaaatagagttaaaaattatatatatacacacacacatatatactacatagtatattataatatattcaggaacacctctatgaggtaaaacaagcacatcttcattgcacactcagtctaggtggtgactgatctctctttgcctctgcctggtaatttataaaataaagtactggacctagagtctgtaatgcccaaatcccgtggtagctgatggcttcaatcacttaatctttcaccaaaggggcatcaacagcagaaaataaactcatttttaaaatcacgtttccttgtcccatgacctagaaaaggagcaaagatccaaagtgagtaatctgcttttgtgatgttagccagaaccaaatttatctcccttgtctttcttaagtttagcacctgaacttgattattgtatcattctaattttaatcctagttagagtgagttagttctacccaattttagttgcttaaatggaaaaagtggaaatagcggcagaagttaaaggagwttatcaaggaattggacgtattggatgagatagggagaacaggaagggaatgtacttattcatttactcaagggtgagtcctcgcctctgggctctgggcagtacattgtctgatggcacaaggatggacacactccgacccctggcacttgctttccaggctgccggaagacagcaagccagtaaacaagttgtggtctgtagcaccaggtagccataaatgccatggagaaaaatagagtaagagaaagctgtgggagtgggaatcagagaaagcaatttgttcatacttggagtgacattgcttctgcagcaagagtgagatagagttacagccatcataaattttatagrttagcaaaaacaaagttaaatcttaatcctggtattgcgttagtgaaatggaactggattgctatatcattttaattttaattctagttaaagtcattttattttccccacttttccagatcctggcagggtttgattctcacacttactttgtgtagcagcagccataaaaatgtacatgttctttgacccataatgcagtgattctcaatctcactggacctaatgccctctttttgacaataaatattttgtaacactccctttactaacctgaatgaaatcacggatcacataacctatctagagacgtaattgcaagaattcaagacaatacttaaggaaaccaaaggcaagttatttatattataaatatatttatttaataacaaagtaaacatgatcacagcaagacatacaatgcctgcatctatactcagaattactgtgtcagcctcgaatgcagatgcccaggcttatggtccagtcacacctgggagcattgcaggttgccatggggatgggaaaggagaggcggcggtgtcacttgtgtactggcctaaagcacctctaatttcaagggaacaggggagtttaattcttccataggcctgggacttggaaaacctgaaagctttggtgtaactaagttcagggctcttaactgcctgcatgtattttaccacgtggcatttgacaggacacggggtatggcacagtcctctgttggttgagacggtcccatgcatttcatacctggctctgcccaccaatgccaataaagcttccccaggcaaaaatgccttgaaagttttcagcatccctcttattggcagagtggccctctttaagagcctctgtatcaatcaagttcgtggggatttattctcaggaaataatacaaaatatgactatgctatttgtctgcttatattgctatcaaggttattatgacaatgtaaaactggaaacaacctaagtatccaaccaaatggaaatgtttagttagctatgatttatcaaaacaaaagtatacggttagtaaataaacaaatagaattctacataacagtgcaaatcaaaaatgtcatttatgatatattgttgagttaaagcaaacataacattttatataatctgtataaaaacatgcatgcatataaagcaaagaagaaatgttcttaaattgatagttgaaagagaatgaatcagctatctattgatttgtaacaaaccaccgcaaaacttagtgctttgagacaacaatttgttagctcatgattctgtaggtcagcagtttgggctaagctcacacgacgtggtttttctgctgctctgctggtcttccctgggctcactcgtgctgtggcagcagcatgtcggggctgagtggaggcacgctggtccaaggtggcctcgttcacatgtctagtggttgttgctaaccatcagctgagtttctgcagcgggctagccatggacatcttctttgaaccgccacagaagagcatgcagtattttaggcccaaattataactttaaagctgctgaagtagaagatagagattgaagtagaggatagagattgttttatttgtgcatttcaatactattccccaaaggtctaattgaccagagaatgtcaggggtgaaaaagagaacggaccagccttctggtccacggaaggcaagcaggttttactaaagtgtcagctaaaacarttggtcccaggaccagtgttagagactgmtacaggcaagaagggagagcaagcaataagtagttaatgaagttggccacaggggaggatgggggatggtgtgataaatgccccacatttgccttggggaaatagagacccttgtaagaatgaggtcttgtatttgattccttccaaggagtttgctaagtgacaaatagatcttattgggttgcagtattaaagatactgtcattttttacactgctgagactgatgagcgataaactctttgcacaggttgtggggcgggaactgctggcccaatacaccaaacagtatgaagaaaaaccactctttggcctgctccaaaactgggctgaatctgtgggggacaagctgagaaccaggtacgtattactyaggccatcatcatctgccttcagtgggttatcatgaagcctgagttcatacagccttggcataactcactcttgcttgaaatttttagtgtttgctgtatgcaagaaatctgtgaatctgtaaaatgaatactcatacactcactaccaacttaaaaactaaaacattgctcattctgttctttctccttgagttccttctttatttcatgttcactgttccaagcagtttacagattttaatcctaaaaaccccatgaggtaagttcttatttccatttcacagatgaggaaactgaggcacagaggttaagtaccttgctcaaggttacatggctagtgagtggcagaggtgagatttgaacccagacagtctggcttcaacatccatgcttttggttgtttgtattaatctttcagtattgtctgttagctttataaataaagcataatatatgtaacattttgtaactttgttttccctcaatattttgtttcttagaatcattcaaattgttaagtataggtgcagaactcctcttcacaatattctgtaatattccatcctgtatatatgccacactgtacttacccattctaatctctgatatcttggacatttgggttgtgtatggttttttgatattttgcatgatgctgttatgaaaaaccctgtacatgttttctgggggatgtgcacaagagtttttatagggctttcaaacttaattgacattacttagaataagaaatacactttaaatcaccatggacacccatatatccataggacctccacttcagacgcaactgaagcaaacagttcatggagcagtggctaccttcctatttattactagtgatgctctctgatatttttaaattttatttttaaagaatactgatcttagcagaatattgatttcagccagacatggtggctcatgcctgtgatcctagcactttgggaggccaggacagaaggattgctcaagcccaggagttcgagaccagcctgggcaatatggtgagacctctgtctctacaaaaataatacaaaaattagccaggcgtggtggcacatgcctgtggtcccagctgcttgggaggctgaggcaggaggatcacttgagctgggaggcagaggttgcagtgagctgagatcatgccactgcactctagcctgggcaacagagtgagaccttgcctaaaaaaaaaaatactgaccccaacccttaaactgattttatgaccttttagttatttgcaatctgttgtttgaaaaacactcccctacggtatatattacctaggaatggaattgctgtgctatggagtaatgttcaactttactagatagtgacaaattatttttcaaggtggttgtataaatttacacccccattagcagcatgtatcttgtggggccttattctgttctcaccaacccttggtactatcagacttcttaatttttgtcaatacaatataagaaatgatctctcaccctgactttaaactgaattttctcaattactattaaggatgagcatgatttcacatgtctgtttgccatttgtatttcttcctgtgtaaaatgcctgttcatgttttttgcctatttttattgtgtgtgtgtgtgtgtgtgtgtgtgtgtgtcttgttcttattgatttttaagggctctttatcctttgttgttacaaatgctataattatcttttctatgtttgtggcttgtcttatattttctttatcgtgtgttttgattgagataaattcattaattatagtcgaacttatcaatcttttcttttatatccaacactttttctgcatcatctattctgaggtcatgaaatctatatctttaaaactttgaaagtctcaccttttacatttaattattgaatccatacacatttttgtgtatggtttgaggaagggatctaattttatttttctcctttgtggacagtcagttgttccggcaccgtttactgaattggacattcttttctagtaacctgcaaggtctctttggcatttattaaatctcygtctatttgagagtttgtcttggggctattttgttcctagtctctttgtgtatttttgatccaacaatacactgttataattactctggctttataataaaatattactatagtattattatatcagaaatgtaattcagaattgggttggctgttcagaatctttggccatttcatgtaagttttgtaataagtttgtcaagtttcttagaagtaaaacaaaggatgaatattgtaggattgtacttacatgacatacctagagtagtcaaattcgtagagatagaaagtagaatattggttcccaggggctaagaagaggagagaatgggtagttattgtttcataggtagagtttcagtttgggaagatgaaaacgttgtggagatgaatagtggtaatggttgtacaacagggtgaacgtacttaataccactgaactgtacacttacaaatagtcaaaatgggctgggcacagtggcttatgggtgtatcagcactttgggaggctgagacgggtggatcacctgaggtcaggagtttgagaccagcctgggcaacatggtgagaccccgtctctactaaaaacataaaattagccaggcatggtggcacatgcttgtaatcctagctacttgggaggctgaggtaggagaattgcttgaacccaggaagcggaggttgcagtgagccaagattgcgccattgcactccaggctgggcaacaagagtgaaacttcatctcaaaaaaataaataaataaaattaaaatggtaaatgttttgttatttaccatttgttatttgttatcacaggcctgcaaacctgctgaaagtttctttgaaaatatattaaatctatatacttgcagaaaattgacatatttataaagcaggtcttcctctcaaagattttcatcttcaaagtgtccttcagggttgtataattttttccatacatactatatcctttcatagatttattactggttactttataattttgttgttaaaagaatatttttaaattatgatttttgtagttaatgatttattatacatgcaattggcttttgtttataaatctgactgtaaagaaatttcttttaaatgtgtctgtagattctttggagtttttttccatagacactaatttgcaaattataaatttttatttcttcctttccaactgttatttattttattcttttcatgtctcacagcaagagctaggaccaccaacacaatttgaatagaagccatcttacaaggtgttcttttgtcttattgctgattttatttattatgttagagacagggtcttgtgctgtctttcaggctggagtgctgaagtttttgatagacacactttacttcctaaagaagcttatacattttaaatgtatttttgtcattaccagattaattttatcaaatgatatttttctgcatctgttgaaacgatcatatatttcttcttcattttgttagtttggtgaataatttttgccgatcatctaatgttaaactacccttgcatgcttaagaaacactcaattttgttatgctgtattatcatatttatattttcttggatttggcttgttagtattttttagggggaggagattgtatatttatggttttccattcttgtacatgcctgatttagatttatgtcaaagttttacagctctcatagagttattttggggggagtggtttcttattctgtgaaagaatttgataattcatcaaatttgaaaataatccgggcttggcgagtaaactatttaattagcttaattgtttaaagcctaggcttttcttttcatgttagtttaagtaaattgtatttttctaggaatttattcatttggttttgattttattggtataagtttttatgtgtactattctatcattacctttttaacttctgctagatctgtagttgtgtctcatttgtcattcctaaaatgccttcttatgctttctcctttctttgttgttgttgctcagtctcattcagatgtttgactggtttattgttatttttcaaacaactgatttttccctttgatcctttgtgtcatacctttcttttctatttcattgatttatgctcatgaatgtattgtctcctatattatacttttagagagcttgttatgcttttttcttttgtgtattttttaattattatttttttgaatgagattattggtccctcaaaccaaaagtattgaactagtttctaaggaaactattcattagaaaatagaatctcacaatcctgattaaacacatggaaaacacagtaaatgayggcctgggattctttatagccattgggatgacgtgaaattgagaaatctgttayctgtcttttttttttcctttttttattgctgctcaggaccctgtttattcaaactgtggtccatcttaaagcttgaaaacacgagctcctacatgttaggactgtttcactggagtctctgttagtttaaatgtctccatttgtcttcatactagagctagtgggtcttcctaatatttctagctgttgagtaggacgtttacagtatggttagctttttcctccaatgtattagtttgaaaattgtccaacatattaaggagttgaaagaatagtacgactccccaccagaatcagttccatccttgcaggaaacttgttccccaactggccacaaatcatctgccctttcgtttctttttcagatagcaaagcagggcttgattccatcattttggaagcacgacacgctctcacccatatgcaaatctatatccctagcacattttccagcacagagttgagatgtgccaaaggcagtattccaaatgtaaatatttggaaagttccagtccatttatttttgtctcagttattaacctccaaaacagtgtacatctgtctcccacacatctaggttttactgattcagtccctgtgtttatctacttaaatcccgaaactttacttactctgactttatatgaaggaaagcctttgtcatcaamgtgttttcagcactcactgtgtaccgggcacttctctaagcattggtgatcagcagttactaggggctctgtcttcatggagtctgcactccgagagcagtaggatrgtaggcatagtgacagccctgagaaaggtactcttgagcaggtggggacctgaggaaagatgggctgagaacttcctggtacccttaaatccctccagtgggcacccatttgtccgcacagtaactacccctcatttcggcctggaaggagtcagtcatggtactgaaaagcctccatgggacgaggtaaggcagatggagcatggcagggagaggagccctgaaaggaagtggctttgaaagggggttgtacctggctctgcagatagccccattcagctctggcttgtccctgcaagggttgtctctcttcctcctgcatggtagcctgccactggggcccctcccactctcatcagcctgtggacctttaggaggtggtggtagatgtccaggaaagtcaagattttgccttgcacccaacgtgtttttctacattatgctgtaaaatttacaaatattcagcaaagttgaaataattttacaggaagcatttatgtacaaaccatggagattctatyaacctattactgtacctgcyatatcactatcatatctatggatctgtgtatggaactcacccatccattcaccttctctttttgatccatttcaaaataaactgtagacatcagcacatttctaaataatttagcatgagcgtcattaactacagttacatatttagttatagttcttcttatgttgaatttacgtacaataaaatgcacaaatcttaagtgtacattcactgagttttgacacatgcataaacctatgtaaccaaactcatattaagatacagatcatcactccagaaagttctttcatgcsccttcttggwcaatctcactacgcagatacagccactcttctgatattttcccaccacagattagtttttctatactagaacttcacataaacagaaccaggcagtatgtactcttttgtagctgcctcgtgaaattggcataatactttttgacattcacccatgttgttgtgtgtattagtttgtttcttttcattattgtagtattttactttatggatatagtagaatcattctcttatggatgaatagacacctgggatgtttgctgtttytcacttctgtgagtagaaccgctatgagcattcttgtataaccttttttgtgagcatatgtttttatttctcttaggcaattagtaggagtgaaactgctagatcatagggtatgtgttcatttatttttatcagaaactgtgacaacattttgcaaagagatttcaccattttacactcccatcagcaagcatgagagttctggtttctccagatcctgggcaacacttgatgtcagtgtacttaattgtagtcattctggtggatgtataatgctacctcactatggtttccgtttgcatttccctgatgtctaatgatacttattttaatttaatttaaactttatttaaaaatagagtcatttggatcttcttgtaaaatacacagttacaaggaggttgcctttagcaatgtttctatttttaaagaaagtctgcacactctactgcactgggcaggctcctagacctacatgacatgtgactcacatgactcagcgagtgggtgagatccccttcctgcagcacgtgcagttcacaatctcaggtggacaaacatgttctacagtctgaattccagggaagctaatttccaatatcagcccctggaatgactaaaacatacttttcaataatatatgaaagctttttacatctttcattaaatagactgaggcagaaacccaaacttcttaaagcccagattcagaataaacattgacatcttttaaatgtcccggtaattggcatgtaaatactttcctcttccctgtctaaatggagggtgattattaattcagcacttggcatctcaaaagcactgcgtcaattgcttcttaacgtttctctcgtgccttctgattgagcaacaacagccacttgggttttttttttagttaatatgaatttaagttatttgagtcttgtaataacttacttcctcaggaagtggggaaaggggagggcaagaggtggctgtgctatgggaaaccctaagtgtgaattaacccttcccctggttgtctaggttatctaaaggttcatggtgggtccataaaattggcatgaaatagagtttcatgatgaaaagctcacgagcttttaattgtgaacttggtkgttttgagtctgtgcttacctctcttaactcctctgtgcctcagtttcctcatttgccaaatgggaaagatgggaattgctgcctgctgaagaaagctaccatctctgtagcacatcctcccctgtgcttgcacacagccctatcacttccctccagggtgcctcttgctttaaatgctgatgttccccaacaaaacctgagcttgactgagttctgcctgtgtgaccttgagcaagttaccaaatcttgctaagcctcagtttcctaaactctacattggataattatagtattctagaattatcgagaaaattgaataattcacagcagataatgaacacaattcctgatatataatatatttaataagtattattaattgataaatattttgtaatagatatatttgattattaatatccaattataataattataataaatgcccagcagtggttattataaactcacttgatagagctgtatagtggttgagttattattataaactcacttgacagaattgtataatgggggccaggcacagtggctcatgcctgtaatcccagcactttgggaggctgaggtgggcagatcacttgaggtcagcagttcaagaccagcctggccaatatggtgaaaccctgtctctactaaaaatamaaaaattagccaggcacagtggcatgtgcctgtaatccccactactcaggaagctgaggcatgagaatcacttgaacccaggaggtggaggttgcagtgagccgagatcgtgccactgcactccagcctgggaaacagagtgagactctgtctcaaaaaaaaaaaaaaaaaaaaaaaaaaaagaattgtataatgattgagttatacatgaattgtataatggttgattatacttgacagaaattacattgctgttaactaagaaagactatgtaaaatattgaacactacttataatacaatagtaagtggaaaaattaggaaaccaaatcatctctataccacaaggacaaccacctagaataaactagagctaagattaccgaaaagaattatgaatacagtcagtgagagatgggatggggagattatgtctattgacactatttttctacagaaaaaaatagttttaaaaaacaaacctactctatttctttcaaatgaaattcttggtgaggccaaaataataatgatgstcaccgtgattttctttcagtttcctggcatttaacatggacacagttgatgatctcgcctttctgttgaaagcagtgaaatttcgtgaaagggttcttcagcggggtttggtggccagaatttattataaggtaaagatacactgtgttatatttttccttttgacatgtgtttaagggatatccttgctggtgaactatctgttaagtttagtagaggatgagtcagcctaatgacaagctcctggaagcggctagagttcctacgggccattttgcatgataccgttgcttgctctagaggccaggatgcttctgtttaaccccctttatgtcatcttgtagaattccacctgcaggcatcatgtggctgccatgggagttgatgagtggtgtaattttcagcccttatcaaagttgaaaaatcattgttttatgtgtataaagagtacatcgttctctaagacagggaggggaactgcctcaggcatatgtaaaaattaacattgggttagtctaagatgcattctgtctcctattaaaatacctgtaaagctctgcaaaagcataaaaccttgtgtcagcattgatagaaatctagaggaaatttccaccaagtacagtgccagtggggttagtttgagggatcactgtccaccctagcaatatctgtttcatcttctgatccggcacagawtagccaatggaaccccaggagaaggctttactgctcctattctatgtccaggccaggggctcagggctaccataacaagagtccaggttgcttctctccttctgcatgggaattaggttccaagccagccagaattggattcctgcaattctccccttccagttcacccctttttatatgaatttcaaggtcatgtctcctagtacaacacagcaggggtagaagggaagaggatggatggtacatgggaatgggtattctcttaggaaatgctttggaaacagaagtgccctggaagcagaaagcagccaagatccaccctcgtggaacaaagccacactggatgagaacctgcaggaagccaggctaggaattgtgtaaatcaatttttcccccaggcgtagatctgaggtgaggctgtgccagaccccacaaacgcattcagttgggtttaaatcactccacatatcctccacatatcaaacatggagccagccaaaataagagatggatatatccaaaaggaaaaatgctacagctgcggtgaagagcagaattaacaagggagaaaatgcaatctgtaaactgttttcgaagactatagaagaaaaggctaaagacaaaacgataagagaagaaaacagaagcagagtgaaatgatagaaatctaacctatggataacaaatattcctggaagtgctgggacaaaaggagcagaaataataatcacagacatagtagaaaaagaatttccttcatttccattatgctaayggaaaaaaaagacttatacttagacatagatgaaaaatctagaataaagagaacagaatgtgagcaacaagacagaaaataatagcttactcaaaaacagaaaaaattaggctagctgctgtcattcactagctccaaatggagtaataagtactcctctaaagaggaaacttcatgatctaagcataatattccaagccaratttaatccctgagtacagccaatggaaagatatttttagatatctaagaatcagaagcaatttcactaatatagccttccttaaaaagttatcttaaaatttactccataggacacaaaaaagaatcaaaatgaataactctaaaataaggaagtcaagatataaaaagattggcggtccctgtgaagccaatactatatgtttttaaaaaacagtcacgaaattggctgggcgtggtggctcatgcctgcaattccagcacttcgggaggccagggcaggcggattgcttgagctcaggagaccagcctgggcaacatggcaaaatcccatctctacaaaaaatacaaagaaattagccaggtgtggcagcacattcctgtagtaccagctactgaggaggctgaggcaggacaatctcttgagcctgggagtcagtggttgcagtgagccaagatcacaccactgcactccagcctgggcaacagagagaccctgtctcaaaaaataatacggaagctaaaaatattttttttttggaaaaaaacatgattttttaaaaaacttgataaactggttctgtaatagtctatacgaatttttaaggtaagatgaaagacaaagtaaaaacatactgaatttcttacattaattacagggtaagcaaaagaccttgttttgttctgactttagtaattasagaaacataggttaaaatatatgttttattaaattgaaagctaacataactactgaacacagaatgcttgttttccaaatcactgcagcagacaaagcagtgaagataaacaagtggtcagaagtttgtgtaatcagagcaaagcaaagaacaaatcagaaagcatgttctcagaagactcaaagacactccagtgtggctcctttaagtgaacccacagcaaggccaggagagctgtttaaaaagttcccactgcgaattgcgccttggtttgagaatttctccgggattgcttccctaaatctgtttcccattaattgtgatatcccctttgtctcttctaatttggctcaactcaagacccctctctctggccccagaagattaatgctttgatcttgaactgagttgatctggtaattccttgaaaacaacatttccattacaatatgatcccttaagcagtggagaggcagcttttgatacattttcatcctagagagccttaaatccctccagctcccacctctggaaagtgggggattagatttaaaatgggctataatatgaaatgaaagaggtttcaatcctcctagtaaaagcacagactctcagattagattagattacacattgtgtatagaaacaaatctaattatatgcattgatgtataactatacacatcaaaacaaaaaatgatattttaaaagattttcaaaagtaaacaatgagtaaatgtgtgttgggaaacagcaagatattttcagatatctgtcaaaaggttgttatattagttagttggggctgccatgacaaaataccacagacagagtgccttaaacaacagaaatttattttctcacagttctgggggctggaagttcaagatcaaggttcccaaagggttggttttctttgagcttctctccttggtttgtaatggccgccccgcttgctacctctcatggccatccttccatgcacccacacccctggtgtccttcttcttataagaatactgtcgtattgcattagggccccactctacagcttcattttaactgaatcacctctttcaagactcccatctcttaaatatggtcacatcctgaggtactaggagttgggacatcaatgtttgaatttagagagacataatccagccactaccagttggcaatattaatcttatcaaaagcattaaccagaaaggcaaaatgatgacctcataaccatgagcctgtatgtgccaaatacattttgtcctccaagatggacccccaagaatcccacctcctgatagtcacagccttgagtgtcttctccatgctgtaccagagttggtctgtgtgacatacagcagaaataatggcatgttgcttccagataaaatacattatgacttccatcttggtcactctgttgcactctctctctttatctctaatcactctgggcaaaaccatgtcataagaatgccctatgggaaggcccaggtgtcaaggaactgaagcttcctgcccacaaccacatgagtaaccttggaagtgtaccctgcagctccagtcacagcttcagagactgcaagcatgggacagtcaacactygctgcaacytcatgagagtccctgagccagaaccacaccatcaagcagcttctggattcccaggcttcagaaactgtgtgcataatgaacacttggtgtaatccactaggtttggggcaggttgttgcacagcagcagatacctaatccagatttgggcacccaaaagttgggtgctgacataacaaaagcctaaatgggagtgtgggtttgcacctatgcagttagctttgagaagagtcctagtagaagcctaaagtaccttgacgaaattattaccagaaacctttatgatcttaacctgtgggtgaggacttgtaggaaaatgaggtaaaaattattggaaactggaggagggggatccttgttaygtagtggcatagctgtagccacactgttgcctgaagttatgtggaaagtagaaaatgtacccaatcaatgaagtgatctagcaaaggagatgtccatcccgcaagttgaaggtgytgcctgccttcttattgtggctttcagtgatgtgcaagaagagagagagaatctcaaggaaagagcttttaatatgcaggacctggcagttaatatggttttgaagatccctgagctcttcatatggtcaatgtgttcatttctgagggcttctgtgacaaaccaccacagactaggtggcttaaaacaacagagatttattttctcacaactttggagaccagaaatctgaaatcatggtggcagcagggccctgctccctctgagaccctgggtagaatccttccttgccctttctggcttctggttgctactggcaatgcttgatattccttggcttgcagccgcatctctccaggctccccctctgtcatcacatgacatacccatgatatctccccataagtctctgttgtctcttccgcttatcagggcactagtcatattggatcaggacccaccctaattacctcattttaacttgattagctctgcaaagaccctatttccaaataaggtcacattcacaggtaccagggcttagtacttcaacatgtccttttggaagacacagcttaaccatatcagcagacagtgctaaaattaaaaaattaaaatggcttcagagcagaagtataatccaggaccctcccagaaatgcgtaatctaaggatgaagcccaaggcatgactgtaaaattctttaagaaccgaaaaagattaaaggtaagtcttaagtcatgcaaaaggccttctgagtttacaagtatgtctttcagactctctcaattatacaataaagctcctaggaagcttgagggcatcctctgtcagccttctcaacacccccaagggcytatgtcaaagagatttgtgggtgtggcttttgtctaatggaataaacctccccaaagattcacaggaaatgcacaaagtttctaagagaattatatcaggcaaagatcttttggcttgtgctgaaaggtacagagacaatacaaaatgaatagagccactaagcttctgcaatcagggaacaagtggagaaaaacaaaacaaaacaaaamaaaaaaaccctagctataaacaagtgctcctttcattaaaaagtcaggatgcctcagagggaagaagcaagaacccagagggtggagccaagggtcacagagaatcaaaccacctgggtgtgcataggactgtgcccttattaaggaacttccaacatttgctcaactggatgtcagaatttatatggaccactgattcctgcattattcccattttcctcattttggagtaagagtgtatataacagttatcctgtcccgtcccaccattatatattggaggacagataacttgtctccttagttaacagccttcaaagggagaggatctgtacttaaggaataacacctgaggagccttatttgcacctagactgaatttagatgaggggattctggactgtgagctgataccataatgaggtgaaacttttgtgggccttggaagtgtatgtttttagaggaatgtgaatcattaaggatgattaggatgggctatgatggccaagctccaagacagtcttcaacgatccctgcctcctgtagtcacrccctcatggagtgcccacattatatcgttgaaattgtcttagtctctgtctctctgtctctgtctttctctctctctctctctggaagccatgtcatgagcagcccatgttgcaaataackgaaacttatgaatgcacttggaagtgtttcctgtagccctaaccaaagcttcagagactgcaagcctgggacagacagccagcaactggactgtcatctcatgagagaatctgagccaaccatgcaaccaagatatgcccaggttcctaactctcatagactgtgagatgataatttttttattttaagatgctaaattttgggataatttgttatatagcaataggtaactaatataacatccaaaaacaaacaaacaaaaaactgttcaaaagttttggcattgatatacacatttttgaagcaaaatataaagaggaattrcaatatttttcaaccaatatttccatttaataatataatgtggttatctttctatgtcaataaaaacatgattgcatgaggttctgatgcttctrtgtttttagttatatggacaatgtcataatgaatatccttaacagtatggctttcagactttacatgctacaaaattgttctttataaatgttgaactaaattgtacttttccagcatggtattagggtccacatttctccactaacactttatttctccaactttctaagtttttaccgttagggtttaggagtctatcatcttcttttcatattttcattttatttttttcccattccccctaccctccatattttttattttattaatacaggttgaatgcttgggacaagaagtgtttccaatgcagattttttctgactttggaatatttgcgttatacttgtgagcatctcaaatctgaaaatctgaaatccaaaatgctctaatgaacattttctttcagcatcatgtcagtgctgaaaaacttttggattctgaagcatttcagatttcatatttttggatttaggatgttcaatccgtattagaaaaataggtccattgtaaaatatctacctttaattttattttcagcatgaaattagaagctctctggtacttcttaaatattcagaaatattttctgcttatagttgttctctgtcagagaccaaatcattcattttttcctgtgtgtattttctgatttcaagagaagaaaacatttacacacacatgagtaagtttcccaaacataaaataaacgttaggcatgtggggtggtgaacaaaattcaagggttttagaatcactggactaggctgggtgcggtggctcacgcctgtaatcccagcattttgggaggccaaggcgggtggatcacgaggtcaggaattggaaaccagcctggccaacatggtgaaaccccgtctctactaaagattaaaaaaaaattagctgaacctggtggtgggcacctgtaatcccagctactcgggaggcttaggcaagagaattgcttgaacccaggaggcggaggttgcagcgaaccgagattgcaccactgcactccagcctgggcgacagggcgagactctgtctcaaaaaaaaaaaaaaaaaaaaaaaaaaaaagaatcacagaactagcttttaccacttccgagcttcagttctcacatctgtaatttgggaaaacaagagtaggttatgatayaaatttgttacaaggatgtattaagataaaatgtattttaaaaagcactaaamattataaaccttgcactcgtgttaaatatcttggttactaccattaatgtaaccatttttatggtcaattcaaataaatattcattaagcacagatagttttctagggcctggaaggggaagaccacaaagattttgaaaatatgctcttgccttaagataagtccacctctggttttagcccaaggcaaaataaaagatatgataaattaaggcaaaacctacgaacttagaggaaagaatatggacttctacattctagtttgtatttttggcccggctttttgctcagctagctgtatattggctcatgtctacctgcattagtttggtgtatcttgacataaaatgattctgtttagcaatttgaacatctgacccaaacagagtctgggcaatagtctttggacagtgtccaagagagggtgatttcatctagaattctgagatcttctaaaaataaccctgtgatttagttcagaatctttaaattaaaaaggcaaaaacacaagtgggttttctcagaaccctgcttttcagctttctagtaatggtctttaattttcttcaaaagcacatttttactttagagatgcttggccaacccttctaggcacatgggaagcccatctgccccttacycgggagcaagtgagaagggctagcaatccaaggtcaaagttggagagtcgagaagaccattgagttctcatgaaagaataagcctttgcaatcatttgataatgcattcccctgcttggtgtagccagaatttcacttaaaatggagccaggaaatgcccttccttcaatgtgttggtggccatggaaggagtccagcccccttgcttcccttgcttgccccactcyctggttttccaaaatcttgttgcaaacaactcgtcattacagttgctgcatgatttcgacatcagtgggaagaaaaaataaaccaataaacaatggcttgtcatccaggaaccaataggaaaaggaccaataggatgtccaccaatcagggatcttgatccaatagcttggaaatgccattgataatgaaaccagagaaaatccatttctggtcagcttatactgttctgagactttgagggtcgggacagagaacggagagtgatagcagccactctgtgtttgttaggtttttacaaaccaatacagtggcccgaatggcagatgttttacaacaatctcatggcacagaaatatcaattctggtagggacttttgtagttctatgaggtaagtctatggagaaaaagatagattctcagtaatcaatctgtttaacakatttctgtttattttcaaatgtacctaacagaaattgggcaaatggaaggatgagaatacagatggacttaaaatagttctaattctccaagggctgattcctgttttctctctcatcacctgtggcattctcccaccacattggtggtgtcccccacttcagggtgtataagactcacctgggaaagactaattttcaaaatctgatacaggttgccctycatcacactgccaggctgagtcccaagcgaaaggcaagtcatttgcaaatgaacatcattaatgatcctcaaaatccaggggcagtaaattctttggaaacaaytgctctgagttatttttccttattcagatttagaggtttggatggagaattggtggaggctggaaataagattattagaaacataactttctagagcttcctgtatagaaaaatgactgccgcccacagtttttattgttgtggtcagtgtgcaacctgactactcttgtgtgtgtttgactttaaacctcttaacttagatatttaaaacataataaaccgcagtacttttgtaaagcctatctttctaacagatgccacctattctgttatagttttagaccgacagtgtctttgctcaggtcacctgcttggggtttggagtctcaccttagttctcttctgtggaaaatgcaagctgtctgtgttggcgattgggtggcacacacatatcaagtgccttggaagatcaccaataggatgtccaccaatcagggatcttgatccaatagctttggtcaggtggtagctgctagatctagaggaactcagaagtgccattgatgatggacccagacagagaaaatccagtgctggtcggtttgtactgctctgagacattgwgggtagggacagggaacagagagtgatagcagccattctgtgtttgttacgtttttaaaaaccaatacagcggtctgaatggcagatgttttacaacaatctcatggcacagaaatatcaagagctttattccagagacagatcatcaaagacaggaaataaaattagtaaccagattttctgagctcacagtttgcattgagcttgatgtattttcttactcctgtggctgagttgagttaggaagatgacctgatggaggggctctctttgtatcttcagagcatcgatggctgcctgtgcaaaggtcacctcgtgtaaaagtgaggttccctctttgctcactggggcttgaaagtcctgtacaggggaaacatattcccattactcagtgagagattaggcttaaaaccatgaaactccagagatagggaaaggacgatgtcgtagaaagctatgcgtgatggttcaggaagggatagctgacgatctggggagacctaggagtgtacaagcgggaacatctgaggccaattgtaaccaactcccagaagtacagtgctcccaagccttagcttggcacttccctctttgttgtggctgattgtaggaatgttcttcttttgttttgtggtgtttccctcttttttttttttcttttttgagatgaagtctcgctctgtcacccaggctggagtgcagtggtgcaatcatggctcactgcaaccttcacctcctgggtacaagctattctcttgcctcagcttctcaagtagctaggattacaggcatgtgccaccacgtctggctaatttttgtatttttagtagagatggaatttcgccatgttgatcaggctggtctcaaactcctgacttcaagtgatctgccctcctcagcctcccaaagtgctgggattacaggcatgagccaccgcacccggctgtctttctctcttttctactgcctaacaacccagacaccagttaatactaggaattgcattttctctttttccttcacttctttctccatctttttttctcatagagagcatccttaaattctcttcctagggaatcctgttatggaagagaatggaaagaaaagaaggaaggggaggcaaagataaggaaaaggaagaagttacactcctgataattacatggaaagtacagtcactcccatgggagtatgagagctagaagagaccctgggagtcacatagtgcaacccactcatttacagataggcaacctaggatcaagaaagctaatggtttcttcaaggcaatacagtcaccaagggcaaagatgcgactgatatttgaatatgcagataccctatttttcctcaaactttcacctattatttttagtatccatcagtggatctttttggaaacaattaatactgtggtgtttgcctagtagggattttctattttcctcattcctaccactttattaatgggaagcaagagttgtctcttctccaattatttatttattcaattaattatgacttatgtcagcatgcagtcacagatatttattttatgctttgggttacaatccaatattatgatttatttattttcttgccaattgttccaagcattaacgttgagagctccttcaggttggcccctgtgtccctttgaagtgcctctatccttttttgagtacttccttactttatttctcatcttgtagtttccctgccaaccctgcagtcaatcatttctccaaggagagctggttctttttcctagagaatggtatttaaaaaccagcatctggtctctgggtgtgctcattgctactgagttgttgctgcttctaggcctacccaaagctatgaagtaaactcacgtatattaactcacgcatttgcacacagatctgtatgcacgtatattagaaatcatgagtttatactgataactctgattccaattcaaacaacagggcttttttctagcctgccctctttcctatttcaaacattcttctatgagaaagcagaaacctggctttcattgtctattgtatgtttacatatttgctcaccccctgtgtacacaacaagtagtttcagaattgctaactcataccctggtgagagacacatttactaactggaatacrgtatttttctttgtgaatttaaccttacagtatctagtcaaaacagtatttccgaagtttctttaattagcctttttttccccctcttttggtgtggttttattacttataacaagttaggttcatttgtaactacttgcattttactttgggtttcctctatatcctggttgcttttagttaatcattttttggctaagcgaaatattactaagtttctaatattcagtgctatacacaaaagtgtactcagagagctaccactctttcctcattccagctaccccctttccatcacttcccttttttcctacatacctcatgtaggtggcaagatatctttagtctctggcttatccttcctgtatttctttcacacatagagatctacctcattcatttttttacagccacagaataatctatgttatggatatactgtagcttactccacccctctcttgtgtatttaatccttcytcccaacmtttggtcattacaaacaacgttacagtgaataaccttattatataaattttagtgttgtttgaattatatcttcagggtaggtttctagaaatgttgttgttaggctcaaaggtaagtgcatttgtagttttgttaggtattgccaaattctcctccagaggatttgtacagttttcattccactgagtgaagtctgtttcctcaaagtctcatcaatagaatgtgttctaatatttttcaatttttgccagtttgataggtgatcaatggtaacttcatgtagctctaattatgagtgcttttgagcagtttttcatctgtataagggtcattttaatatgttttcaatgtattgtctgctcatattattttcccatttttccatagggttttggtatttggtccatcaattttgaagagtactttctacattaagaattgtagccttttgtcatattgaaaaaattttctcccagttcgtcacttgtctttcgactttgttcatgtttgccgtgcaaactttttaaaatttttttatatagtcaaatgcagtaatctatttttttattgcatctggactttaactcacagaaaaagcctttcccttcacttaggttaaagataaactcatttcatgaaagcctcaatattgttttagggagtcagaaaatggagtttgaggctaggcatggtggctcacgtctgtaatcccagtactttgggaggccaaggtaggcagatcacttgaggtcaagagttcgagaccagcctggccaacatggtgaaaccccacctctactaaaaatgcaaaaattagcctggcttggtggtgtgtgcctgtaatcccagctactcaggaggctgaggcaggagaattgcatgaacctgggaggtggaggttgcagtgagccaagatcacgccactgcactccaccctgggtgacagagcaagactccgtctcaaaaaaaaaaaaaaagaaaagaaaagaaaatggagcttgagactgccaagattagtgaaaaygaaggaggaacatcccaaaaagaaagaagccgcagagagggaagcttcaaaatacatgtatgaataccactcaaatccatgactgatccctggaatatccatgagtggataagatgccaaagagctcaaggggttttaaagttggaagctttaaagagcagaacagagaactcaactattgcccaccacacaggagtcagaatttttagtctgaatcctgccaagttagagggatgtggtaaactcatgccttaggagtaaaactatgtctcaggaaaagggattgcctaaggactgaagctacaaccaaaagaggctaaaggcaagccaaaatatattcttcctgacaaagcataaaatcaagactctataaattcaagtttatctgctagtgttttaactgcatgctagaataagactcaataccctttagaggaagtcaacaggatttagggtcagtatcattatagtgtccactagatacttaaatattatcaggcatgggaagaaataggaacacatgatccatagccaagagaaaaatcatcaagagaagaagaccccaaaattcccagatattgaaattagcagacaagggcttttaaaaaatatgaatttataaaagagtaggtggaacatatgaataaaagggatgaagagagaggaaatttcaggagattgttgaacgatatgaaaaaggaaaccaaatggaaattctagaactgaaaaatacaatagtattaataaaaaaataaatggatgggattaacaacacactgggcaaaaagagaaaagtgtcagtgaacctgattaatagaaatcatttgaactaaaacacataaagaaaaatattgataaaataatcagagccctcatgacctgtggggtagtaacacacactctaacatatatgtaattggagtctaagaaggagatgagagagagaatagcatagaaaaaggattagccaaatattttttaaatttttatcaataatgacagcacataaattcaagattctagcaggagaggatgaaaaayaaacaaatataaaaataagagcccatyatagtataattgctgaaaactaaaaataaagaataaatcttaaaagttagaagagawcaaagaacattagatgcaagaaataatggtagaatgatggttcacttttcattagaaattgcatagccaaaggacaatagaaagatatctttaccatgctgctgaaagcaaaaaagaatctaccttgagctctgaatccagtcgtrtgtgcatatgtgtatgtattaaaatgaaataaaggcattttcagtaatagaatttgtcaccaacagacctatactacaagaaatgctaaggaaggtactttaagctaaacaaaatgaaagtaaatggaaatgcagatctaaagtaaggaagaacactgaaaatgctaaacatataaggaactattaaggactactttttttgtcttaagcctttttgaattcaattgayggtttatagcaaaataattacaattatttagggtttatggcatatataaaagtgaaatgtatggcaaaaataatgtaaaagataggttgtagtgtaaatggaattatgctattataagatttttacataatatatgaagtagtatcatattaattcaaagcagactgttataggtaaagactatagattgtaatataggaggtagtagactgagacaaaaaggaaaacccttaatctgaaagaagacatggaagaagaaacaaaaatcaaaggagaaggactacaaatagcagtatgacagacttatacccaacaatatcaataattacattaaatgtaaatggccccaatattctaattaaaaggcaaacattgttatagaaggttaaaaataagcaagggtcttccatatgctttgaatggaaagacaaggacaggaaaagatatagcatgcaattactgagcatgagagagactatgttaatatcagatagaggaaactttaaaacaaggaatgttaccagggaccaggtgcagtggctcatgcctgtaatttcagcactttgggaggctgaggtgggcagatcgcttgagcccaggagtttgagaccagcctgaccaatctggcaaaaccctgtytctactaaaaatacaaaaattagctgggtgtggtggtaacacagctgttatcccagctatttgggaggctgaggcatgagaatcacttgagtccagtaggtggaggttgcagtgagccaagattgcaccactgcactccagcctgggcagcagagtgagactctgttaaaaaaaaaaaaaaaaaaaagtgtattaccagggataaagaaagtcattttttgattattaaaggataatttcatcaagaagacaaaataattctacacaggtatactccataatagagattaaaaaatacatgaaacagaaattgacagaaccatggaagaaatagacaaattcagtaattgatgaaataagtaggtaaaaatgtaatatgactataggcatacctcattttattgtgctttgttttattgcatactgcagatgttgtgttttttacaaattaaaagttagtgggaacactgtgttaaactggcctcttggtgccatttttccaacagcatatgctcacttcatgactctgttagaatttttttagcaataaataatttttttgaggtgcctactttttttagacataacgttattgcacacttagtagaatatagtgtaaatgtaacttttatgtgcactgggaaaccaaaaagtttgtgtgacttgctttattgacatatttgctttattgcagtggtctggaatcagacttacagtatctccaaggtatgcctgtatagaagatgtgaataacactgtcatctaattcaatcttcttgatatttgtaggcatttattgaaaactacacccagagctacagtgctggccataaaacaaatctcaataatccttaaaaagattaawgtaatgcagagtgtattctatgttgacaatgaaattaaattacaaattaataacaaaaagatatctggaaaatcttccaaatatttggctattaagaaacacaggtctaaataacttgtgaataaaagaagcaatcacaaggggaattagagaatatttcaaactgaatggtaatgaaaacacaacatactaaattttgtgaggtgcagtaaaagggatccttagagggaaattcatagcttgaaatgcttatcttagaaaatatttttaaaaaggttttaaataaatgatgcaagtttctaccttaagaagctagaacaagaagagcaaaatcagtagaataaaggtaacaataaagatgagagataatgaaatagaaaacaaactatagagcaaatcaataagcccaaaagtttgttctttgaaatgtttaataaaatttcttgatccctagcaagactgatcaggaaaaaaagataaagtacaaattaacaacgtcaagaatgaaagcggatattataatgtcataccacatactacagacattatacaatatgagaatattatgaacaacttaatgcaaacaagttcagtaacttagaataaattcctggaaaaatacagctctcaaaagttaacaacaacaaaaaaaatgggggccaggtgcggtggctcatgcctgtaatcccagcactttgggaggccaaggcatgtggattgcttcaggtcaggagtttgagaccagctgaccaacatggtgaaaccctgtctctactaaaaatacaaaaattagccaggtgttgtggcgggcacctgtaatcccactgcttgggaggctgaggcaggagaatcacttgaacctgggaggcagagattgcagtgagctgagatcaccccactgcactccagcctgggtgacagagggagaccctgtctcaaaaaaaaaaaaaaaaaaaaaaagaagtaaaagaaaaggaagatctaaaaatgtctgttaaatgaatttaattcgctttttttcttttcttttctttcttttctattttattccataacaacaacgtttcagtcaaaatgaatttaatttgtaatgaacacattcccacaaagaaagctccaggtccagatggttttactgttgaattctatcaaacatttaaagacaaaatagtatcagtcttacataaaactctttcaaaaaccagtgtaagactgatacccaaaattagtaagtacagtacaaagaaaacaattacaaacaaatattctccacgaatataggtgaaaatacataatagaatacatcataacaaagtagtgtttattataagaatgcgaggttggtttaatagtcaaaacatrtcaataaaatatacaatactaacaaaggagagagcatatgattatattatggggaaaatatatttgatgaaatccaacatgagctgatgatgaaaagtctcagcagagcagaaatagaaaggratttcctcaatttttggagagtatatctacaaaagaacctacagctaacctcatacctaatagtgaaatattacacacttttctcctaaagacggaacaaggcaagaatgtccagtttactacttttatttaacattgtattggagggcctagccagtgcaacgagacaggaaaaaagaaatagaagaatttaccaaactaatagctcaaaacagggctacaggayacaaactcaatatctaaaacgaattttgttttatatgttatcaaacaattggaaaataaaatttaatttacaatatcatctaaaaacatgagtttcttaggaacacatttaatagtaaaaccaaaacatgcaatatctgtacactaaagactacgtaacacccaaggaataattgaagcaagcctaagtaactggagtagtatgctgtgcttgtgtatgggaaaactccacattgccataatgttcatcctcctgaaattagcctatagattcagcaccatttcaagcaaaatcttggcaggaatgtttgtagaaactcataagctgatttgacaatcacatggaaatgtgaatggcctaaaatagcccaaacaacttcaaaaaacattgaagaaatgtagagggattgtactacctgatttcaaagcttgtgctaatgcttcaataatacagacatggtactggcatcagaataagcagagagatcaatggaacactacagagtccagaaattgacccacatgtatatgttcacttgattttttgacaaaggtatgaaggaaattcaatgatgaaaagaattttttaatagtgcaggaaacatctagatatctgaaggaaaataaattaactgtgaccttcttttctgcataatacacaaaggttaatttgagattgatcatagacttcaatgtaaaagggaaaaactataaacttctcaaaagaaaacataggagaatatctttgggaagttggcataaactgagatttctcaaaaagacacaaaaagtactaattggtaaattaaatcttgataaattgaatcttttccaaaagtgaacatttttcttctctaaaagatatcattaagaacatacaaagacaaaccatagccttggagaaattatttgcaatacctgtatctggcaaaacacttctatccagaatatataaagaatacctacaatgcaataatgtatagatacaacccaggaagaattgcacaaaaagctttaaaagatatctcataaaagaatataaaagaatggttaatgagcacatgcaactttgcctaatttgtgttagtcatcccagaaatggaaattaaaaccacagtgaaacaccacgacacacccactgaaatgattaaactaaaatgattgacaacactccatcctggcaatgctacaaagcaaccaaagctctcataatggctatctgaaatctaaaatggtaatcaccactctggaagacagagtggcagtttcttataaggttaaaagtacacctatactatgagccagcaattcccttcctagatatttggccaagagaaattaaaatatattctcacaaaaagacttgtacaggaatgctcataacagctttattaataatatccaaaaaccagaaacaggaagccaaatgttcaacatgacactagataaataaactgtgatatctgtcatacattggaatactgcttggcaataaaaatgaataaactgctgccacatggaacaacatatgtgaattttagacattatgtttagtgaaagaagcctgacacagaatagttaatactgtataattccatttgtgtgccattcagtggggggwgaaattagttttgtttctgttttcttttgttttagagacgggatcttactctgttgcccaggctggagtgcagtggkacaatcatagatcacttcaacctctacttcctgggctcaggcaatcctcctgcgtcagcctcctgagtagctaggactatgggcatgtcccaccacgcctggctaatttttttaatttttttttttttgagttagggtctcactgtattgcccaggctggtctcaaactcctgacctcgagtaatcctccctccttggcctcccaaagtgctgggattacaggtgtgagccactgtgcctgaccccaaaccagttgatggtgatctggtgatcacagtctgaggggagagggtggtactgcctggtgggggagttcagagagagggtataggaaatgttctrtatcttgatctgggtgattccatgggcatatgtgcatgtaaggaatcctrgagctttaaacttaagacttacgtgtgctacacatctgactgtatgtgttttctacttcagtgaaaacatttacaattataacttaaacaggtcctcacagcagtcagacagattgtttgcattacaggtactgtcttttcatgtgaaaatggaartttagaaatctagaacaggcttcagctgctgaatcttgatacacctactgggggaagaagcaatggctaatgacaacagctcacactcatcacgtgtccatcctgggccaggccccgtgctaggcactttgcagtgttacatcgaaaaatggcagtgggtgcccaggccagccagcagcatggaatccaggtagcagggtgactgacagatggtgggggtggtctgtaccagtagccagagtcacagaagcctggcaagaggcaagcagtggagggctggccctgaacacaggcagatgggccctagagagtctggatattctattcactggggaggatggacccctggaagcagggccccagcaagatggtgaggaagggccagtcatggaagttgggcaaatcagccagcaagataatgggacaagacagagctcagtttcagaaacaggcaaatcaatggggacatgtgacaagctctggtctcatgactgaagagcatacaattgaagtgacattttctagcttaccctacaccaattgctagtgagtttgacttggcgtaagtgacaacaccgcactacagtttcttgaagttcccccctgattagggagcagacttgccctggggtgaggcattactggaggtggtggtattggggtgtgcagaaatgagcctgttattctattttgccctgtctgcacaaggccagagggcaggccctcgtggtgagctgggatcacagacatttgttgagttcctgccatagcgaggaactgttcagagtccattgtcttgccacataaccagcaatcttaccgcagaactgagaaaagggaccccagaaagttgtcagaccacacgccctcaccatttctgcgcaagctcagcagtggcagcagcttcctgcctccagcagcacagtagggtggggacatttctgccactagaggccaagtggggagcagtggcctttattggggaggaggcatttagaaccaagcatgcaggtgacatgcatgattaggacacagcagagaaagaagtgcagagaagggagagaggggagtcagattcatccccgtcaacrccttcaccttctctgggggcagtgctaactccagcctgcctgcttgccagcttcgtggcttagcggtggagaaccatggccacttactgacctagaattccatgtggcagctcttggtgacctgttcagattcctgcccctccttccctgcttgccagcaccttgggcagttaggtagtgtggttctggtttggttagtggtattgtagttgttactgttgtttaatccctgatattgtttcsctccttactggcaggtatctgaaacctctctccctgccgcttgcaaagacattcataagttttcttgaagttctgaaaagtgagtgggttttagtattcttaaaggcttagccaaaaatgtaagtcccttagttacggtaaaatacataaaaatgcttagttgaaacttcaaatatatagctaaataaaaaattaaggaacaaaatgacctgtaaacatttttatttttgctgactaggtcctttaaaaaaaatgctgcttaccagttctgaggtgtgaggatgacagttcctgtccccgaggaactctgtctgggagggaaggatggcaggggaagtgcagggagaggggacggaggagggagcagcggggagggaggaggcacataccgtggggtgggcttggtgcataggggctaggatagccgtgagactggaactgagtctggaataacaaatggcagagcgtgccctgtcctatcatccccaggcagagagtgggactgacctttgaggcaaggcatggggatgtcagtgagtgactggcaagttcagcctgggcgtgaagcccatcagtatcccattgggtcacaggctagagaggctgacggacagggtgattgggtggcggatgggcccacagtcttgtgtgccctgtgtgaggctgtggaccttccatttctcccttccctgtaggggtcatggcctgatcacatgggagttctagggagagccttctgaggtccgtgctgagagagtgaccattcaaaggccgtagtaaccaagggcccagaagagtgaggatgcagcccgagcttgggtggtagcagagaggctggagggggtgttggtgggacttgggacgctgtgatggggagcgagctgagggaggggtcaaagctgggaagagaggatgccatagtggagttggagacacagagccccaaggagccccaaattgcagttgggttagcacttcccttgccagtcccttcttcactggatttgccccaaacccctcatggggtggattttccgcatactatacccatcacctcccactcacagccccaagaatgcctcctgcagctgcctcatgggcccagcaccagctgagctgctgcagagattcaggaaacaaagatcttgaggcctaatttctttcccatattaaatgtacatttttctgccttatgtcagctttaagcagtcactaagggcagtcaggttccataacatagtcttcagctgaaygtgaagatcatattattgaaacaagatctttctagctgaccgtactccaaatgcatgctttggtgcctgtaaaatctatttaaggcctcctgattttcccctttctattcctccatccaccaggacagttaaggaggaactttcaaaatgaggaaactgttaaaaaatgggagaaagtatcaaacatttatttacacatctgttgttggaaattaccaagatcaatttcaggagagtagagttcaaatgcgtgctaaatgaccaaaaagaatggatcatccaacaatcattttctattccgaaaggctcggtaatgaaaaccggactcttcatttgacacaaaagggaagaaggaggagaaattggaaagtaatatattcaattatagaagccctttgccaaggccctgttgatttcatgttctgacagtttcagttaagcctcaacagggaaaagtttcagaaacaggtcagatcaaacacgtaccgtttcccactcctggaactygtgtgtgtgacaaaaatggtcaagtcttcaccaggcatagactttgtctttggggtctgtttatattgccggactccagaccagagcttggaagacagcgtgcgtgaaagaagaggctgcagagatcctggcaggccccgcaactgccgtgcagtgagtggctgaccccctgtgctgaatttgctctatttctctgccctctgaatccacactgaattcactttctttttctttttctttttttttgaaacggagtctcccgctatcacccaggctggagtgcagtggcacaatcttggctcactccaaccactacctctccggttcaagygattctcctgcctcagcctcccgagtaaatgggattacaggcacatgccaccacacccagctaattttatatttttagtagagatggggtttcaccctgttggccaggctggtcacgaactcttaacctcaagtgatccacctgcctcggccttccaaagtgctgggattgcaggcatgagccaccgtgcctggtgaatccactttcttttctgctcccacctggtgcatccatctctactctcaccacccatcygtgggtggggcttccttcatgtggtcattgcctgaccaggctccccgtgctgtgctggttgctggggtggttgcagtcctgccccagtcagagcagcgctcgcatggcagcatgtcaaaagtttctgtggtggacatgccggcttggtgggagctcccaggaggatgcctgaatcactctggggatggagagctggtggggggcttcctgatgaggtgtcttacattcttgaaaccaggaggaggtagttaggtggtggagggtattctggtggagagaattgcatgtacaaatatctgaagcaagagagtgatgtgtgctctggatatggttcaggatagcgggaagccgtgtgtgtgtgcacatgtgcatgtgcatatgtgtgtgtatctttgaatatacatttactgagaccctcccctgcaccaaacaccattgagaaagatgatatttttgctgctgtgaacaagacagtctgctaggagccccctttgtgaacaatgatgtgggctctcatgcagctgtgctgaaccagctgtgttggggcctggggaccaggagggccagacagatcgtattctttggagccatatttatttgggttccagtgtgtgacctagagacagatgttgaactcttctgagactcctctgtaaaagcagaatgtctttcttacacagcacttcagtgcagtgcttggaacatggaaggtgctcagtatgtcctggttgctggacccattcatagcattatcaatgccatcgatcactttggcattgtgtttttctaggaaaatgtgttgtgaattccagccttgcacctcaggggcacgcctccctagacagggactatttcacctgctccaccttgcagaactgtcacctgccacattctgagcaaagggagattctggtgcagaggaggctgggacaggcaagggtggcaggggcgaagggtagaggagtgggccagtggaggaaagcaccttgtacttcaactctgacctgggctcagcatttcactgggtctcagagaccagacaagaatcctgcagctggcccccgaatccgggatacrgtcctgtctgggcacttctctttctccgtrggaaacaagctgggaactgtggacatcagggtgctctctgtatcctttctcccatattccctttttctcatatgtagcaggatgttgagggagatttgtttaccctgctgtcttggaattckagctcagtttcaaagcttagggcaaaggtgccaagaatcccacattctcatctcagaagccaccagtgagccgctggctactgggcccagcccccttattctctgggagactctccttgaggacctgccacacctgcccttcagtayagaaagagggcatctcagagctcaggaagagaggctgcgggtggagaggggaggaccctcttcccaaagccaagcagaggaaaccaagtttaatagagaaaatatctaaagatgaaagggaggaatcatttggagtgcaaatacatgagagaagagtggaagttgagacacttgaattaacccaggaaacaagagagaacaccacaaggaaaaagagatagaaatacaggaataaaaataaaaacgagatctgtttctggggaatgtaaaaaagaaaaaaaagaaaaaacttggaaggaccaaggaatacagaaaggcagaaaaacacggcaaaattaaaaatatagaagagtaaaaaagtgcttatgtaagcccagaaaaaaagacagaactcatctagaccagagagagagagatgaaaaaatacagaatagaaaaaattgtaaagacgtaatacagaaagaaaaatataggaaggccggacgtggtggctcatgcctgtaatcccagcactttgggaggccgacgcgagcagatcacctgaggtcaggagttcaagaccagcctgaccaacactggccaacatggtgaaaccctgtctccactaaacaaatacaaaaattagccaggcatggtggtgggcgcctgtaatcccagctacttgggaggccaaggctggagaatcgcttgaaaccaggaggcagtggttgtggtgagccgagatcgttccactgcactccagcctaggtgacaagagcgaaactccatatcaaaaaaaagaaaaagaaaaatacaggaagacagacaaatatataaagacccctcctcacacacacacacacacacacacacacaaaggcacacacaagaaagaaagtcaaaccggaagagagacaggaagatagagatggggctgagcagatgagggatggtcccttcctgcccctggcacaggcaggggcgggcttacatctgtcaggatacccccaaggcaagcaatggcatctggaggtgcttctggggaccccgaggaaggcagccgcgtgttctgcccacatcagccagtgcagtcacagagaggtgtgggcaggacccccaggggcccccagacctcccagccagggccaaccaggaggcagggagggctcctaggggcctgcagcagagggaggcgagggcaggtaccactgtgttggaggtgaccacgctggaagcccaggccactggcgacacttactacagaaaggaaagagaagaaaaggaaggagaaggaggaagaaaaaagactctgtggcctgggaagatctggcttgcgacatttcccgtgactctgcaaggtggttactggctaggcagttcagggctcacccccaagagcagaaagtggggaagcaatcatagtgttggcctctacttgtctataaaaatattttaatgtagctgcatactccatgtctgttgttgaactccatatctgatgggcgtcatgtgagaggggcagcacctgatgtgtgtcgcaaaagctgacatccaggctccgagacgtccttctgtctaccaggtgggagtgcagttattgatcaggactggactctttcctgatgatgccacctctgtgcacagggagatgagaggggagcggggagatttaggagtaagcacggtcaaatcactctaaggacatacaaatggatctggggctaggtacaaggggaggaatgttttaaacgctgccctggacaggaccctgaagaactcagaaggtggaagcagaaatgatggcactggaaaggcctgatgcattctgcagaggattgtgcactccctcaggtttctgctcatcctgttttaatcaaaaaatgggattttttgattacagggagacatctgtagcccgtggaagtggtattgggctggaaggctggcatgaggaaggggccatctgtgggtccggatgggtgtggggacgtgtgggagaaggggccccatgggaaatagtgagatgcagagcatgctgctgagcgttaggtggtcctgggtatggagcaggatggaggataattgccaagagagacactgagcccctcagcgtggctggagggcagagtgggcacagaacacagggctggaggaaggcatgggccagacagggaaattgaagctgtcacagctggggaagctgtcacagctggggaagccaccacaggggccttaaaatgctgtggttgggagaagaccaaggacacccagaccgaggagggacactcctaggctgcgatggtggaaggtgggtggctgggccaagagaacatgcaaggacaatctgagcactcactcactcagtgaactgccacctcaggcccagtgttttgctagtgctgggcaccctggcctcctgttgaacaggtcaaggagggactgtgatcacctttaacaattaggggaggcagagtgtatcagctaaagtgcttgtctgctgtggtttaactaaagaggggcttgctgttctcccccaatgagaagacagaggtaggcagcctaggactcaggctgtggctccatgacaaagaagggccagggctcttactctctccgtcctctctgtccccaggttgtagattgaattctgtccttgaaaaagatatgttcaagtcctaacccgcagtacctgtgaatgtgaccctgttggaaatagggtctttgcagatggaatcaaattaggtcacactggagtagggtgggctttaacccaatatgactgctgtctttataagaagagcagagactcatggaagaaggctttatgctggtggaggcagcaatgggagtgaagcagctgcaagccaaggaatgttggagaccactggcaaccaccagaagccagaagaggaaagaaagaaccttcagaggtggcatggaactgctgacaccttgatttcagacttctagcctccagaactgcgagagaatacatttctgtttttagccactaggattgtggtaaggagttacagcagccctagggaaccaatatacctccatagtgcagcctttaaaactgttctcaaggtcacatggtggctgagttccaagcaggtaggtgcagaaaggacaaagagaaaaaggcggtatcttgttatcaggaaaacagtagcttttacagaggagcytcccggtagacaactgcctgttctcattggcaagggaggttacatgtctaaccctagcggctagggagtatggggaggtgagatttaaaaaaaaagaaatccatttttatatataaaaattatataatatataaatgtataataatatatattacatataatttacatgaattaaaattaaccaattttaaatgtacaactaaccagttttgacaaatgcatatgtcatataaccaccactagcatctggatataggacatttctgtcacccacaaagttcctttgtgcaactttgcagtcaatcccttccycatccccaactcctggaaactacttatctttctttcattgtaaatttgccttttctataatttaatagaaatggaacagcttaggtttgttcctctttattgtgaagtggtattcgtttgtgtaggtgtatacaatttgtttacccattaagcaggtggtagatgtacgcactgcttcccrtgttggctattatgaataaagcttctgtgaacaattttatatgtgactttatgtggacatatgtttttgtttatcttgtgtaaataccgaggggtggaatggctgggttcttctataggtataggtttaacttaatcagaaattgcccagctgtttctaaagtggctgtaacattttacactcccatcagcaatgattttagttgctccacatcctcaccratactcggttttgcaagtcttactcattttagccattttagtgggtgcgtagtaccttctcattgtggtcttaatctgcgtttctcagatcttcttcatgtgtttatttgctattcattttgtcttctttggtgaagtgtgtgttcagattttctgtccatctgttaaactgggttttgttttcctgtgactgagctgtagatgtctttacaaattctgtacagaaatcctttattatatgagattgcatagatttttgcctcatccattacctgccttttcatttgcttcacagtgtatttaaattttgaaaacattcaaaatttgtgtcttatctcacaaaatctaaaccaaggtcactaagattttctgttaggttttcatctagaaactttgtagatttagtgtttacatttaggtctatgattctctttgggctagcttttgtatatggtatgaagtaaaggataaggttcatttatttctttgttttttcatgtggatgttcaattgttttagtgccatttgttgaaaaaytgttttcccctcattcaattaccttggtacctttgtagaaaatcagtagaccatatacatatgtggctctgtttctgaactctctactgtgttctattcactcatgtttctatccttaccccaataccgtactgttgcgtttactatagctttataggaagccttaaaatgaggcagtgtgaatcctccaatgcttcttttctcaaaatggttttgacttttctaggtcctctgtattcttttacaaattttctaattagcttgtatggttctaccatactcacacaaaataaggtctgctggcattcattttgattggcattgtgttgcatctatagatcaatatggggagaagtgacatcttagcaatatcgagttctctgacctatgaacacaatgtatagttctccgtttttttaagtggtcttttaaaatttcgttctgtgaagtttttttagttttcatatatagatcttacattttataaaataaaaatatattttataatataaatataaaatatattttataaaatgtatccttaaggatttcacatttttgatgctattgtaaatggcatttttattttgagttccagttcattgctagaatatagaaatacaattgatttttgtatatcaatcttgtactttgtgcctttctttaactcagtagttccagtagctttgttgccagaagatgggccttgattcaaatcccaagagggggttcttggatcatgtgcaggaaggaattcaaggcaagtcacagtgcagtgagaagagatcatttattgaaaactactcagttacagagtagggtgtcctcagaaagcaagaggaggaatgtgcagtctttgtgttttgttgttgttgttgggtttttgttttcgtttttttaagataaggtctccctctgttgcccaggctggagtgcagtgatacgatcatggctcactgcaccttgaccctctcaggctcaggtgatacttccacttcagcctcccaagtagctgaaactacaggcacccaccatcacgcccagctaatttttgtgttttttgtagagacggggtttcaccatgttgcccaggctggtcttgaactcctgggctcaagtgatccacccacctcagcctctaaagtgctgggattacaggcgtgagccaccacgcctgggccatctttgttttaaacccttcttatataggggtcttatctttgtaaaggctaagctaagttctgtctatgtgtgggagagctgacagcatggcaaaatttactattctgttgatttaaagaaaattattcttttttttttttttgagacagagtttcactctgtcacccaggctggagtgcagtgccatgatctcggctcactacaacctccacctcctgtgttcaagcgattcttctgcctcagcctcccgggtagctgggactacaggtgtgtgccaccacacccagctaatttttgtatttttggtagagacagggtttcaccatattggccaggctaggctcgaactcctgacctcgtgatctgcccacctcagcctcccaaagtgctgggattacaggcgtgagccaccgcacttggccccttgttttttttattgaataagtacctcaaagcataaatataattatcttaaaatcatatatcgttatggttattgggacatctggactttcctttgttgtaagattgtgttctttcaggtacatttaagctgttttctcaactgtaaacatcttatgaccatggttcatgactggcaaggaatgtgccttgctagttttaagatggagttgattttaaaatgatgtcaccttggttctcctgtgctcctatttctctaacagctttattatatatttcttaggctgggcacagtggctcacacctgtaattccagcaactttgggaggccaatgctggcagatcactcgagcccaggagtttgagaccagatccagcaacacagcaagaccctatctctactgaaaattcagaagagttagccatgcatggtgttgtgcacctgtagtcccggctacccagaaggctgaggttgggaggattgcaagaacccaggaggtcaaggctgcagtgagccatgatcatgccactgcagtcaagcctgggtgacaggagtgagaccctgtctcaaaaataaataaataaataaatatttcttaagatttttctacatagacaatcatgtctttttgagtggagtcagtcttacttactcctttttgtttgttttggagtttttttgagacagggtctcactgtgtcacccaggctagagtgcaatggcatgatcttggctcagtatacccaggctcaagcaatcctcccacctcagccctctgagctcctcggcctcccaaagtgctgggtktgcaggtttaagccactgtgcctggcctacttattcctttttaatctcctttaatttccttttcttgccttattgccctggctagaatctccattttggtgttgaaaggaagtgctgataacagaatcctcatcttctacttgaacttaaggggaaarcactcagcctttacctttaagtatgatgttagctgacattttttgtagatcctctgcaggaaagtatttttttaattggctgtatggctgcccaaatctatttgaggcttttcaagaaaagaaaggcgaatggatatggggaaacttctttatgcattcagctctttgtcttagctgtgtgatgctttatcaggaaatagtcatatcttttcattcaaagatttaagtatgggatgttgttgatattaaatgtgaccatgtgtgatcatccatctttataaacagcatgcttgggaggggcaggttttgccagggaactaactcactctcagtccattgggaggcagtgtagcccatggttagggatgtgggctcagaggcctgggcaccctgttccaactcagctctgcaaccttgtccaagttactgaacatttctgtgttgcaatttcctacctgcaaaatgaagatcttaataaaatctacttccagagcttctgaagacttaatgagcaaatacaattaagtgcttaaaacagagcctgttttctggtgcatttttaagaaggacttagttggcataagactgtatttacacataggttttcagtagcatgtttattgcctgaagcaaagaacagccatatcattttttaaatcccctcctggaacctcgtattaaggtttttttaagatgagagagttgatttctgttgtttcacaatattgtttgtgcaatacatatattttaaaatcttgtgcattgcataggcaattagagggttataatggttgccagcaatactctcgaagttaatgctgtctctgcacttggaggccgagccagaatttgaccttctgatgygttcattttgaccacttgacagcagaatggtgtgtagagcctatactgctcctaggtcagcccatctgggcgtgaggatcactgtgaagcccgcagttggcttcagcctcttatttcctaccaataaactctaattcaaggggacagaggcttctcagtcagttgctttcctattctaggaatgctgcctttccatcagcatgccccaagacctgggtgctcttcttcctgcctggggcgggtctggaggtggggccagggagcctcttgccagcaggggtgaggttacactgagcctgctccaatgtcctgcaacagcaccaagatattgacatataaggaagagcacttgggagctggctggtaggccttcaaggggcctttcctcttcacttgaacttgttgtggttttttttcctttttcctcatactctgaggggtgcagtygtagccagctttgcacagggctttctgcaaagtttcccacctgaagtcccttcttcaggcaggggtctgcattgcacagccagttagttttctgtccctggttttcttttgatcaggccagtgaaaaacttactctacacattgagtttaaaaaaaaaaagcaattaaaaagtgcccttgattctatttggacacatgtgcacagtgttttattcttctctgcctcccatgcaatggtgggggatagtcggtgcatgattaggaggttaaaccatattaactgggatttcctggtgttgtcctttacagtggaatgggtagagcttcagcatctccttccagaacttccagaagtgtctggccagctcttgtcctcccmctgccaagatgttctgctgcaggctgttccctgagagttgcatgcatctgccacaccctttcagttgtaattgtgacaccagtgcagagagatatcaattcagggagcaaagcagacattatcctttccctcgattgtcatgagatgccccagttaggtgtggatcccgaggcacccatgacattgtcctccaaactgtgcctgcggccccaggtgatgttgctaaattatacatgggtagaggctttcagcagcgctgtttttccaccggagcacaaagcactgtgttacagsagggattttacatgtggatctccaggccccgcagaaaccgcagagctgcagggaagcaagtaactatttaactgagagggcacgtcagggtgtgagttaaatacaaatgagaagcagatacattgagtgtaactttctatttgagttatttccttgagcacaaaaaaaaaaatgctaaaagtttaagtattaaacccatgtggttttcgaaacaaagaaagtcaagaaggaacaaagaaaagttttacgggccacatttaactctcctgtctggtcagataagaatctgagaccttcagctcctcctaaatgatggtaattactagttttgtgattcggtatctttctgttctctgtgccttcttcattcttattttactctagttatattaatatgtcctcacttccctccaactaaaacacaaagcaaagaaaaaagactcgcttcattagagtgattgaaagactatcttgcacagagtagatgcagaaaagctatttgtcacatgcataaatgacatccccatcactctggatcctatctccaggtttatgttaattcctcacatatatcaaacatggcagctagtcagtgccaattcttgagacataacatgtttgagaaacactttggaaacaaatgkaarctcctgactgcaagggaaggaaggagggaacgtgggctggttatgttgaggattagattcaagtagtttgttctggtattttgaattcttcaggcagtaagtgacccaatcagaacagcctcacttgatctgtgcctgcattctccccttcacgtgtttctctaacgtctgtgacctccattagtataaattaatataagcatggaaacagggcttctctacatgtatgatatttattcatctaacaagcagtttttgcaggtcacagaggccagcctacagaaggttctgcactgtrtccatgcttaatgtagtactgaaaatttggatgtttgccgtctrtcttgctattaagttagactctctcacaatatcctcaatggtgatttttcttctgtcgattggacaggtaaagaccaagaaggaggattttttccatgcctggaactcgtgtctgcaccacgtggcttctctgtccctggcacacactcaccgaggtcagttggctcctgttgaatatttgtaattgagtgactcaggggtctacgggtccctggagacacagctctgcagggaaaggacagtcccaacacacagggaagggacagtccgtgtgttgaatttagggccccaagtgacttacagagacttgaagcttgtggtaaatcaactcccaacttactaggaacactgaccatatgacacccacaaagcctgatgctaaaccagtcaggaacagctcacttaacacaacctgacaatcacacgaagcacttgacaggagccagttggcaaaatgcctgtccctcagaagtggccctctgcctgaccatgatctcgttcctaaacgggagggtgtgcacacagataaagtgagagtgttttaacaggggtcctgcctgaggaattttaagtrccagaattacttagacctcatcatcaaattagcaagaaactgggtcaaccttctaaagcagtggttctcaaccaggggcaattttgcaacgtttggatgtttggcaatgtttagagacgtttttggttgtcacactgagaggggtagtgccactggtgcgcagtgggtggaggccagggatactgctaacatgctacagggcacagaccgctcccctgcaaccaagaattatctagccccaaatgacagtaatgctgagattgagaaacttgagtattcattttggcttcagtcgaccaaaatagcaaaataaaatgaaacactgaacaccaagtaagatccatgacggcttatcattgaaattattgtttaatttcaagaatcgtcagtttgtttctcatcatgtcctgatctatgggaagaagctgttaaaagagaaaggccagttgttcactgagttggtagctttatgggatttttcatcacactgggtcactgctggccctgggagggctgggtttggtcataccacagcttgcatctgggkcactatctcatgggatggagatgggctcctcggtgggatcagggcaggtattatggccaggaacctaggagtgtgcctgcgtccaacacaacctcccagcctgaccatcccccttcctccctgactgggcagttccaaaagagcaaagtgcatgtgattcagtgccatgtgactatacctgcaggaatgtgtgggagccgccctaggagctctgatgagagctggattggagtgagtgctttaggctcagactgagcccagcttcttccttccttctaaggaccagctcttgggaccttgcacctttgggtgagcctcctaacacagggctctggagtaaacgtgccgagagcacaggtttctcatgggacgggaagcaggggccccatgggaacacctccccagagactggtctccacccagtgaccacactctgaaatgaccatgaccgcattggccttcctgattctgactgagttccactttctgcttcctgggacatggaggaggagcgaggagagggaccaggagcatcagggactatggstcatgaaggcacaggattgggtcccgtcatttgcagactcaacatttttaatgtattgcccacccacagtgtatcaggctcagagaaactgacttatcttaattgaactcaaaaatgagtcatatttaaatctaaatgccagtttattcatcagaaagaaaatccagccaccaagtcatcagtacatgccctatctgttctacgagcatatcttcagatagaattcagttataattaggaggttgcaggaagtcacactatcaagacagctcgtgtcctcaggcctggctggagatctgagtgtcccctgtgacctgctccagaccctagagcccacagtgtgtctacttccctggactatctccatacactcagcatcaacctcattcctttaagaaatttatgtaaaccacccttcttctgttggtgggttatttcttcagatttgccgatcgggttgaaacatatctggggtatgaaacagtacttgagacaccctgattgaaggcgactgtgtcttgggccttctcattcactgtaggtagacttgtactggcttcactctcaggggtggtgtggccctggctcctccctctgggcccctatgtactgaccacagatatcgcccttcctgggacatgaggatggactatatggactcctggtgcaaaacttctaagcattcagaaatgtgatcaagtttgaaaaggaagggggaagtcaaagaatcactgcacaattcatttcaccttagaaacatgacagttgagccttgggctgcacagcctgcttgctgagagcacagtggagcttagtgaggactgaggatgggggctctggagtcaggtyaccaggttcagatcccggctttacctctaccagctgtgtgactgtgagtgagttacaaaccctctctgagcttcagtttcttcctcatttataaaatgtagagagcatgatatttacctcgtggggctgttggaaatattaaatgagacaacgctccaaagctcttgcctttgcatctggctctttgttaatgtttaataaaacctttttattactgctaatcactactctaggaaaaccttagttcttataaccaaagtagaacattttcgaccttgttccttaaagggaagaaaaagaggaaaatgaaacaggttaagtctgagtgtatgaggtcttcacacccggagaaaatatcaaggatttgatgatggcacagtacaaaataaatccaaatcaaccctgaaccttttattggttcataaccacagtagcacaagtgattattttcaggaaactggcttcaggttcaatgtcagataaagaggacttggaagtataaagaaagtaatggaagaaaaatcataagaattagttcaatgacagcatttagaaagcccaggaatgttttgaaatcgagaaatccatctgtaatgaggaggtctgtacagaacgggtcctaaagataaggatgcactaaacataacactagccagtaaaatttcaccagcgtatcattacattcaaatagcatgttaccctctggcagaggcctccaggggatgggagaagaagtagaaggagcccatctgtcttcagtgaccagacccagatgttgcctttggagccttttgaaggaagaatgcataggaaggaagagaaggatcagtctgttaaagcacagtctttttttttttttttgacggagtctcgctctgtcgcccaggctggagtgyagtggcatgatctctgctcactactctggggactacaggtgcccgccaccacacccagctaattttttgtattttagtagagacggggtttcactgtgtttgccagggtggtctcaatctcctgacctcgtgatctgcccacctcggcctcccaaagtgctgggattacaggcgtgagccaccgtccccggcctaaagcacagtcttaatgtcaccccagatgacaatgaactcagaatttagccatttttattaggaacaaatggaaaaacaccttctggcatctgtctccgtttgtcacctgaaaactagggaaaaccgtgtttgaaataaaaatgttaagcagtctctggtggtttccgtagtgggatgtaactgttacaatgataaatcgttatttttctgtgatacacatttttgtcttgccctagaaagtgcagctctgaagccttggtgctgtctgaacccctaagggtgtaccaattcctaaacaaaaaaggagaaaggaggcacttttattaaataaattacatccactactttccagctctgtgcagaattgtctcttgcttttctcattctcgaagcttgtgagtacttctcattatgcagcaggaagtcctctttctggttcttaataaagtgactaataatttagaatgttcayattaagagcaggttgtaattataattagaatatataataatgtggatttctgcctattggggattaatttcagactcctctcaaggatgtatttgttttgaaacaagactttctttgttaataaaaacatgatcgcatgcattattaaagcattatttctgtatgttatccattagtgcttgttgcagtattcttcccgggatcagcattttcctctcagttgttagtggggctattctttatataaactacattcaccttggtttagctttagctttgacattcatcctctaggaaattacgggaatatccctaccgcctcctcaaatgtgcattacattatgcaagctcagataaacaaaatgccacaacatcagccagtagtcctgtgtgaatctaggtactttccccttttcactcaactaaatccaagatcatgaaggacaaacccgacttggggtagaaccagaagttgtaagacaacacttctcattctttgactgttgggtttctgcagtgtttttctgttactactggaggtggaggcctggaggggaggggaagagtgggaggaccagaggtgctagttggctgtgacacctgtgtgccttcctctcccccagtacccatctgctggtgtgtctaactttagagaagtctcatgtggccccacacaagtggcctgagggagggaggaagggagggaggtagggagggaaggagccctgggtgccactgcccctgcttctggcccctgtctttgtctagcacccgttaaatgtgtgggcagtggaaaccagtgagaaggtctgttgcaccaagaataggcagatggaattcactgccaaatcccagtagacccagcatcttggaggtcccaacattggggaagagaaggaatgtcccctggctttgttttctctacttcagtcacacggccaaatcctaggcctatgagcagtgcctttgggaaaaaggtgaacctgggagttgagggtcaccatttcagagagtgtgtgatggctgggagcagcctggggagtcgagggagtccagggacactgggtctctgatgcttgaggtctggaaatccaggagctggcagaatatggagggacacraaagtgagaactcaccttctgactatactcacacacaaaattgctttgagrgagagcgacgaagcttgtggccaattggaagtcggagggaggcgcctggtgaaatggagaccagcagaagtaggagcatggaggtcccttgtgctcacatcaaggagggctcttagacaaaaaagatgagaaggaaatttgactggatggaagcatcgtagtatgtaaaaatctggcagagcatgccactttgccaaagtggattttaatttcatggcacattggccaagagacatgggaagagaaggtttaagaacacagactgcccaacatgctagtagctctgtgaaaagctctcctctgacatcctgcaggttgtgcccgtcggtcttcatgctggggttcccyccccaagcttctccatctccccaagccatgtagttgaacttcaggtttgggtcagctgggccctaagaagaccccaaatgctgttttctgaagaagtgctgtcacacccctgaacttgggagcttgtccctgaagaaagctgtctttagagacttcactgactcactctcctttgaaggaagtgagaaattctgaggtggttttttatcaccagtgacctgaagactctgttgccctggggagagggggaagaaaggcaaaagcaaagtctgacacccgaatgatgtgygttttatggaggactctcaagaacagaagttagtggctgtacttgacctagatgctaatgaaatgccaccctttgagcccagtctaatggccaacacacagccatctgtgtaataatcacagccatcacagccatctccatctatagaaaatattctctttgccaaagactcgctaaatgcttggcccttgtaatttgtttaatctccacaacaaccttgcaaagcccactgaggaaactgaggctcagaggggtgaacaactgcttggggtcacacgctaataagctgtggcrttatgactttgccccggggccagttaaccctacagctttccccagacagacagtggagctcctcaaccccatccaccgcactctttaagaggtttctttcccacagatgaatcccagagaatgggggttctggtgttcttgagtttttgaaagtctttctttgtgcatttatttatggtaaagttagcacgtactgcttcctactactcttactggatttgcctccgaacaatgcttcttgtttttttctatttcacagagtttctgtgaggattaaatgaaataacatgggtggaagccctaggaccgtatggagcaaagggagccaacattcaktgagggctcagcctatcaggccctgtgcaaaatattagggacagagcaactctaatcccccactaggcagtgaggaaggaaccactgccttctcaactttcatctgaggaaaccraggcacagagaggttaatgagttgtctaaggtcacacagttaaaagaggcagaaggaagactcaaatcccagcaggctgctaccatctgcccatgttgcagggctcccagtgctcgttggagctgaatctgggagctcagcatttctaaagaagcaaaataaaataaaaaataaaataagcccttcccactttttaaatgtgtttcccactttttaaatgtgttttcgctcctttgtttcccactctgtgatcaaaaaattgtacattatatgatggactgcagagatctggtctacagcccctgttcatttaacttctaatatctaagtagtttcaaaatatggttacattagtaccaaaattgatgggcaaaagtaacaccaaaagtaaaaaaagaaattatttgcaccaastatactgtatttgtgagttttccactgggaacaggatggagaataagaccttccaaacggtgaataaaaataaaagtataggaactcttgatttatcatacacactctagatataattttgtatttaaaaatattattccataccacatattgtaaagttaaatatgtttgcagtaaacatacatttaaatttaggttttaaaggacatgttctaatctcacaaaacatttagcaaataacctttgagctcacatgagccacccacacaaaaaccaaaatgaactatagaaaaaaaacatagaaaaagcaactgtctgttgacaaccagattttctttcagctctttgagtttttcttctataaataatctgtatgtttcaaatgtggccatcttctttaaaggtgcctcctggcatgttctcatttcagtgtgtcttaaaaacaagaattaaatgtgtaaatcatggaaactattgagtttttggaggggagatctttaagatacatgctttttagawaccaaaagtgtcaaaatgaagcattaagatgatgtattatttcttcaatgcatctgtttatcttttgtgaaatctcaagtttgataaatcaccagagataaaaacatcatttttaacctatcagagatcrcaagtgccaggaggaaaaatagtgctttgtctcctctttatgaatttacctctctctttgcttatgacttatgagattttatttgcagagaaaacataatgctctattaacttgaaaatgatggcttttactcgaaacatgagaaccaaaaagaaaaaaaaaaaggcagcgtttatcctctgagatacaatcgtttaacaagttttgatatctacttaaagtggcacagaatgttagagggggaatatgttaacaaggtaattaaaagtgaggttttcaccagtatttcacctttgtctactgacacgtagaatctcagctctggcttatcaaagcagatattgaatacttttgaatttttatataacattagtgtaagtagagattgctggcccctatctcttgtgattcttttttgcccctgaaaatcactcagaagttctcccttcattggccacctggaaaataagataattctcgtagatttttataactatgggtgaaaattcttctgtgtccaggagtgcagcaacaaaggactttgcagtagagctggcttctraccagttctttctgtgagctagaagattaaagtgcacgaatcatgcaagtaggttagtctggaaaacataacacagcagaaaaaaatggctttcaaaaatgttcagaacagctgtttctcagtatgtaaaccagcytcttggtgcagtggatatcagagttccttgcctygtgcatattttatcattcttcgatcctgagcagtttaagacaaaataaattttatgcaaacccattccaggccatgggcatgcagttgagtttttctagcaattgtgctatttkaaggagacacccaggttctgccctaacaccagaggtgcctaaggtcgcagctgctcaggacctgtggcagctgtgarcagctgagctcagtttgctctgttctttcttcttgcaagaatcayacagaccatgttggtcctatggaatagaatcacaatattgcctcagaccataggaccaatacagcagaaggtcctgagaagctgcggcttgctccatctctcagcctcctactgctgcrtgaaaaataaaccttgtaactatggagctgcccctcctgaatctgacatctactcagttatccttcggaaacaatcctgatgtggagcacccttcctcattcccttatccacccttctcgccccatatttgttgaagtcctgccttgtgccaaggactgtgttacactccaggaataaaaggtccagtatgaaacagcccctgctcccaaggagcactggtgagaactgagatgagagcccccatagactaggagccctgagagaacacggaagagacacaagctgggcagggggtgcagggtccacgcggctccccacgaagttccagtgaggcaagcagcatttgagactttgccttttgaagggcaggtagaatttagctatctggaaggtggaaaggacattccgagcagatggaagaaccaggagggaggcatgaagtgcgtggatgacttgggaaagtgcttgtggcttggtgtggtcggggtgtagggccaatgtgagggtgaacagcagggtcccacagggcctgagtgccaaggcccgtagctgtcattgtcaactcccactgtcagtggggagtcttggaaaaagctttgggaagatttcttcaggtgtggaggtgaacagctctgaggacaggaactgaggagcaacagcagcaggcctgcgtggaggggtgggttctggaggtgcgagggcaaaggggcctggagggcctccaggtggagggtgarctatgaggaaaagccaagggcttcttctgggcaccaaggtggagaggagagaactgggtccaactcagcttggacgtgtggcgcatgcatgacctggggccacacatgcagatgccgagacaggcgcgtggcagagaggactgcagggcctcgtaacatccaggtsctgagcctgagcactatattaaatgggagggcgaatcgctgcaaggtggaaaacaggatcaatgccacgcatgaggyaattgcagctgtcctatccattatcttcccaatttaagtgtgacactggagtccacagtgtttgtttcccaaaattggctgactcttgttccgctgatgggacagtggtggttgtgatggcctccagctgagcgttagtgtcaaagttgtccttccatgcaggtgaagggggatctgcaggtgggacagagccgggccatggggaggctcacactggctgctggagatgacactggggaaaagatgtggtgacagtggctgccgcctctggctgcccccggctctacaccttgctcttggctaagactggagcaggccccaggaagcagcctttggccatggtgagccaaggccatgtcaaataggggacagcgtgccactgtccacctgggggagggcagccccctgcacacagggagtccgtgggctccagaaggggtccagatgagctgtgccgtcatctcttcctgagtgaatggtgcatttgccccaagctgaaagggctctgccattcaggaaagcaggtgaccactgtgctctgtctcccgactttgtgcctgagccaaagactacagattgttcccttagcaaccagcagagagccctaagaaggaggatgaatgtctcgggtttgcaatgccccccatgtggagagagggcagctgcttttctccctgagcccagaacacggcaggcaggttgggctccttcaggccccccagcccctttgggaactgctcacatctaggattttgcaaccagttctccacatttcactcccatggtgcagtctagaataaagacttctaagatgtcagtcagcccccattacgttcccatccctgggactggccaaactggcattttgcctgcctagggaaatacagtcttagtcttagtcttagtatagactcacttagtttatttgcttagaaggttttcagtacctcctatttgccagacttaggactcagattatcagaacaatgtgacgcttttcaatccagcagagggaataggatgtgaacacagcgcccacacacacatggagcaggagagcctgtgagaggtgcaggctccctgcacggccacaggctcccacgtggtgtcacagaagacccattggtgctgggtcttgaaacatgcataggttcccgaaggtggggacgtggctctgcaggatgggaagaagccatagagtggacagaagtggaggtggcagagtgaagggcttgaacagggaatgacaaggggcctgccttatcaggaggaaggtgtttgggagaaaggccaagaaacaatattgagagaaygagcctggaaaagtgggccagggtgggtcgtgaggtgtgctggatgctacatcatggagcttagcctctgctgggcagcagtagctggccaaggaagggaaggagttggagagtgaccatcacaccaggactccctggagggaaagtttcctggcttcgggggatgcggtgctttggagaaagagaccccagagtggagctggatggaggatggagaccaaaacaagtggatgtgaccagcaagccagaggacaaagatctgcaaagaggtcgtggcagtgggggtcgaaaggagggttggcattggaggagcagtggcccatygccatcctggaggaagctgtcccttgggaagtgctgagatcccagtgttcggagcagaaaacatgttgagacttagttgtagaccaagagcttgtctgccagagaagagatgcatgctggctcctgtgggctttcagttgtrgggccagagaaaaggagggccacatgtgtcatgctctgccgctctctggaacagaggtgctttctgacagggcaggctgggggacagtgagcagggccctcaccctctcgtggaggtcccccgagggccagctccacaccccccaccacatctcaacgtgcaggagactggctgcaccatgactgctggttgcgaagaagttaaaggcccctgtcaaccctccgtgttgattctgaaaacaaagccagagttctttctgcaaaacgaagcctttttgtttctctctctctctttcaacatttccctgttgtgttatgaaaaagaggtgggtgggggacttcagaagctgtctggagtggcagacagctctgcaggatgagctgagagygccgcagtcacacacaggtgggaggagagggctgagggacagtgggcgcagtgtcccacctcgtggtgcggtcagtggagaaggagtcatcgataaggggcccctggccaggagcctcagatatggctgctggggagcttgaccctcaaggctctcaaggagaggctggtgaggagacgtggggccctctacttctggtgccagggaagcctcagtaagggaggtcgctgcctctagagaaggctgcctggttcccagcaatgctcagccatcaaactcctccagaggagctgtccatggaggggtakgtgtcagcccccatatttctgccacractaagaggaagctggcttcctcatcttcactgtaggtatctgagatgagagccacatttccctaccagactgaagctcagctggtgcaatctcctctttccagggacctggtattttagtgccaggtcttccttccctaccaggaaggagcckgcccctcctatgtggggcccagggcagaattacaaagcaagcttacaacatgttgaagaaaatctactctgccctcctgccctgacaaatgtagctttgttcatccagaaggccagattcgaatttagaatgcccaggctcctagcagttatgtgaactctgcagcatggtgagaagcagccctttggcccacctctctctcattgcacctccaggtctaccctacactgtgcagatcatctggtctagacactcaaggtctgtccacatccctgcaatcagctgccccttggctaccccatgggtctagagtggacacggcagtggtgtggttccccagtagcaacacatcgcagaaaagaggcttaaggtatttgggtcaggaaacaagagaactggtccctggaggagtgggtgcaagttccaggtgggcagtacccatagccccatgggcagggccctctaaagcttagccgcaggggcagggcccctattatcgagggccctggcgcaaagattgcgagagaagctgaaagaacattctgagaygggatttctgagcactgaagccccaggtgcaggttataggtcagggtcaactgtacctgctaacttagtgacaggtgcccaatctgaccagcaatatttcaagaggaaaatcagtacaatggtattgtgggtttgctttgttttgtcttcccccttattcgaaacagcatattataatgaaatttattctaggtgcaaccatttccttgggtgttaggtatctcccattttgtaaggttctaccttacagcaatgactgcaggggatgaggccattgtagatcatttactgccgaccattgcagcagaggaaacctgtttcatgctgctccatatttttttctcccaaatgaccattgtttacttgaatcaggtgtttatttccctatgcttcctctccttgatccccaacctcaaagccacttgttatctaaaagtctctggttctcccttcttttgtcacacaaaggtggaaaagtccaaccaaggagaacttaactctactcagacaggtggaagcctcagcctcccactactgacatgaacagtactgggacacttaggcgcagttgagacatgttgaagcaagaaagtgattccgccaagagtcccttagggagactcatgccccagggagactttgcattttgttggcactagtttggctgtgtatcttattttcattaggcagtcgatcccttgaatcagcaacaaaggtagaagaaagtagatacgacaactgctttcattttgaggttttttcctcctatttaaaagttggggaggaagaagggaggggtcatgaaatgtcaacttgtcatgaggcttctcttgcaagttgtcactgaatcagctgtcagggaaagtggccgcacagacctgttctcatagtgagtgagttctcatgagatctgatggttttataaggggcttttcccccttttgctcagcactgcttcgtgccgccacgtgaaggacgtgtttgcttccccttctgccatgattgtaagtttcctgaggcctccccaaccctgcagaactgtgtcaattaaacctctttcctttataaattacccactctcaggtatgtctttatgaaaacctaatggttttcaccccctcttctcttttgggatttggtagaaatgagagtggggtgaggggagagagaaacctgcactggcatagtagcctgtgtcacactgacatctggggtgaggggaaaaagccgagacataggtgcatgctgcttttgttgggcctctgttctgaaggttggtttttgtcatctgtgtagaaagggctgtaggctgctagccccataaaactcagccagcccacgaagggcactggactgaagtgtggccttgtgttcctacacgtgcacttcagtccagttccacaaaacggggtcatggctgtgggcatgctggacatcatggggacaggacagagtctgggataggatccaagcccatctcctgcaccctctcctgaggccagggcagcccggacatctaaacactagagactgattgggaaggaaaaactccatgtgtcatgtgtcacatcaaggcatcgaacagggaacaggggagacttagagaaatctttgtacaggaacctaagatggagtgcagactcactgccagcaccgtttctttacacacagcctcacacctgctccagcaagtgggctccgggctccacacgtcactgatgaggaagcgaggctcagcaaggctgtgtgacttgtctaaggacacacagctggaagtggcagagggaagatttaaagtcaggtctgtctgatgccaaacctgtgttgagactactccccatgctggccctggagaagggtggtatattagttctttctcatgctgctaataaagacatacccaagactgggtaatttatgaaggaaagaggtttaattgactcacagttctgcagggttggggaggcctcaagaaacttacaatcatggcagaaagggaagcaaacacgtccttcttcacatggtggcaggaaggaaaagtgccgagcaaaagggggaaatgccctgtataaaaccatcagatctcatgagaactcactatcatgagaacagtatggagggtaaccacccccatgattcatttacctcccactgtgtcccctcccgtgacatgcggagattatgggagctacaattcaagatgagatttgagtggggatacaaccaaaccatatcaggtgggatcctggccaacctgaggagacagggagggagtgcatggcccaagatggaaccctgcatgaatgagagtcaggagccatcagggtggtttgcacggggaagaggggctaggcctggtgtggtgaggaggaatgcaggccataggcatagggctccagcagggcmaggctcagagtggtggcagcagtgggcatggwggctgggaaagagcgagaagttctccagaaatcaaagtggcagcactactgtgggaaagtggtgcatccaagggacatcatcgtacaagagtcagcaggcatggggtcctgagggagaaatcaaagaatcaggctcagtggcctggtggctggaggatgatagtcccacagaaatgggaaaaagttggaaagggctggcttggtatggaagttgactggtttggattggatgtacagagttcaaggtaacttgaagtgggtgctatgtctatgataacgaaaagtatcatagtggagtccagtgcacaggcagtgagaagtatgaacacagggtcaccacagagaggagagagctgtcagtgagaatccagtagctctctaaggaagcaagtgtttcaatttccctgacctgcactaagtaagattctaagttacagcataaacctttaccaaataaaatagccaccttaaaaaggtgatctaaagaaaacctagcacctgaatttgtagattattctttagccatcctcagacagtagtcagagatcaatatgttatcacaccaaatcagatcacagcaaaagtccaaaactgaggacggagttgagggagagaggtcttgcctccagggtctttcccaggcaggtgtattctgaatgagtgacagcaaaagcattcgtgtaaacttaacacagcttgggcccttatctcwatgtacaagtttctgctgagccacttttataggcaaagttaatttttaaaaaagattaaattgatgattctatgtaattaacactggtttctgccaattgaagactgggtgggtatatgcattggagagcatgtggaaggcaacattgatctctctatggatcccaagtatgtcttgactggatagagcaaaatttaaacttggaagaaataatcagcaccagatacaactgatagcagtcaagatggcatggagtaatttagtcagagatgaaagcagtctaaggaattctattttagagtaacattgaaaactacaaacaacctacccagacaatattttcttgatgaaaattcatcattgctgatatagttctctttaaaatatctgtatttgtagacatgacatccaggcatgcttgaggtcaaatcattggaatcagactgtccctcagccttgaggctgagtttagctctgcccacctttgtgggatctgcgggagttgggatgggaccagagrgcaatcaatgtctttattggctggatgggtgggcttgggatgttcagttggaggactgagttttgctctactcaaagacaagaggcagaactcttcccagcagagagcaatgaaaggtcatagagggtaaagagtgaacgcagctttgagtatagcaatcaaaggctaaactagttgggttaacttagtaaaagccttaatgcgtgtcaaataagtggttttaaatctgagggtggcagagaattgtgggagcattttcaagcatgaaacaatgtagtcaacacagcctacaggagggcagtctgtgacttacaccaaaataaaaattggtcaccacataagtgagcctttgatgagaacctggccataaatatgagaaggggaatgtaattttgtaaattttctagattaatattcctagagctttcatggccaatttcaatggattactaaaactttttttttttctcgtaaatcttcttgggtttctcttccctattctccttgagaaggttggttggagaaagacgactttatatatttgggggagtttgtggggtttgagtsaacacttggggccatacaccaagagaagagttaaagccatggaaatcatgatggaagattgagattttttaaattagcactgtcaaatttacaaaggcaggtggagtcttctcaatgaaggtcccaggaaatggagatagagtgtcatctctggggacaagatgacccaaaaggaagctgaacccaggacctcctggcagtttagggaggagctttgctgatgggaatggccttgtactctactgtaatgactctgtctgatggggtggagaagtcactgtaygggggcccctgacccatgcaggggacagttggggagctctgccatgtcaccaaggaaggacggacagcatgctgtttacgtctgttataaccacagtgtcctccttcacatcagaagggctctgaggcggaagtgaagtcattcacaatttccatttcttcccttccagttaccttagagcagttctccctagcagtgaagagctgtcctgaccaagaggaccagactttgttaatgaaggtaggttatcagataaagaacttatttcctaaaggctcagagcgtttttattgccctgaggagagtttcatttttacaagcgggagtaaatttatcatgtctgaatcgtgtgctccagggggataagcttgtcataggcgaattggagggttgctggttaaygagcaccactgctgcctgcggagtgcgggaaagtgacaggagagtgggtgtccacatgagtggggaatctgtttaactctccagagggctcagttggttctatttaaacttatctgatggagtcttgatgcttttttagcagatttatgaggcttggccaaattccacatctcccactatatttttaattaagacaaaggattccatacgttcccagtctgctgcttcctacttttggcaccttaaggaatgctacacaaattagactgttcataytcaccaccagaatgagcatcttatgtcatagattccttgcccttgagtggaagacaagcttcttccccccaaccccccgccccaaggaacagttgttttatttccttccaagtgacaggagcagaggcatttccaaatggtataacctgcacttaggctgcctacctaggtgagccaaaagtgtggaaaaccctggcaagctgcccacctggatttaattaaaactttgtctttgaagcagagagcagtaaacagcagcagatcacaaaggtgcacacacatactttcccaccactaagactcatgctttcacacagaaaccttgcagactgaccttgaggtacaaatatttccatgatgtcacttcagtgctrtaccaccaggaaaccgcgtgcaccaggaattgcatttctttatctaaaaaccagcttctttaccaggtgtcctctgactttagaaatgggtggaaaaaaaatagggtgtcactctgagggattttcaactcatttgcctaagatgtgatatttttggtctttaaaaaaaaaaaagctttcagtgatgttagttttataataaagaagcgctgctcataccaagtgttgggtttgtctgggaaccctgatttttcagagtcctgggcgtctgatacactgacttagaatgatatagattcaggcacatgggcgtttcttgtttgccacgcttaattctctgtttcctgctttaagttctattctgcaaggacctttccttccaggtgcaggctggctttccrtgaccttgaagcagctcttgggccctggatgctcacctcttttctctgctcaccggcctttggtctttcttccctctatcctgtgttttctcctacsatttgcttcttgcttctctcttgttcttctcctactgtccatctctccccatttgcaggaggtgaagctcctgggctcccctggaggttacatgggcatctcagaggcattttggggtacagagggcagcgacagagcccagccccagagaccacacctccaggcctgcttctagtggtcctcatggcctccccgacttgggatgccgcagccccctctgagtttcttcacatctagagtgagaggtgaaaagagatgtaaccaaaggcccctcctcctctcaccatttcaccttcttgctgactttcatggtgctctggctggcttctctagcacattcggttagaaactaacagattggggttgggagaggaaggctaaggtggcctgaggtttcctggaatttgcgtgacctccagtggcgttcagtattttgtgtcttacctgttggtttctgcagactgtgtggcctcagcaacagaggatgatttatgtgggcgttttctcaatatttgcaaatatttgaacaggcatcatcaaagaaagaagtttcactgaacaaaaacgtgtgccgagttcatatatactgaaactattttatgattttttttaggagattgaggttttctaatgtcacatatcagaaggcaccatgtgggtgtgacaatggtatgctgggtttttgtagatgttatgtgagaaaacctattcagggtgacagtagattattttgactacagtcagcctgcaggtgattgtatgtttgctctagtgagctatccactttgcagactgtctgaaataaattcccacatttaacttaacctcatgaaaacttgttggaggcaaaaaacatagatctgggccaaatatgatatatatttttttgagacagagtcttcttctgtcacccaggctggagtgcagtggcgtgatcttagctcactgcaacttccacctcctgggttcaaggaattctcctgtctcagcctccccactagttgggagtacaggtgtctgccaccatgcctggctaattttttgtatttttagtagagatggggtttcaccatattggtcaggctggtcttgaactcctgacctcaggtgatccacccgcctcggcctcccaaagtgctgggattacagacatamgccactgcgcccagctgatattttttaaaattatattttgcatgcattcctgcattgtcaaacattccartgttgcattctacattgtcaagggtaattgagatctgagcacaaatatttaaaggggtaccattaaaaatgcagcttgtatggcaggcatggtccatgattgtcccaggcagcctaattttgactcaagtcaaaagcccctccctcaatcacatagctccaccttgcctaacctgagaagatgctctatagacagactgccaagaagatgcaagagatgaacttggttcatcagatggctgaaccaaggtcagattcccctgcaaagacaaaaacattgagattttgaagatggcataagccagaacattcatctgacaaccaggaaaagcaggagggacaggaaaacaagtgactagccaccattgcatagctagtcagccggcaatagaactaggaccagaaagctgggcttcttcctgcggggcccactcagaygagcaaattcatagaaaattccaccactccaccccttcagcaccatgagagcacacacgggaggtgtgactgcagtggaaccatgaggggtactgtggtggcaggcttctggagtcactctcaaggcttgttaatcacatccttgttgctgggggtcctgtaagacaggagaaagccagcttstctgtgactcagtttcccatctaccaagcagaggtggaagctgttactggcttaagtaacagaccctgcagacccgagaagggggctagggaaacrrtacccaagggtaagatagctgttatcaggagttgcctctcagatttcactacaatttgaaccatagaacaatatttagattccataaattactcatttgaccctgttcgcgtttgatctccatacctacctgtttcttcactgattcttagtcctatttgccaattaatctctttggtccctctcggtcactaccttggagagcccatttgcccttggctccacctgcactcgcctgtgactccaggtgtcacctgagctcacgtccaagcaagctcagcaagtctaaaccccaccagtttctgtcctcccacccccccaatctaggaactgtggggtagtctgtggcacttccctgtcccggagctgccatggaagtttccatgtgtctgttcatcctctgcagcctctttcagggtcctccatctccctctgtcccagcaaagagtacctggacctgaccccttaaggacaagtttctatccccactctgccagcaactggagtgtaaccttgrgcaggtcacttttatctcttttagcctaacgtcctcttccagtaaaagaggaggtaaattagaccaccccaaagacccttccagcatcacactctgcaaagtcataagtgaaaattatcgacaaggctgcaattctaaatatgcttgagaatgaaccaacctggccttctaccactcgtctctctcctccaggcgctgccaagtgaacttkcttggagccccacgtcctacatgtcactctgtggatgcatttctagcctaactccttctcatctttggaatagggtaatcacaaaacttatcatccaaacatggattttktgtgtgtgtgtgagtgaaaggggcaccattaaaaatagaacttggatggcaggcatagtccatgactgtcccaggcaaaccagggcattgggtcagcctagatttgaatcaaggccaaagcctctccctcaatcacatggtttgactttgcstagcaggcctctttctcagtgcttggtccagaccctccctgtccccactcccactaggattgtcccctcttaaaaatcagagcctctgtttagggtggaagttggcaggaagacagatctcctggtgacagtctgcactcgcaccatcatttactgaatgtaaatgatcacacctcctcattttgttcttgcacacctgggagtttcttacatayctggcagcagctgcctccaatttgggtgggagatagccccagccaggggcctccatgggactaaaacttcctgaagccatcgcctgcagagcctccctgcctccctcggataagctggaaaatatttaaatagaatggtcagaggaaagtggcccttgctggtaaatgcttctgaccaggtcaggagacaagagctagtattgaaggagctttggctgatgggttatacctggaacaagacagtagaacaagggttggctcagagcaagccttccctgctctagtgatgttgagtgagtgcctggaacattccccatgctacagtcccagctatggcctggctyggtcaccttgccaaaggtacctggctagaagcaccatgggaggctcaaggcaggcctgtctataggtggatctgatatctaccacatttatggcagcacacagtagaaaaaccaagctgcctgtaggaaaataaagcttggcttatttatagcactgccttgaatctctgctcctaagttgcaacctttggcagggctgtcacgcaccagcagcaaccatgctccctcttgttctaggtggagggctggctgaggtgggcaggctgctggtggtgcaacagatgataccttgatctaagcagacatgtagaacagtattcatagctgctgtctacccagtgggacatgcaggggcccatcagggtcggtgggtacagctgccaagagctgcagcccaggttgagcaagcctgcagagacagctccccaggaaggctccactgatgggaggtgtgggggctgaatgctgctggaagcttccttaggatttcttaccagccaagtatgaatgctgcccccaaatgcacagagacgcctgggagcgtgtggaaggagggacgccaggcctccctccacgtcccctgccaccatggtctggccagatgcaaccctttctctgtctaattacattttaagaagtcagacacatttgaatcctcctggcaaccaaaaatctccaagagatcgacatgactcaacccttcagtcctccatgcttactgaatacaacttcttcccaggcgaaggcattttcccctagcctgatggaatcctgtccagaatgagggttttcacaagaaaaacaatgcctttccctcagcttgggaatgactgtgcatggaggagaaagggaattttccacatgactgctccactgcttcacctccccacagaaggtttagaagcacctcagcaagctggttgtctaatgtttcttaaattgtcattgtcacaaagattctttctgcttcacttcttccaaagttctcctcctcacccacccccaaccttggtccaaggcatagtaattgagccattcagtatccagcatggggactggtcctgcaggaccaggcaggtgcctttgtctgcctttgtgctcagagaaggccttcacgcctttggttctcgtaaggtgctcgccacggcaacccaagtgtctaagcagggcatttgcaggggactgtccccacctcacaggcggctagcagcagcagtttgagcctgtcaagtgggtgaggtggggtttttccctctttcctgcattctaactgctttttcttccttttctcaacctgtgtaggtggtagctagtttaagcaccaaacctagcagccaataattaactacacacaccttccatcatgcacagtgcaaaccatgatgtccttccttctgcaggtggctcttgccatgcccamggacctcatcttggccccatgccattgagagagtcctaagctccgaccagcaagggcttccctctgcctctcaagtggaggcactcaggggctgcccgttgtggccacacaccctgtgaatgcatcacatgtacccacatcaccattcagtcatctggggctgggaatgggattgggcctccacatggaaaaaaggggattcttttctggggtatgactgcatttccaaacccagtccaggatcagtagtgtcagtccttgttctgaattcccataacacagctgataaagagtggcagagttcccataacacaggtaataaagagtggcagataaagagttgtgggtgggctgtggtttggaatccagccctggccccttctagctttccctccaccttctcttatcctcgtaagctagagccacacagaaagaagtaagagtgtggctggcagtgttcctaaaataagttgttcaacaaatgtttactgagtccctattgtgtgtcaggtagtgtttttctagtacctggctcacttgaagagtatattctaatgtttttatatttaataagggaaaagatttggaggctaaggcaggagcattgtttgagctcaggagttcgaggtggcagtgagctatgtttatgccactgccctccagcctgtgtgacacagcaagaccccaactttaaaaaaaaaaaaaagttgggagaagaactactggtgacatagaaatcaggtttcagacctacacttctagcaacaaatggttttctctcattcctatgccattgaagcccgggatacttcactctcttcactcctagaggtcccctgcaagtgccaagcctatgtcaagtattctgcaaagctcagctcaaaccaaccccccaaattattggtaacaattatccctcctaatgagcttcagttttggaaagggatctttgaggcatagggctaactttttaactcaaaaaaatatatatatatttaggccaggcacggtrgctcacgcctgtaatcccagcactttgggaggctgaggtgggtggatcatgaggtcaggagatagagaccatcctggctaacacggtgaaaccccatctctactaaaaatacaaaaaattagccgggtgtggtggcacatgcctgtagtcccagctactcaggaggctgaggcaggagaatcgctttaacccaggaggcggaggttgcagtgagccgagatcgcaccactgcacttcagcctgggtgacagagcaagactctgtctccaaaaaaaaaaaaaaaaaaaaatttcatggtagtatgccaggctccatagtaagtcagcaaaagggtcattttggtggctttctggacgcagctggcatggtccctcttcggaaacatttttgagtgcctactatgtgtccagcactgtgctaggcactgagggcacaaatatccataaaatgtggccctcaccctcaggtagctccttgacaaataggtgagacagacacttcagcaccttggagtgggctaagtgccgagagcaaaggaatttgggaagctagtggagcactcagttgggcactcaactcaacctgggtttagggaagactcccctgaggaggtgatatttgagctaagtccccatgtctctgcaggaatttaaatttaaccaactgtgtgggttccactgtgcatgctggtggtgtcgatgtgacacgttgtgttctgacttttccatttatagagtgtttcaggtgcactgatgcatgccttgagagctgactgccaaaataggggccccagacagctgccttcccaggggaggggtatccagaaacttccattcttgctgtgcacatttccccagctgacctatagctgtcttgaaattatagcattcaatattccttccttggctcggaagactttacgggccttccagtagttaatgtcaaagttaggtgtctctgggagggaatgcagcagaagccatcaacagctaatagttgctctagaattattctgaaagcatggtgtccaggccaggggccaggagtagagagggagaggggtggtaggggattaggagggggaaggcagaggggttccctctcttgccacaaacagatctgctctgctgtctgtgcatttacacttcgcctagctcctccacaaagttctgctataaggagaaatgggccaatgtctttccaatccaaatgccatcagargcaagctctacatgtgcccgactgcctaagaggagcatatgagcgcacagatggcagcagtatatgaggacattacacctgctctgctccttgatacttcattgtcaagcatctaaataagtatctaaatggagaaccagctaggaagtacaaatcctggtgttcagaaaagcagcgagccgcccaggcgtggagggtgcaacgctttggggatgcctacccatgcgagtctagcacagggcttgcgggtggggtgttccttcttgaatgatctgtwctccatttcctctgtgcacagctctgggggcagatttcattkcagactgctttagaagacaggacagcaggagaggaaatcactagagacaaaagaaaattagaaggatttggtagaagtcatatataggaaactgagagcaaaatttggctctcggagactaaagttagtgggaggagagaacagggcctggccaagacttatcatttcaccatttaaatagagatcaagatgctaaagttcccaggagacatctcttttgtgacttgccaagagcayggagaaattccatcagggagcttctgagatatggatccagactagcagacattaacagaattaccaggtgtctagggggatcccagacttttcagcacacagtgagggggatgtaaacactaaagttatatgggaagtcacgctggatggattgacgaaggcagcaaagcctagcagtcacactgaagcagctccctgccgtcaaccaaccacatttgcaccctgattaaaaactggaaacgttaaragacttgaagatttctgctctctgcacctgcttaactcttcctcttgcccttactaaattttagctgctttctttttggctaatttcacaatgttcaaaagtctattggaaaaaaagaaacccacaaagcaccatagataaaaactttgagatggggaaaaagaaaaatactggtttgatctgctcccttcctctcccagaacccaggaaaatgcccagtacacaagaagcaaggaagggaaggataaaaaaaggagggagggaattagttctggatgaaatgtcagaaaaatggccaccatgaaggccccagtcaaccaatcacttcctcttcttgggtctcctgatggaatgttttcatctttgggaaaatctttccacctttatctcttctagaactgtaaaaatgacaggatgagccagggcagtgtctcatgcctataatcccagcactttgggaggctgaggaagaaggatcacttgaggccaggagttcaagaccagcctgggcaacatagatctctacaaaaaattctaaaaagtaaattagccaggcaaggtggtacatgcctgtagttccagttattcaggaggttgaggctggggaatcacctgaacctagaaatttgaggttacattaaggtatgattgaaccactgtactctagcctgggcaatacagcaagactctgtctctataaaataataataatagtaaaaaactggaattgggatgggaacaaggcaacttggtgtgttcctgaaaaccttgcctgatggaaagggcagctaataacagcctattgataattgattaatgtgttacattttgaaagtacacaaaacataacattcaatatcaggattaagatttattacataagtgagacaaaccttctattaaaagtggaaggctctcagaytggatgaaaaataacacccaaccatacaatatatatttcaaaaatgcacatttttcccaggaagatgctggagacatactcatccctattccttctgctaagtccaactaaaaacactggacattacgtttaaaacaaacataaaagattctgaaaggtaagaactagaaagtagaccaagctaggaacctcaagacccaaagaatgacacagcaggaactccctgaattttgtttgtgcctcatacattccagagttagagctgaagaagctggcaacctggaaaaagctaacgcacacaaaggaaaaaaaaaaaagagagaagaaggggtagaagaaggaggaggaggagaaggaagaggaagagagaaaggaagaagaggagaagaagaggaggtaaatgaggaggaggataaggaggagaggaggagaaaaaaatgaggagaagaaagagtaggagraagagaagaaggaggaggaagaggggaaggggtaggggaaacagaagactcctcctgccaggcagcacagaaaaatatgtggtcccaccttcacccatgccaggaaaggcccagtggggagtgcagactccacactcacragactacaatgaggcaatgcaacctcaccactatggttgtcagaggaggcctagtagggagctggggttttcatctccacttggcagtaatgaggcctcccttcccctcctgcctcactacagtgacactggagaccatctggggagcctggacttcttcctctacccagcaataataggtcagtctgccccctccccactgcggtggtgtcagagaaggccaaatggggagagtcaagactttaaccactggctccaatagtaatgaggccaccccctggtagcgtcagtggagaccatctggggagcagaaattagggacctctacccttcccaaccagagtgggatcagcaggggcctagtgggagccagcaccccaccccagcagcaacgaggagcatctcccaaccttggtggtcacagaggttgcagtgtatcaccctcccctgatggtgcagcatcacaggatgttacctaagacaaggtttaaataagatccagaatttcatcatagaataccaaaatgcatagttttcaatcaaaaaatcactcacaataccaagaaccagaaaatatcaaactgaatgaaaaaagccatcggtagacactaatatcaagatgacagtgatgctaaaattatctggaaaaggttttaaagcagttattataaaaatgcttcaatgagtaatagtgaacatacttgaaacaagtgaaacaataaaaaatcaccaataaaatcayctcagcaaagaaacagtaaatataaacaaccaaatggaaatgttagaactgaaaaatataacaactgaaataagaatctcagtagatgggctcaacagcagaatggagagaacagaggaaagaataagtgaactggaagatacratagaaatgactgactctgtacaacagaaagaagatggaatgaaaaacaaagagagcagagcctcagggacctgtgggactataacaaaaactaaatttatatcatttggggttccaggaaaagataaaamaagaagatggagctaaaaaagtactcaaagaaataataattgaaaaatcccccaatttgacaaaacccataaacctacggattcaagaagtgaatgaccaataggatacatcaaagaaattcacaccaagacacatcctaattaaagttctgaaaactgaagacaaagaaagtcttaaaagcaatgagagaaacaacattttatctctaaagagaaaaccaattcaaatgacagcatatttctcatcagaaaccacaggggtcagaagaagtgatacaacatttttaaagtgttagaaaaaaaggaactgtcaaccagaaacctatgtccagtgcaaatatcatttaggaattaggaggaagtcaagctatcctcagattagcttgattacccaaataagtacactaacaaagtggaaagaagttctctaaacagaagggacatgatgaaagaaggaatcaagaatcatcaggaaagaagaaagaattcggtaaacaaagatggtaaattcaattakctctccttctccttttgaattttctcaattatgtttgataattgaagtgaaaattataacactgatgtgattctaaatagatgtagagaaaacattttagactattataaacaagggagggcaataggatgtaaaggatggtaaactttccacacttcaaactgttgatgcacgtagaccatgaaaagttatatatacaaaatgtaatacctggagtaactactaaaaaactactcagagagatgcaccccaaagcaccatgtataaatcaaaataaaactctaaaaaatgcccaagtcatgcatggtaagccaaggaagaaaaaaaagaaatgagaaaacaaggagaacaaacagaaaacaagaaataaaaagacagtctgaaacttaatatattaataattatattaattttgaataatgtaaaggcaaaaatttaaagacagatggtcagagtggattaaaaaacatgaaccaattatatgctgtgtatagggtgatatagataggttgaaagcaaaagggtcaaaaataacacatcatgcaaatattaattaaaagatagcaagagcggctatattaatatcagataaagtgacatcagaacaaagaaaataattgagacatagaaagacagtctatattaacaaaagtgtcaatccaccaagaagatagggcactgctaaaggtatgcaccaaacatgacagctacaaaatatgtgatgtgaaaactgatagaactaaaaggagaaacagacaagtctacaattacagttacagacttcaacactcctctctcaacaattgagagaacaactagacagaaaatcaaaacacataaaaaatcttaacacccttagcatataggatctatggacatttttggaacactctacccaacaacagcagaatgcattattttcaagtgcccaagaacataaaccaagatggactgtaacatggaacataaagcaaacctcaaaaaatttaaaaacctcaaaagaaataaaaatacgttgaacagaatgaaaatgaaaatacaacacgtcaaattggtggaacatagccaaaacagtgctgagagggaaacttacagcttattttaagaaacagaaaagtttcaaaccagtgacctaagctcccacctcaagaatctagaaaatataaagagaaaaataaatgcaaagaatgcagaagtaagtaaataataaagataggagcaagaatcaatgaaattgaaaacagaaaaataatagggaacaacaacgaaacaaagagctagatcttttaaaagatcaataaaagtgacaaccctctggcaagactaacaagaagacacaagctactagagtgagacagattatattagtatatactctgtgcacatcaaaatggtagtaagataatactaaggaaaattctatgcccataaatttgacaatttagatgaaatagactattattcgaaaacacacaataccacagctttctcaacatgagataatttggataaccttataactattgagtaaattaaattcacaattttaaaaattcagaaaaagaaaattccaggcccagatactttcagtggttaatttagagaagaatatccatcagttcttcacaatattttccataatgtagaagaagagagaacttttaccaattcattttttgaagttagtattctcctgataccaaaatcagacaaagacagaaccaaaaagaactacagaccaatataccttataaacatagacataaaaaatccctaacaaaatattaatgggtagaatttagcaatatatgagaagaattatacactgaccaagtgtggtttgctctgaagacgcaaggctggttcaatttttacaaataaaccaatctaattcttcatattaacaggaaaaagagaaaaaaaaatcacattatcattccaattgatgcagaaaaaagcatttgacaaaattcaacaattactcatgataacaactcctagacaaataggaagaaagtggaacttccccaacttggaaaagagtatctacaaaattcctatagctaacattatacttagtggtgaaaaattgaatgctgtccccctaacactaaaaacaaggcaaagtttggtcttactatttctattcaatgtagtactaggagttctagccagtgcaataaggcaagatacagaaataaaagacatatccttttagataataaagggagacaaaagtagccctgtttgcagatgacataattgtttatgtagaaaattccaaggaatctacaagaatgaagcaaggaaagaaggaaggagaaagaaatgaacgaaagagagagagaaaggamggaaggaaagcaggcagacaaggaaaggaattcctagaactaaaaagtgactcagcaaggttgcagatacraggtcaacgttcattcattgtatttctatatatagttgtcccaaggtatctgtgggggattgatttcaggatcaacactcagataccaaaatctagggaggcacaagtcccttatataaaactatgtagtaggcggggcacagtggctcacgcctgtaatcccagcactttgggaggccaaggtgggtggatcacgaggtcaggagatcgagaccatcctggctaacacagtgaaaccccgtctctactaaaaatacaaaaaattagccgggcgtggtggcgggcacctgtagtcccggctactcgggaggctgaggcaggagaatggcgtgaacttgggaggcggagcttgcagtgagccgagattgcgccactgcagcccggmctgggcgaaagagcgasactccatctcaaaaaaaaaamaaaaaaaaaacaacaactatatagtatttgcatataacttatgcacaaagatacctactttgtcatccctaaattacttactatatgtaatacaatgtaaatgttatgtaagtagttgttgtattgtttagggaataatgacaacagaaaagactgtacgtgttcagtacagacacaaccatcctttcgtttcccaaatatttttgatctgtgattgattgaatccatggatgcagaatccgtggatatggaggactgactttactagtatcggacacctggaaaccaaaatttcaaaaaacaccatgtacaatgtctcaaaaaattagaaatacttaggtataaacctaacaaaacatgtaaaggacttgtatgctgaaaactacaaaatgctaatgaaacaaatcaacgtagagctataaaatggagagatataccatattcatcaattggaagattcagcatagtaaagatattatttatccccatatcgaatacaggtttaacctaatttttatcaaaatttcagcaagatttttttattgctatagacaaacttatactgaaatttatatggaaaggcaaaggaactagaatagctaaaacaattttgaaaaagaataaagtgggaggaatcagtctatccaattttaagacatataactatagtaatgaagactgtatggtattggcaggtgaatacacacatagaacaatggataaaaatagggagtgcagaaatagacccataccaacatgcccaactgatttttttatgaaatggcatgagcaactccagtgaagtaagatagccttttcaacagatggttctggaatacttgaacatccataggcaaaataagaaaaattaaagaaccttaatctaagttccacattttatatgaaatttaactcaaaatagatcatggacttaaatgtacataaaatgtaacactgcaaaaactttagaagtaaacatatagaagaaaacctttggcaactatggttagacggtgagctcttagggttcacacccaaagcgtgattcataaaaggaaaaactgataaacaggacatcatcaaaattaaaagcatttgttctgtgaaagactatgttcagagtctgaaaagacaagctacagtctgggatatgtttgcaaagcacatatcacacactaaggcatagtacctacaatatacaaggaacaatcaaatgtaaacaggtttttaaaaatccagttaggaaaagggcaaaagataaaaacaggcgtttcactcatgaggctagagacggcaaataacgcatgaaaagacattcaacatcattaaccattaaggaaatgcagattaaaaccataataagatgaactctttccccctaacactattgacctatcagaatggctaaaataaacaacagtgataacacgtaatgcaagtgaggatgaagagaaactggatcattcatacattgctggtgggaatataaaatggtacagccactctgaaaaagagtgtagcagcttcttagaagacgaaacacatgcttaccatacagcccagaaattacactcttgggtatttatccccccaaaaatgaaaacttgtgttcacacaaaaacttgyatattaatgtacrtagctgctttgttcagaataacaaaaaatctggaaacaaacccaattttcctttaatgggtaaatgattaaggaaactgtggtatgtgcataccrtgaaatatatattcttttgcaatgagaaagaatgcactattgatacattcacatggggaatcaccaaaaaattttgctgagtggaagaaaaaaataccaaaaggttacataccatgattccgttgatataccagtcttgatatgacaaaattatatggagagataacagattagtggctgccagtggtaaggatgaggagatgtttgcagaaagaggaaggaagtaggtgtggctgtaaaagggcaacataagggacctgtgtggtgatggagatgatctggatctcattgtatcaatatctatatgctggttgtgatgttgtactatagttttttaagatgttaccattgggcgaaactgggtaaaagatacccaacatatctctgtataatttctgacaattgcatgtaaatctacaattatcttgaaatagaaaaattcatttaattacataaaaaagcttaaaaatgcactgaaaacaaagtttttcagaaaagttcaaagaaacaaagaatgatcaagtaaataataacaataacaacaaaatcagggttattgtattaaatactgagccagggttgaattcaagacaataaaaattattgaatgagaaaagacacaatagtataaaggtcatagtctctaatggggatttaactctcatacattttacgcatgatatgaaataatacaattatacataaaacaagacacaactataggaaaatccaggagaaatcccagaaactgcatagttctatgagaattttaactcatctcttaccaagccatgaaaaaactttgaatgataaaaataaagttgagtaacggacrtatattgaatttggttcctgacaacagatactgcatcttctttacagagtctcataaaacttacaaaaatggatcatatattaatctataatgaaaacctcagtaaattccacaaagtaaaaatagcttgagtggcatcctttgcatcaatgagataacactagaaataatgaagtagaaccaaaaaaccccaccttagtcacttacaaatttggcagtcttttaaaactcatatttgatcaaagcaaaaattaaaatataaaattctaaatagctaagaaataatgataatggaaatgtaaaccaagcagaaaataaaacatacctttaaactttgagaaaggatgaatcaagtatccaatttaaggtgcatttttataagtgctatgaaaaaaataaatatgaaaaacacaaatacattagaaaacagtaggttggattttttaaagtcaagctaattctccggaaaataaatgggcagataatgaactagagaaatcactgactcgcttagtcaagagaagaaggtgagagaacatactctgaagtagaaacaaaaaagtggagataaatacaggtacctagagactaataagtaatatggaagagtattctgtcacattatttacagccaaaattcaaatgtttggtgcaatgggtggttgctttaggaaaatataagttgctggaaaaaatggaaaatctaaaagtttcataacaatggaatcaaagtaacaaaccaaagtatcaaagaacagtgcattctacaaatatttattgagcctctgttatatgccagggccttgggaagtccaggggagggggaaatggccctgctttcagggagctctctgtgaattgggagtkcggggaagataagccctcagtgtcataagaggtcagtggccaggggccagatggaggtgggagagggagaatcctgtgtgccatgatgctgccccgtgcccctctcttggactgttgggagaataaaaaatcatggggtccccagggcctgacacctaaaaaataccccacaaatggaagctgctcttggctccccacccaccccctatacagtgaaaacagaggaggcgaatgggggctgtcctcccaggccatccgggatagcttcccagggcatctatggatcagaatctcaaaggatgagttggaagcaggagaaaaaaggtgttggaggctgaggaacagcatgtgcagcagtcattaggtgaagaaacggtgtgcgtgctggagctccccacatggttttctatgactggagcacgggggcgtgacctgggggtatggtggggctgaggctggggccgggtcacagaaggccttatatgctgtggtgaagaggtcagcaagatttagctgaatgttcttagatacacaggtataaaggaaacccaggtgagccttgaaatttcagcacccaaaggagcccatcagtgaatcctcttaagctgctctgcataggttcaggataagcctgaagtggctggtttttagatgcagagaaggctctgacctgcatccacatggcccccaaggctctgtggcctgtggtctagctgcagaggataggaggaagcttttcaagttattactggatgggctatgctcaacaggtttttccagttctgcctctagggagtcttgcccaacaattaatccagatggtcacygacgggtttctttcacctataaatccttgaagcctctttttgaccccaacaccactaatgcaggcttcctctgttttcccataggatttagaggattcttctcagctcattctggcctttcttttctcactgctgtcatatttgatgacacaggaaaaattagcaaggaaggatagaatggtggatgaatacatacatacatacgtgtataaatggctgtggcttgagggatttttctgaattttcctgaaatacaagtggatcactggaatgaaaatgttccgtggtcattgcttcctgaattctaatgtgctccctatggtgtatttttttgctaggttgttataacaaaatatggcagatggccgtcttctcgctatgtcctggccttttctctgtgcatgcacgtccttgatgtgtctccctcttctttttctttttttytttttttttttaatttgagacagagtctctctctgttgcccaggctggattgcagtggcgggatcttgactcactgcaaactccgcctcccatgttcaagtgattctcatgcctcagcctcctgagtagctgggattacaggtatgcgccatcacatctagctaacttttgtatttttagtggagatggggtttcaccatgttggccaggctggtcttgaactcctgacctcaggtgatcttcctgcctcagccttccaaagtgctgggattacaggcatgggccaccacacctggcctccctcttcttataaggacatcagttattttggattagggcctcaccctaacagcctcatttttacttaattatctctttaaaaatcttatcctcaaacaccactgggggttgggacttaaacctaacaatttgggagggacacaattcagtccataacacacagcttttaaccttcgaagtaaagactctaagtccaaagtcaaggacagatggggaattgggggtgacagtaagttgagttgaaatcaacccaattttggattttaaaaaaagtcagggagaagagcctggccatatgctcctccatgaatcacctctctgcatgcagaagaggtaggtatgattctgagccagtctacacagtaggttatgtaggagccccaaagggaataaccttgcctctgcttgcaaagctgtgctttttgaatttgctccttcccattggacatggtaaaggcactgcaacaccacaagggggacagtgagtttgccaaagcatggtaacccacaggtgctgcagccagccctgtgaccccccaaatagaagaagaagcatgtccgtcggcctgccctcaggactcagaagcagcagggctccagtcccctctctgtccaagcgtattcagcatgccagtaaaaagatgtctttgagctaaaaaacagaactactcttcgacccagcaaacccattactaggtatatacccagaggaatataaatcattctaccataaaggcacatgcacgtaaatgtttattgcagcgctattcacaatagcaaggacatggaatcaaccaacgtagatgcccatcaatggtagactggataaagaaaatgtggtccatatacaccatggtatactgtacagccacaaaaargaatgagctcgtgtcttttacgggaacatggatggagctggagaccattatccttaacaaactaatgcaaataccagaacagaaaaccaagtaccacatgctctcacttataagtaggaacacatggacacatagagaggaacaacagacactggagcctacctgaaagtggaggctaggagtagggagaggaacagaataactactggatactaagcttagtacctgggtgatgaaataatctttacaacaaacccctgtgacacaagtttacctatattacaaacctgcacatgtacccacgatcctaaaataaaagttaaaaaaaaaagtctttgcttaccttctccagagctttcctctgtctccctttgtgcttgttgattttacttcttgtagatgggttttctgtacttttcatttcccgccagttgaagcggccaggatacagctatgtttcatcttttcagtaaggcagaaaatagcatgtgccttgggtctgactgtctgtggcctgttcctgctttccctcgtggcctgtatgtttgatccatttcaccagcgcatggcccaccgttgcctaactgtgatactcagctccccaacctcaggaagagaaatagtcacccctgcttcagaacatggtggtgaagagagccatcttgggctactcaaaatccaaagacttagaaggaaaagctcagattcattctcaaccctcctctccccagagcacttggctaccagaaagatccagctgccactgcctgtcacctttctaaagaagcatagtttttaagacacaagactattgagcaggttggattttaaaaattgggaaacatctccaagcagtttggaaggaaaagagactctgatcttgaataacctcctcaggggatcaaagaaaaagacccactaagatgaacatcccccctcttgccccattcaggttaagtataaataagacttgcccaccttgggagacctgagctcacacctgctgctgatgacatggaggagactgagcaggggagccacagggattagagatgggcattgttccagtctggcccaatttttattcactttcctattgcaaggaatgcccttagaaattgcaaagccattgcattttgctaatgctaacagaaattccttaaactaggagattgtgccactgcccatcaattttacaaggcaataatgcagatcccaagtggctaaagtctgaggcagaaggcagagcacttcatcacagtgagagaactgggttgttgctgggggaagctgttctgatatcacgctggtattaccatgcattaataagctttgttcatcttctctgacactggagggccaacccttttgcttcatcttcctgcttattatgcagctcaggccatggagatgggctgcctgcttgtcataaattgtaggcaaactcccttcgttctgttgttggtcccagtgggcttgagctcctgggaaccaaggctttcagttccacaaatgcacactgagccctgatgccaggctaggccctgtggggaactccaagatacatgagccacagttcctgcctttgtgatcgtgttgtggtcagggagaaagtcacatggcctaataattataccaacaggcagaatgtgtaacagacaggaaaacaaacagctgtgggaactcaggaagggaaggagtaactttcaatgaaagaacagggagatccttggacaaggtttcagtacatagacacttagagaatgcagccgtttcagcctggaatttgccatagcaaagaagagggagcccagaaataagaagatgacacacgaaatatatgtatatgtaaccagaataatttaaccatcctaaaataatcctttatgctatggctccataattgttctctctctcttccagcagcccctggtaaccaatgatctattattcttcatcactataattttgtctttttgacaaaattccatataaatgtaatcatacaatctgtaaacttttgatatggacttcattcactccgcatgatgtctttgagattcagccaagtggttgcattcatcaacagtgaatcattttcattgctgartactggtccgttgtgtggattagcagagtttgtttttccattcaccctttgaaggacatttgggttatgtccagtttttgacaattgtgagtagagctgctataagtattcatgtacagattattatgtgaacataaatcttcatttctcaaggaccaagtttcttacctcaacattggcactgccaaccttgacatctggggccagatactttgttgtgagggaactgccatgtgcattgcagaatgtttagtttatccctggcccctactgatgccagtagaactctgccaattgtggcaatcaaaatgtctgcagacactgacaaatgcaaatatcatccacacctgagaaccactgctcttggttaaatacccaggaatgaatttactggattatatggcaagcatataactttagaagaaactttttgttcctgatgtatgagagatccagttactcagcatcctagctgacactcagtattgtgtattttttatttttcctattccaatagatatatagaggcatcttactgtggttttagtttgcatctccccagtagctgatgctgttgaaaatctttcgatgtgcttgtttgccatatgtatcccctttagtgaaactgataaaatcattttcccatttttaattggataatttgttttcctactgttgagctttgagagttatttatagattctaaatacaaattctcttttggatatgtgacttttgcaaatatcttctcccattgtatagtatgtattttcatttccttatcagtgccttttgcagagaaaagttttttattttgatgaaatccaatttatccatttttctctttcatgagttatgcttttgatgccaaacctaagaactcttcgttaaacctcaagtcatgaaggttttatctcattatttttctaaaagtttaagagtttttttgttttacatttagatttataattcattttgacctgatttgtctgtaagatgtgaagtttaggtcaagatatgcttatcttttgactattgtgatatcaaattgactattgtgatatctgttgaaaatactatcctttcttcattcaattccttttgcatctttgtgaaaaaatatttggacatatttgtgtagaattatttctggatttttctattttgttcccattgacctacgtgtatatttctcaaccacactatcttcattagtataactttatactaagccttaaaatcaaataagataattcctctgactttattcatctttggcaaattgttttagtgattctagtttcttttcttttacatgcaaattttagaatcattttgtctctatctacagaaaattcattggtgattttgattggaattataaaaaatctatggatcagtttgggaagaattaacaaatgtactatgttgactcttccgatccattttattagttcctctttgatttctttaatccagattttttatttccagcataaggatgatgtacatgtttttgtagatttataactaaatatttcattttgggggaagctgtggtaaaaaggtatgttgttttaagttttgctttctagttgtatgttgctagtatttagaaatataatcaatgttttaatgtattgaccttgtatcctgtaacctgctaagctcgttattagttctagaggatttagggcatgycgggggacatttactgtgtgttgtttttttttttttctatgtaagcaagcatgttgtctgtgaatagcaacagttttattgtttcctttccaatttccatggctttgttttctttttcttgccttgttgcattggctaggattttcagtatgtgatgaataagagtgatgagaattgacatccttactttgttccagatcttaggcagaaagtgttcagccttttgcaactagatatgatattctctacagggctttctgtgtgtatgtgtgtttttctcttgtaattgtccttaatcaggataagacagttctcttctatccctagcttcctaagagatttttttaaatcaggaattaatgttaaattttgccaaatgctttttctgcatcaattgatatgattatggtttttttttcttttttaggttgttaatatgataaataacaatgtcttttgatttttttttggaaaccaggtctcataccatctcccatgctggagtgcagtggtgccatcacagctcactgcagccttgacctcctgggctcaagtcattcttccacctcagcctctcaaatacctgggactatgggtgtgtgccaccatgcttagctaatttctatattttttttagagacagggtttcaccatgttgtcccagcttgtctcaaactcctgggttcaagtgatccactcaccttgtcctcccaaagtgctgggactacaagcgtgacccatctaatggtttagttttgagtatgcaactggccttgcattcctaggataaagtctacttggtcatgatgtattattctttttatatattgctgcattccatttgctaataaattgttggggatttttgcatctatgttcctgagaaatcttggtctgtaggtttttttcttcctgtacgatctttgcctagttttggtatcacagtaacactggcctcataaaatgagttgggaagggttccctcctcttctgtttcctggaagagattgtgtagaatcagtgttattttttatgtaaatattgggtagaattcaccaatgaaaccattaaggcctagagatttcttttttttacaatcttttaactatgaattacattttcttaaactttaatgagatgattcttgttatgtatttcatttcgtatgatccttggtaacatgaaatattcaaggaattacttcatttcagctgttaccaaattatgtgtgtaaggttgttcatagtgttttattttatccttttgattactgtgaggctgtactgctttcccttctttcatttttgatttcagtaatttgtgtctttctatttttgtctttgtaaatttgttagaactttatcaattatctttttgaagaacaacctttacttttacatttatttttctctatcatatttctatttttattgatttctgtttttatatttattatttattttcttccagttgctttgggttttactcttgtttttctagtttcttgaggtatacttagattattgattttagacttttcttcttttctcttgtaagcattttatgctataactttgcctctgagtactacttttcctgcaccccacaacaacttatatattgcattttcattgttctccacttctaatttcccttgagacttcctccttgacccatgaattatatatagaattatatatagaagtatgaggtctaatttttaagtgtctagaatttgtcctgttctctttatgttattgatctcaaatttatttctattataatcagagaagataccatgtctaatttatgtttagatttttttaattgtcaaaatttgtcttgttacccaggatatggtctatcttggtggatatttcatttgtccttaaaaaaatgtgtatttgctattgttgagtagaatgttataatgtcaagaagatctagttggttgataatgttcttcagttctttgtatccttgctgatcttctgtcaatcagcattctgtctatcgactgataatctcagtcctatctattactgaaagagtaaagtgacatattcaactatgcctgtggatctgtctacttatcctttccattctgtctggtttttgcttagtatattttaaagcattgtgtgtgcattcacatttagcattattacatcttcttgtttcattagcctttttatcattatgtaattccctctttattcctggaagttttcttttttctgaagtctacattgtctgatattaatataaatactgcaggcttatttggattagtttttgctttgcatattttttgtccttttagttttacatctatcattttatttggagttattttttggtacacaacttaggtttttttaaaacatttattttaaaatttgtctcttgattggtatgtttaaactatttacatttaatgtgattattgatatgtttggattaggtctgtcattttatttgttttctgttttctcttcttttcattcctccatttcctcttacatgttgtgttagtttcctatggctactgtaacaaactactgcaaggttgatgacataaaacaacaaaaaattattctttcatagttttagaggtcagaagtctgaaatcggtatcactgatccaaaatcaaggtgttggcagsattgcgctacctttggaggcttcagagaataatccattccttgcttctttcaggctctggttgcttctggcattccttgactgtggccaactcgttccagtctctstctccgtggtcacattgcctcctcctcttctgtctgtgaaatctctctcttataaagatgcatgtgattgcatttaggacctacctgaataatccagaataatctctccattttaagaatcttaactacacctgtaaaggcccttttcccttataaagtaatatttgcagatttcaggaattaggatctgaaattaggattcaggaatttggatggctatcattcagcctgcaacacttaccttcttttgaattacttgaacattctttagaatttcatttaaaagaaatttaactatatctctttgcatatgtgtttttctgtttagtagttgctgtaagaactacaatatatatacttaactttataatttacttagaatcaatattttatctcttcaagtggaatgtagaaaccttaccaccatagtgttcctctcccctctttctgtcatatgcatcttatcagtacacctacataccctggaaaccacatcagacaatattttgctttcaaattttgctttcaatcattaaacatgttttaaaagaattatgagaagaaatagtttatcatatttattcagctgtttaccctttctgttgctcttccttcgttcctgattggtatttaccatttccatttttccttccttcattttgcttctgcctgaaaaactgcttttaacaatttttttagagcagatttgctggcaacaaattctgttttctcattggtaattttttaaatctcatcctaatttctgaacgatcatttacacgatatataattctggattgacagttgttactttcagtamttgaaaaatctttctggtctctacagtttctgatgagaaattcaatcattcagattgtttttctcctagaggtaatgcgtcagtttttcttcagctgctttcaagaatttttctttgtttttagattccagatgtttgattatgatgtgtctaggcataaatttctttgtgtttatcctgtytggggttcactaaacttctgaaacctgcacatttgtggggttttgccagatttagggagtcttttgacattatatcttcaagtactgccttctttctcctctccttccgtgattccaatgacatgaaggttagaccttttgttacaatcccacaggtccctggggctctctttttctttgccagtctattttctctctgttgttcagataggataatttctattattctatcttctagtttactcagtctttcctctgtctccatagttctgctttggagctcatctttcttttaatcaggttacttttcagttctaaaatgtctacttgattctcttttatgttttatatttctttctttcttttttttgagacagagtcttactctgccgcccaggctagagtgcaatggcgcgatgtcagctcactgcaacctctgcctcccatattcaagcaatctcatgcctcagcctcccaagtagctgggattgcaggcacccaccaccatgcccagctaatttttgtattctaagtagaggtcgggtttcaccatgttggccaggctggtcttgaactsctgacctcaagtgatctgcccacctcagccccccaaaatgctgggattacaggtgtgagccaccacacctagcctgtattttctatttctttactgaaatttactattctaccatttgtttcaagacggtttgtgattgttcattagataatttttagaatggctactttaaagcttttgccakataattctaacatctgtgtcattttgctgttggcatccgttgattgmcctttttcatgcaagctacatttctcttctccttcatatgctgaaaaatattggattatttcctagaccttttgaatattatgttatgagattctggatgttgtttaaaacctatggagaatgttgatgtttttgttttagcaggctatgtacctggttatgtttgggctgcaaatttcaatgcaccttctgttgattgtgattccaatgtcggtttggccctcaaaccttttgcagcacyatttagctatgttccgtgtatgcaccactaacaggccagtctggcatctgaattctcatctgtttactagttcagttatcaaggcctttttttaaaagctgtacatgtatttgtttacttattttwaaagtttttataaatttatggagtacagtgcaattttgttaatacatgcatatattgcatagtggtaaattcatggatattagggttattccttgggtattcagtagggtattcatcacccaaataatgtacattgtacccattaagtaatttctcatctatccccccagcctctcgaccttctgagtctccattgactgattccacattctgtgtcctagtgtatatacattatttagttcccacttataagtgagaacatgtaatatttgtctttctgtgtctgttcaaagtcttttgtatgctaattagcatgaaatccatgcatgaaggyctcaggctgcattcaacatttcgtaaacaactttctggggctgctttcccaagtcctgcctctccatgaccatcctgatactttctggttccctcgggcttcctctcctcatcctccrgccagaaagctgaggtttagttatcctactctgctgcacatgcttccagggacatgagcagcatgaggaaaaagagttaaactcactgccagttttggagcactttgaattctgatcttcttccctaatctacctgccactatttatttttcagagtcctcaagtagcttctccatgcactgtgtccagaaattatggctgcattcagtgaaagagatgggggaagtcatctctatgttacccagaaccagagcccatagcctatacctttagtaagagtcaccttttttttttttaattctgaaaagtggaggtactacagtgtgaaaggccaaaaaaaaaaaaaaatctttgatttctgaaagaattaattccattcagggattcaacttcttcctggtttagtcttgggagggtgtatgtgtcccagaatttatccatttcttctagattttctagtttatttgcatagaggtgtttatagtattctgtgatggtagtttgtatttctgtgggatcagtggggatatcccctttatcattttttattgtgtctatttgattcatctctcttttcttctttattagtctgactagcaatctattttgttaatcttttcaaaaaaccagctcctggattcattgattttttgaaggattttttgtgtctctatctccttcagctctgctctgatcttagttatttcttgtcttctgctagcttttgaatttgtttgctcttgcttctgtagttcttttaattgtgatgttaaggtgtcaattttagatctttcctgcttcctcctgtgggcatttagtggtataaatttccctctaaccactgctttagctgtgtcccagagattctggtatgttgtgtctttgttctcattggtttcaagaacttatttatttctgcctaaatttcatagtcattcaggagcaggttgttcagtttccatgtagttgtgtgattgaggcaataattaatagcctatcaaccaaaaaaagcccaggacaagatggattcacagccaaattctaccagaggtacaaaggggagctggtaccgttccttctgaaactattcggaatagtagaaaaagagggactctccctaactcattttatgaggccagcatcatcctgataccaaaacctggcagagacacaacaacaacaacaaaatttcaggccaatatccctgatgaacaatgatgtgaacatcctcaataaaaaactggcaagccaaatccaacagcacatcaaaaagcttattcaccacgatcaagctggcttcatccctgggatgcaaggctagttcaacacatacaaatcaacaaacataatctatcacataaacagaacgaatgacaaaaaccacatgattatctcaatagatacagaaatgccttcaataaaattcaacatccgttcatgctaaaaactctcaataaactaggtatcgatggaatgtatctcaaaataataagagctatttatgacaaaaccacagccaatatcatactgaataggcaaaaggtggaagcattccctttgaaaaccagcacaagccaagaatgccctctctcaccactcctattcaacatagtattgggagttctggccagggcaatcaggcaagagaaagaaataaaggatattcaaataggaagagaggaagtcaaattctctctgtttgcagatgacatgattgtatatttagaaaaccccatcgtctcagcccagaatctccttaagcgtataagcaacttcagcaaagtctcaggatacaaaatcaatgtgcaaaaatcacaaacattcctatacaccaataacatacaaacagagagccaaatcatgagtgaactcccatttaaaattgctacaaagagaataaaatacctaggaatacaacttacaagggatgtgaaggacatcttcaaggagaactacaagctgctgctcaacgaaataagagaggacacaaacaaatggaaaaacattccatgctcctggataggaagaatcaatatcatgaaaatggccatactgcctgaagtaatttatagattcaatgctatccccaccaagctaccattgactttcttcacagaattagaaaaaaactactttaaatttcatatggaaccaaaaaagagcccgtatagccaatacaatcctaagcaaaaggaacaaagctggaggcatcacactacctgacttcaaactatactacaaggctacagtaaccaaaacagcatggtactggtactaaaacagatatatagaccaatggaacagaacagaggcctcagaaataatgctacacatctataatcatctgatctttgacaaaccttacaaaaacaagcaatggggaaaggattccatattcaataaattgtgttaggaaaactggctagcccacagaaaacagaaactggaccccttgcttacactttatacaaaaattaactcaagatggattaaagacttaaatgtaagacctaaaaccataaaaatcctagaagacaacctaggcaatagcattcaggacataggcatgggcagagacttcatgactaaaacaccaaaagcaatgccaatgaaagccaaaattgacaaatgggatccaattaaactaaagagcttctgcacagcaaaagaaactatcatcagagtgaacaggcaacctacagaatgggagaaaatttttgcaacctatccgtctgacaaaggtctactacccagaatctacaaagaacttaaacaaatttacaagaaaaaaaaaaagaaacaaccccatcaaaaattgggtgaaggatatgcatagacacttctcaaaagaagacatttatgtgaccaacaaacgtgaaaaaaagctcatcatcactggtcattagaaaaatgcaaatcaaaaccacaatgagataccatctcatgccagttagaatggcaatcattaaaaagtcaggaaaagacagatgctggaaagaatgtggagaaataggaacacttttacactgttggtgggagtgtaaattagttcaaccattgtggaagacaccgtggtgatttctggttctagattccagtgatctagaaccagaaataccatttgactcagcaatcccattactggtatatacccaaaggattataaatcatgctactataaagacacatgcacacatatgtttattgcagcactgttcacaatagcaaaaacttggaaccaacccaaatgcccaccaatgatagactggataaagaaaatgtggcacatatacaccatggaatactatgcagccataaaaaaggatgagttaatgaacttttcagggacatggatgaagctggaaactatcattctcaccaaactaacacaagaacagaaaaccaaacatcacatgttctcactcataagtgggagttgaacaatgagaccacatggacacagggaggggaagatcacacactggggcctgtcagggggttggggttaggggagggatagcattaggagaaatacctaatgtagatgatgggttgatgggttcagcaaaccaccatggcacgtgtatagctatgtaacaaacctgcacattctgcgcatgtatcccagaacttaaattataataattamaaaaaagaattgattccaacccttactctatcatttaactttctttgagcctctgtttcttcatgtgtaaaaagggggctgtgtcaggggtccccaagactatcctcaggttcagggatttgctagaatgtctcataggatgcaaataagctgttatattcatagttatagtttattacagcaaaaaatacagattaaaatcagcaaagggaaaaggtacagggggtaaagtccaggagagatcagcaaacttccaattgtccactcccagtggagtctatagacagcatttaattctcccaacaatgatgtgtgataacatgtgcaaggtggtggcaaccagatcacccaaaccttggagtccagggtttttttgtttttttttttgaatagtcacataagcatgtagcattcatatgactgacctcagctcctcagctcctcagaccatatcgcacaactaccccagaggtaaaagtgatgcaccatggcccaaaggtccaggcatacaaacacactcataccaggcaagatactacaagagctcaaaagtctctctcccaagagccaggaaagggccagtcctgaaaactttgggtttgtgcaagatttgagcagcccagacctgttagctctttcctgcacaggtctacaacttttagctttcggaattattatgaggactaaatgaggtggatataaaataccttatagtgtctgacacatagtaggtgtttgataaatattagatattagactctatagacagagacttcaaaggggcacatggacttgtcaggaataaaaacagaaatgtcattctgacaatacttccagaaaaaaaaatgtgatttggggccaggagtgrtggctcatacctgcaatcctagcactttgggaggccaagggggaaggatcgcttgagcccaggagttcaagaccagcctgggcaagatggcaagaccccatctctcccaaaaaataaaaaacggttatgatttgagacatacttatagaaaccagggtaggagtagagggactgctgtcttacggacacagatctaaggaatacacacacacacacacacacacacacacacacacacacacacacaagaagtggaaggattgtgggggagacatttgtccaaatataaacacaaagcatttaataaatgtcagtagggccaaaccccagcataacatgaggcttgacaaataatcttataaaaatttaaaaggccatttttagctatattcaagatgtgaagagatggactcttggtttaggcaagaaaaatttggtattaatacatggcaaaaagaaagcaaagctacttatctcctattatgttcccatcttctctctgaagcaacattgttctcaattggaaaggacttatgattgacagagatttcaaacaaaggaggacaaaagaaatcccggaaaattataaatgagcaaatgtccaccttttcaaagacagctaacaacacaatgacaggatcaaatccacacatatcaatactaaccttaaatgtaaatggactaaatgacccaattaaaaggcacagagtggccagcttgataaagagcaagacccaatagtatgctgtcttcaagaaacccatctcacatgcaatgacacccataggctcaaaatgaagggatggtgaaaaatctaccaagcaaatggaaaacaggaaaaaaaaaaaaaaaagcagaggtggcaatcctaatttcagacaaaacatactttaaaccaacaaaaattttaaagacaaagaaggacattacacaatgataaatgattcaattcaacaagaagatgtaactaccctaaatgtatatgtacacaacacaggaacacccagattcataaagcaggttcttaagagacctatgaagagacttacattcccacacaataatagcaggaaacttcagcacctcaatgacagtattagacagatcaytgaggcagaaaaaacaaaagtattcaggagctgaactcaacactggatcaaatggacctgatagacatctacacaactccccacccaaatacaacagaagatacattcatctcatggctacatggcacatactctaaaattgaccacacagtcaggcataaaacaacactcagccaattcaaaaacactgaaatcataccarccatgctcttggaccacagagcaataaaagtagaaatcaagactaagaaaattcctcaaaaccatataattacatggaaattaaacaacctgctctgaatgacttctgagtaaacaatgaaattaaggcagatttcaagaagttctttgaaactaatgagaacagagatacaatacagcagaatctctgggacacaggtaaggtagtgttaagagygaaatttatatcactaaatgcccacatcacaaagttggaaagatctgaaaataattacccaacattacaactagaggaactaaagaagcaagagcaaaccaacccctaagctagcagaagacaggaaataaccaaaatcaaagcagaactgaaggagattgagacataaaaaaatacaaaagatcaacaaatccaaaagttgtttctttgaaaaaattaataagatagctagactaataaagaagaaaagagagaaagtccaaataaacacaattagaaatgacaaaggggatgttaccaccgactccacagaaatacaaataaccatcagagactactatgaatacctgtatatacacaaaccaggaagtctagaagaaagggataagttcctggacacacacatcctcccaaggctgaactaggaagaaactgaatctgttaacagaccaataatgagctccaaaattgaatcagtaataaatagcctaccaaccaaaaatagcccaggaccagatggattcacagttgaattctaccagatatacaaagaagacctggtatcattactactgaaactatttcaaaacattgagaaaggacacctccccaactcattctatgaggctggcatcatcctgataccaaagcctggcagggacacaacaacaaaaaagaaaactttagggcaatatccttgatgaacatagatgcaaaaatactcaacaaaatcttagcaaatcaaatccagcagcatgtaaaaagctaatccaccaggatcaagtagtttttatccttgggatgctaggttggttcaacatacacaagttaataaatgtgattcatcacataaacagaactaaagacaaaaaccatatgattatctcagtagatgcagatgaaattcgatagatagatgtgaatgggattgcattcctgatttggctctcagcttggatattgttgatgtatagagggttggctgttggtttattgggggtttttaacatgaaggaatgttgcattttattgaacatcttcgacaaaaggcactgaaggaacatacttgaacatagtaagagtcatctatgaaaaacccacagtcaaaatcatgctgaatgggcaaaagctggaagcattccccttgaaaaccagcacaagacaaggatcccttctctcactacctctgcttaacatagtcagtcctggccagagcaatgaggcaagataaataaataaaaggtatccaactaggaagggaggaagtcaaactattcctgtttgcagacaacatgattctatgtctagaaaaaccctatggtctctacccaaaagatccttgagctaataaacaacttcagcaaatttcaggatacaaaatcaacatataaaaatcagtagcattccgatacaccaacaaaatccaagttcagagccaaatcaggaatgcaatcccattcacaatggacacaaaaagaagaaaatacctagaaatacaaataaccagaaatgtaaaagatctctacaatgaaaattataaaacagtgctcaaagaaatcagagatgacacagacaaatggaaaaacattccatgctcatggataggaagaatcaatattgataaaatggccatcctgaccaaaacatttacagatttaatgctattcctatcaaactatcaatgacattcttcacagaagtagggaaagctgttttaaaattcatatagaaccaaaaaagagtccaaatagccaaggcaatcctaagcaaaaggaacaaagttggaggcatcatattactcaacttcaaactgtattacagatacagtaaccaaaatagcatagtactggtacaaaaacagacacatagaccaatggtacagaatagagagcccagaaataatgctgcacacctacaatgcagcacaccatctgatctttgacaaagctaacaaaaacaagcaatgaggaggggactccctattcaataaatggtgctgggataactgactagccatatgctaaagactgaaactggaccccttccttacaccatatacaaaaatcaactcaagatggattaaagacttaaatgtgaaatctaaacctatgataacctgggaaataccattccagacgtaggaactggcaaagatttcatgacaaagatgccaaaagcaattaaaacagaagcaaaaattaacaaatgggatctaattaaactaaagagcttctgctcagcaaaagaaactatcaacagggtgaacaaccaacttacagaatgggagaaaatatttgcaaactatacatctgacaaaggtctaatatccagcatctctaaggaacttaaatttataagacaaaaacaaacaaccccattgaagagtaggcaaagaacatgaacagacacttcagaagaagacatacatgtggccaaaaagcatatgaaaaaatgctcaatatcactaatcattagagaaatgcaaataaaaaccacagtaagataccatctcacaccagtcaaaatggctgttattaaaaagtcaaaaaataacagatgctggcaaggttgcagagaaaaagggaacgcctatgtactgctggtgggagtgtaaattagttcaaccattgctgaaagcagtgtggcaattcctcaaagaactaaaagcagaattaccattcaacccagcaatcccactactgggcatatacccaaaggaatataaatcattctaccataaggatacatgcatgcctgtgttcactgcagcaccattcacaatagcaaagacatgcaatcaacctaaatgcccattaatggtaggcttcgtaaagaaactgtggtatatatactatgcagccatgaaaaaaaatgagataatgtcgtttgcaggaacatggatagaactggagcccattatccttaacaagccagcccaggaacagaaaaccaagtactgcttgttctcacttttaagtgggagctaaataatgagaacacatggacacacaaaggggaacaacagacaccggggccaaccttagggtgcagggtgggaagagggagaggatcaggaaacataactatcgggtactaggcttggtacatgggtgatgaaataatctgtacaccagactcccatgacatcagttgaactatactcacacatatagccctgaacctaaaataaaagttaaaacaaaaacaaaaaaaagtagatatgggaaactatacaatctgagattaatataaatccaagttaaaattctacgaaagactattccagatagtttatgtacaaatagaaaagggaccatcactagaaggctgcctagttaagtaaggataagtaaggattaattaagtaaggcttatccttcctttcttatacttcctttcttaatcagattactagaagagaaaatttggacccaggcacggtggctcacgcctgtaatcccagcactttgggaggccgaggcrggtggatcacaaggtcaagagatcgagaccatcctggccaacatggtgaaaccccgtctctactaaaaatacaaaaacttagctgggcatggtggcgtgagcatgtagtcccagctactcgggaggctgagaaaggagaatcgcttgaaccagggaggtggaggttgtagtgagccaagattgccactgcactccagcctggcgatagaccgagactccgtctcaaaaacaaacaaacaaacaaacaaacaaacaaatttggaaaaattgatgatgtgtcttgattttggccaacattttgccaagctagagaaacaagagtcaggtaatattccattaaataagtttccagagagcttgaatcaagtctcagctaacttgaattcagctgatgtagacctatcagctgacaagactttacaaacttgwaaatgacaaaacatgtcaggtgacttaaccaagagtcataaagaactccttggggagttcaaggtaggccatataaacaagatgactttaaaataaatttaaaattaaaatcattcccttagggatgtatatatgtatgtatgggttagttgaaaatagtttatggggggaaaggcttagttaggaatgtcaaatgttcaaatgcttgatataaaccaaatgtgcatggttttctttcactcatttattcaaaaatattatatactaactataaaagcacattctgccttgctttgcatgtaaaagtatagaatccaaacctagggcagtaatggtgctgcagatgccatagtgatgagacaacactggatattgcttttagttttataagacaccttggagaagagaattaaccatccagactaggccaccagtttcaaggtggcccaagagttgaaaccaagtgttaagaggagattgacgatctgttgaggctgatcatcctgaagggtggaagactaagtggagatgtgaaaaatatctttaaattttttaaaggctattgtctggaagctttcatagactgctgcttggttccttaggtagcagaagttgtaacatcaatagctatgagttataggaaattgggtttcagctaatatcatacagtgtgtcagctcctttaccagaccctaggcatataaagatgagcaggacaagatccccttcctcacagttaatccataaattcatattccatatagagaagtggctccagacacaatgactcttccaacagtgagattcattaggaaattggatgcctcttaacacactgagctcccatctctggaacacaaaagaaagacatttcaggtactgtttgggggactgagactgggctgatggtacctgtgcctagctgtggtgttctggtagccaccaagaaccaggactcctatttaccaggacaagcaaagggggtagcccaaggagagtctgagctgtgttcctggaggaaagcaaaagattaaagccaaaaacgtggccctgagaatcaggtacacaaaagccacagactgtcaacaggagagcaattctcaagtccaaagaagggaagagcagacatagtcaggatgcatggtgtgagcctggggaaaaccatcatttgggaacagcctgggaatgccggccagttagcagcttgttgggagctctctgtgatcaagcaggctttggcttggatcagatgggactggacaagacgctgaatgaccctctgtcaggggtgttagagatgtgacttgtgatagatgtcttccatttgcctctgtagctctgctcaccactcttctctaccctgtgtggatctaggaagttgacctacattgcctgcatccatggaatcctcgccttttggacttagtttggtttagataacagctagagcagtggtttggagtctttgaagaggtccttcacatcccttgttagctgagaacagctagagattaaagagggaggaagacagcagagttaggatccccctgctccctgcttgcctcactatggggtcaccttgggattgctgtttttcttggctgagggtcacagctcctcttaaaatgtccctgtttacatagctttttcttccaggatccagcagccactccctgccctctaccctctaagcctagaaggtggtaacagctccagttaccagctccagggtactgcactatctcttaggggtctcctacatcttgtccatcctatttaaatgcttcttatattatactaatgtgaatgtatcatctgtttcttggttgaaccctggctgatacaggattctggattgagtgagaagatggactagattatttctaagaactcttatacttctagagctctggatttcttgtcactgatcttatatttttgtatacctgagcgatgaggattaaatttctgcacctagaaactcacagcaaatatttttgtagcacataagaagttcatctagagactcatgatttggcttaaccacataatttatatgatttattatttttataagaatttatgttttcagtatgaattgcagttcatagtctcagttgctcacactatctgaagggtcagctaacatctttattggtgtcatgtaaaagacccaaagggcacttaatctggccaaggaactactgtccagactttggtaatttcataaaagagctgaaattaaccttaaatatctttcataaataagctgctcagccatactgtgacactttctgggaagactgaatagttgaggctcctcataatgatgctgttccaaggatacgccagaaccccaagaaaggaatgaggagaccacagggtctgcatgactgtgaaccacatgactgtgaaccacatgacttctgagtctgataagccatagaaggcaaattgtcttctagtgggaagatcatttctatttgactcagaataagagggttttgtttttgcttggtttggttttgaggctatcttacttctaatgtgtcattatcttttagagatacacagtgagatrtttgtgggtgaaatgatatgactgaggtctgctttgcagtgatacagagaaggggaataggtgggagcagagtaaaaacaggattcgcgatgagtggatatgggtgatggagacatgaggcccatactatgctctctatttttgcgtgattttgaaattattgaatatcgagagttacgtgaataaacagttaaataaaaagtgacttcttcctacagggaaactcatttattgttgcttggtgcccatgatgtgatgcagaagctctgtgtgtaggtttcagaaacataataggaaaaaacatactgaaacaaaatgtaaatgaggaatgctattttttgtgaaagtttacccaaaccatgctcaatggaaaatatcaagatattattattcaggatgtacctttacagtatctttcacgtggactttgctgtatggactttgctcctaaataacgtgggctagaggagaaccaggtaggttacatatgaaataaggttggttgtgagttaaaatttcttgagttttggggaaggatatatgggagttcgttatrctatttgttctacttttgtatatgctttaaatttttcatagaattcttttaaaaaataaaacctatactgcacatccaaaacatggccattttacattaggaaagtattaacttttacgattttatgaaatgtaatattatgttatttctctttcgcctccttagattttgtgttttctaatatattgctatttgtccatttcttttgttttcccccaccccttagttttgtctgttgtatggaaccaagctggtgtttcaggagcgggcctggtatttagaacataaatacttgactcccatggccagcacgaggatcaggaatcaggtaaggtccctggggtacagaaaaacactttgtacatcagccctggtctccttgctttcttagaaaacagtcctgccaatcttctatcagtttccactcatggatttttatgcctctgggacttcacatgtatattttcattacctatcatgatcgtattacacttaagagtttaggtgacaagggagtgactcactgtacatgagttttctaacatgaaaaggagaggaaggtatcaaaatgttttccttgtcttggccaaaaaaaaaaaaaaaaaagtgttagtgatttcttttctgcttcttaccaaagcctattaatacattgtttatattaagaagaaagacccggggtatttttatgtcagtggtagccatggggaattcaatacaatagctacggagcacctgaaaaagaaggtgaggccagtattcaccacgaaaatgctactgcaaagaaaaagaatgtgaaacagcatactcatcagtaaaacacatttctgattacatcctttctgcaggagagatgctgaaacacaaacaggtataagactcagtctccacatgaagggagctcatatccaaggacacaaaaccactttaaaaacataaatactggccaggtgcagtggctcatgcctgtaatcccagcactatgggaggctgaggcgggcagatctcctgagctcaggagttcgacaccatcttgggcaacatggtgaaaccctgtctactaaaatacaaaaaaattagctgggcgtggtggcatgtggctgtagtcccagctactcgggaggctgaggcacgagaatcgcttgagccctggagttggaggttgcagtgagcagagattgcgccactgtactccagtttggactacagagtgagactccatctcaaaacaaaacaaaacaacaacagcaaaaaacaacaaaacaaaacacaaatactctcacggggcatggaggttttcgaatgaacttggccataagaataaattcagagttgacagaacagacgtcttaggaataaatgccattcttatgctagaccttgaagagtagaaaattaagagatggtggcccaattgagaggggaaaatgcagttgaaacttcagacagggttgataaagtgaggacgatcatagacatggagtacttagacatattaataaacaataaagactttacctgtctaatggaaaacctggagaagtcgtcaggaaccagactacagtggaccctggagaaccttgaagaacatttttccttttcaggaaaacggaggttacagagaaaagtatatgtaatgatgctacagtaatgtatttctgtataacaaatgactccaaacttacgacttaaaacaaccaccacttattatttgtcttggtccattttttgctgctgtaacagaataccatagactgggtaatttataaagaaaagacatgcattgcttacagttctggaagatggaaagtccaaggtcaaggggcccacgtctggcaaaagcctccatgtagcaccatcccatggaagggaagagcaagagagggtgaaagcgagagagaaggaagggaggggttgaacttatccttttattaggaaacactcctgagatgacagcattaatccattcatgagggcagagctgtcatgtcctattcaccttctaaaagtcatacctctcatcactgttgcattggggattaagttttcaacacataaactttgggggatacattcaagccacagcatcatttctcatgattttgcattctagacagagttcagctattaacagacagtgcttctgctcaatgtggtgtctgctggggctaagggttcacaaagacttcttcattcttatggctggcagctcagctaggatgacaggaacagacgggtaattgtctccttccatgtagcctagtttgggcctattcacagtagggtagtttcagggtggtcgaatgttttatttgatggcttccaggaatgagaaagtagaagatgccagccttcataaaggacaggcccagaactaacagtgttacttccactgaattctatcagtcagaggaagtcacagtgccagcacagattcacagctggaggagagactttaccgcttgatgtgaggagtagcatgtacatgctgggaaggaaagaattgatggcagctatctttgaagactatttcccacaaagagagtgcccactttgggaagatggaagaatactttttaattagaaaaaaaaaaaaaaaacctacataagggaagattttaaatctgtgccaccaggtatttcagtgacacagaattagataaacaatatgcaatatatcagaggaatatttagtgaaggaaatgaactttcatataaaacattgaagtgcttttgtatttatttttctttttctttttttttttttttttggagttggagtcttgctctgtcacccaggctggagtgccgtgtcatgatctcagctcagtgccacctcggcctcccgggctcaagtgattccttgcctcagcttcctgagtagctgggattataggcacccgccaccatgcctgactaatttttgtatttttagtagagacagggtttcgccatgctgtccaggctgatctccaactcctggactcaagtcatccgccagccttggcctcccaaagtgctgggattacaggcgtgatccactgcacccggactgcttttgtattcttacagtgccacatgctttccacacttctcacttattggatcctcttaacagcctgggaaataagcaggcaggagccagccactttggaacaagctttatctgtagggctataggacatctcaaagccttctttgtcacatctctgagctggcaaccctgagtactcatcccatttgctggtgtccccaaaggggagaggatagtagaactggcacaaatccttcctttcccactgccaccatacctctttgcagggatctcaaggctttagagaaatgatttgcagccattcttcacaaaaaatatctgggacccttggtcaattgaaagtgctaaatgagaatgtgcttgcaaagaagattagaggaggctgggctgattggtattactaacaagggtccaggtgttttcacatgatagctctccacatttactgattctttcttcagatgcatctaacattctggttaccccatcctcccagtttttaattccaattgttagaatttttatttttaaaattattattattattattattattattgagacagagtcttgctctgtagcccaggctggagtgcagtggcctgatcttagctcacttcaacctctgcctcccgggtccccattcaagccattctcctgcctcagcctcccaagtacctgggattataggcacgtgccaccacgcctagctaatttttgtatttttagtagagacggggtttcaccatgttgaccaggctggtcttgaactcctgacctcgtgatctgcccccctcagcctctcaaagtgctgggattacaggcaaaaatttgtttttatatcatgcatgtcactttttcgtttcctgttccccaaagatatattcaatattgtattttattttttatacgttgaaacttagctgttttatagtctgtagctaataattccgataccttaaaatctttacaagtctatttatttttgtgtcttgtttcttctgtgtgtctggttgtcttttattgtgtgttggtcatttgttttgagaaataatgtgtaagatgtacatgaagtcctaatcgaaggtaattttcctttgaaaggcctctgaaaacactctcagtttgacacctaccttaaaccaaattcaaggcttgggcttttctggaagactcagatactcacaataagggtagcaatgtttttaccctccccctgtggatatagctctttgacatcccagcttgtcacggtgaggatctgctgtcaaatttcttgcttagtgctgaccctgattttttactattattacctcctgtcacctgcctgaccaccatcaagctgtcagtgaaaattcagattttctggaaatggcaaacaccttcagggaaaatgcaattttctgacttgtttatttctctgggttcccattttcctataaattttggctttattgttttgtcagatcattgatgctttgaagatgttttctgtattttcttcaaatattttggttgttttctgcagaaaagttggaaaaaaaaatctagccccctgttctcagaaatagaaagttgcttcattgttattctatatgaccccacaacaacccggtgaaaaattttcattactcttacacagagatgagaaaactgaggcccaaagtggccaagtaactcactcaaagtaacacagctagcaaaaactcctatctctctgactgcaaacattttcatttattttatctggataaaaatcaccatcagaacaacaaccacatccagcacccagttcttgatttctagcaccgtcctccaataaaaggaaccagggtccttggagaaatagctgattttagggctggccagtgaatgcacaagatgagcctggagcatgttctggtgtcagaaagtaagaaagtccttgaaaaacaaacaaacaaaagcttgtgatgatggcagtatgttccagggacacaggaaggagccaactgagagagctccttcccagtgaccaaggctggaacaatttgagcaacaaaaataatgtaatattgggttataactccaagtatatagtaattaagcccaagtccataatgatatgaataaatgattaagcaaataaataaatgggggaaagacacatcttccttgcagaagaatcccaaataatatttgtaggtattcctccctccaggaggtaaagcttaattccccttctctttagtgtgggttggactttagcaacttgcttttattttaaagaatagattatggaagagagaaatacttattttacaatggagaaacctggtagatcctaaccaagtgattaaggtacatatcaaatgattaaggtacatatcaccagtgataacatcatgttgatagcatgtactctgtggtgtgatatgatgaaaagaacacttccctcttccctgaaacccataacccaaatctaagcgtgagaaaacacatcagacaaaacaaaatggaggaacggtctacaattcaggggtgtctaatcttttggcctccctgggccacattggaagaagagttgtcttgggccccacataaaatacactaacactagtgacagctgacgagctaaaaaaaacaaaaatcacaaaaacatctcataatgttttttaaaaagtttatgaatttgtactgggccacattcaaagttatcctgggcctcatgtggcccatgggctgtggatttgccaagcttgtccataatacctgcctagtacccattaaaactgacgatgcatggaagacgagaaaagactgaagccatcacagagcagaagagactcaggagatatggtaactaaatacaatgcagtatcatgtattgaatcctgggacagaagaacatgagtagaaaaactggtaaaatctgaataaagtctatagttattagtaatgcattaatattggtttcctagtttttacaatgagccatagttatggggaaactgggtgaagggcaaatgagaactcttgttatctttgaaacttttctgtaaatttgaaagtattccaaaataaaaagtttactaaaaaaacaaaaagttagcatagggagatagcaatcagcctaaactgtttctaaataaataaaactttccagaacacccaggacttataccgacgctccagtctgatggaaattagaaatgcatatatatacttaaaaattatctcatttcattctcattaagaccttcaaggaaagtaaggctaatataatccccattcaacaaatgagtaaaactaagaaagagagacattaaatgactgtcgaagattctagctgaacacagaaaccagagctccgaatcccaaatggaggtgggttaagctccaggcatcacccatttgtagtcctccttgttcctttggcacactctagggcactagatgccctgaggagttcatatgcttctccaaagcaggcaaaatccatccacatattcagaaggcagtgcaagtgcccagttgttcaaccgaggccccacaagagaaggagttgggttgaggtttatttttaaaattccaatcccccacagtccttcaaatcagataactaatgcctattcttttgtctggaacttcagtgttgtcagagcaggtccatattcattcttatatcatcctcacaagcaccctttagtgtgaacagctgttactcccctgtaggcacagagaaactgaggttgacttgctgctcagtgagcaaatagtaagctggggcttctatggcagatttcggactccactccactgctgtcctagtgtctccctagctggggaggaggatgagctgctcccccttgctgccctctctgtgagaccttggctcgaaggccagtggtggtgcccccggggctccatcctaacaaggtctctaagtacacaagattcctgtgtcctggccattaagcatttttgcaggggtatgtagagaacaattgtgttccttgttcttggaaaatttagtgtccaggcattatcctgtttcagtcttcattaacccagacatttgtatttattttgcttcagataattatcagcattagtgagtagctatcagctgagactcattttaaggaagaaagcctttcaaaatgacccaacagttaacaattgtatatctccattaaaactgacttcattttgctttttaaaaaataaagcaaagatctcagcttcttaaagtggagaattttaatgcaaatggctatttgactgataatctcttactttattttacaccgtgccttgaagttgactgaagttacagtagccttattttgttccctgaactcctggacacagctgtcctgctctgccagtgcctgcctgcattgggacgtatggaaaagaacaagtacttgtgaacatgtggtcagcccatgctgagaaatcaatgcaggaggaagcttttcagtctacctgtgttgagagaaccacagcccagctgtgggttgcagatcaaaaaaggaccctattcagtgtggtgaaaataatacttagcaaaatgttgaatcaggttctatttcctgccatgagctcaaataatggaatcatgtgagcatgcaggtgatgaaggacccacagggaagtgaggcaggctg

SEQ ID NO: 93687 - DNA, 14434 bp, Homo sapiens
gtttttgtcaggattgttgaagatcagatggttgtaggtgtgtcgtcttatttctgagttctctattttgttccattggtctatgtgtttgtttttatactaataccatgctgttttggtcactgtggctctgtagtatagtttggagttgggtagcatgatgcctccagctttgttgcttctgttaggattgtcttcgctattcgggctattttgttttgttttgttttgttttttggttctgtatgaattttaaaatagtcttttctaattctttgaagaatgtcaatggtagtttaatgggaacagcattgaatctataaattactttgtgcagtatggtcattttcatgatattgattcttcttatctatgagcataaaatgtttttccatttgtttgtttcctctctgatttccttgagcagtggtttgtagttctccttacggaggtccttcacttcccttgttatctgtattcctaggtattttattctttttgtgtcaattgtgaatgggacttcatttatggtttggctctctgcttgcctgttgttggtataaaggaatgctagagatttttgtgcattgattttgtaagttgagactttgctgaagttgcttatcagcttaagaagcttttgggctgagatgatggggttttctaaatataggacatgtcatctgcaaacagggatagtttgccttcctctcttcctatttgaatactctttatttctttctcttgcctgattgtcctggccagaatttccaatactatgttgaataggagtggtgagagaaggcatccttgtcttggtacactttctttttacccataaatctaccttacttctttaacggctgcagaatatcccatgctatgaatgtaccattggtatcaacattaggacagtgactaggaatattttgaaaaaccaaaagttcatctttctcctcttacttactacctcttgtccctacccttgtcctccatatagagctgccttgaacccttcaccttatctctcttgactggttttactctatcccctttcccaaaggagtcatcccccaaaagcatggactttctgactccaacccaaaactcaccttctttcagagtggctggcctgacttattttattccaaaagaaagtaatttgattctaactaattattatatgaattaccaccaactccttaaccctcacatttagaaaggagatgttaactaagttgaactcatcattggaattccagagagcaacaactgatttaaaaaaaaaaacaaaaaaacagaagctgtcaagagcatacaattatgggttgggatcagccatattggctattatctcatgtcagaaaatctaggcacagagagcttcctctaactgatgataattctgggcaatttcttcatttcttctagctaaaagtccaattacttttcaaaagctctaaggttttccacaatactcttagtaaggggcctggaaagagcaggccagctgtctataggtataggccattcataaatgggtatccgtaacatatggacccaccgttctgagactggccacgagtcaattgagaaagagtatgccatcacttgcagatgcccacaagagaacttggacatacagaagagggataactgagttgagactggagttgtgcagaatatatatatatgtgtgtgtgtgtgtgtgtgtgtgtgtgtgtatgtgtgtaactacataatatattaatatatgtacagacataattttaaaagagcacaaatggaaacacatacataacacaaatgcagttacattaatagtgggggccagagggtcttttatcacctactgtcagtgaagggatccaaaatggtcacaagagtcttctcctgccagtttccaggccctatcctgacggcaaacaccaggacggtgtctttaatcagagctggtccaaggcccatcaccctctaatgtgaaagctgtctactttagccaaacttttcaattaggacaggtactcttcttttgaacatccaaggtggagaggaaaaacggctaggtctgaaccctcaggatgtgccagggcagtacaagtgtggatggcatcagatggtagggggcagagagagaaccaggtcagggtggaatggcactgagggccattagggccttttgggggctaggtaagtggcctcagatggtgacagctacatggtcctgggtaagtctgttctggttggtttcatttggatctggagggtcctactacacctggctaatttttctatttttagtagagacggggtttcaccatgctgccgaggctcatattacactcctggactcaagtggtacaccctcctcggcctcccgaagtgctgagattacaagtgtgagccgctgcacccggccatgtgcgtatcttttaaatatacgtaagttatttatgtctagatagccatctgcttcttagaatatgcttagtgtatttgcacatcattttaagcctaccagtagtgttttgtgagtatgtattgtgcacatatgtacacaaatatatatttcatgtggaatatatagttcgtatatgcgtattacatcatgaatttrtttataatagctgttccatgtcttatgcatgaaatctccaagtaaagggcatctaaattcagtacaattagaagtagaataaactgttgcaaataagatctttgaaaatgtcctctgatagacttctgtggctgcttctcaggggaatatacccaggatgtgatggtcaggacgtaaagtatacacataataattttccctaagtactaagaaaataatctccaaaggagtctgcatccttgaagtaaaacatgaacatgcccatatcctcacattgtcactaatgtttggcgtaatccaaatttctaaagttaataaacaaatataaagtgttattttgtgtcacttattaggtcactaatatttctgagttgctgttcacatatttctaacccattaaagtttcctctactttgaattacctcttcatattgtgttcagagtctgcatttcccaagttttttctaggtaatataagagtaccttaaaaaggtattattactgttgtagaaggagtattatgtgtgtcaaaggatcctagtttctttttaatatttattgaatattaaataataaatatttaatatttattaaatcccattttcccttagaacgccacacagtcagctgagaacattatcatttacgtaaacactacgtttcttagcctcccttggaggtcattgcgaccatggaactaaatttgggaaagtgagatgaaggcacgattatttgcctgtgacttccagggtctttccttacaggagggtatcttttgtcctttctactcctctttcattactgcagcttggatgcacttatatttcctggagctccagcagctctatgtgactattagtaaatgagacatgccctaagtaaagctgggggagtgtggagtcccagtggctcatgaggcacagctgccacaccaaacccggatggccaagcctctatcaaattttgtgtgagcaagaagtatactaacttgtttaggtgactgttatttgggagctcttctgccaccttcaattcagcctctttttttcacaaaattattgtttattcaataagaacacatttatcttgaaatacttttttttaaacttttattttaaattcaggggtacatgtgcaggatgtgcaggtttgttacataggtaaacatgtgtcataggagtttgttgtacatattatttcatcacccaggtattaaacctagtatccattagttatttttcctgatgctctccctcctcaccctccatcctctggtaggccccagtgtgcattgttcctttctttgcgtccatatgttctcatcatttagctcccacttataagtaagaacatgtggtataatatttggatttctgttcctgcattagtttgctaaggataatggcctccagctccatccatgtccctgcaaaggtcgtgatcttattcttactttttataactgcatagtatttcgtggtgtatatataccacattttctttatccagtctatcattgatgggcatttagattgattccacatctgtgctattgtgaatagtgctgcaatggacgcatgcatgcatgtgtctttataatagaatgatttacattcctttggttatatacccagtaataagattgcttgggtgaatgttatttatttctctaggtctttgaggaatcatcacactgttttccacaatggttgaactaatttatattcccatcaacagtataaaagtgctcctttttctccataaccttgccagcacctgttatttttggactttttaataatcaccattctgactggtgtgagatagtatctcactgtggtttttaatttgcatttctctactgatcagtgatgttgagctttttttcatatgattgttggctgcatgtatgtcttcttttgaaaagtgtcttttcatgtcctttgcccactttttagtggggttgttttgaatttgtttaaatttcttttttattttattttttcttttcttttctttttttttttgagacggagtctcactcttttgcccaggctggagtgctgtggtgcaatctcggctcackgcaacctccrcctcctgggttcaagcaattcttctgcctcagcctcccgagtagctgggagtacaggcatgcaccaccacgcccagctaatgtttatattttgactagagatgtggtttcatcatgttggccaggctggtcttgaacttctgacctcaggtgatcctcctgccttggcctcccacagtgctgtgattacaggtgtgagccaccatgcccagccaagtttcttacagatgctagatattagacctttgttagatgcatagtttgcaaaacttttctctcattctttaggttgtcygtttactctgctgttagtttcttttgctgtgyrgaaactctttagtttaattagatcccatttgtcaattttggcttttgttgcgattgcttttggcatctttgtcatgaaatctttgcccatgtctatgttccgaatggtattgcctaggctttcttctaggatttttatagtttggggttttacatttaagtctttaattcatcttcagctgatttttttattaggtgtgaggctggagtccagtttcaatttgcacatatggctagccagctttcccagcaccatttattagagaatcctttctccattgcttgtttttgtcaggtttgtcaaatatcggattgctgtgggggtgtagtcttatttctgggttctctattctgttccattggtctatgtgtcttttcttgcaccagtgccatgctgctttggttactgtagacctgtagtatagtttgaagttgaagagcatgatgcctccagatttttctttttgctgagaattgccttggctcttcaggctctctttgggttccacatgaattttaaaatatttttttttctatttctgtgaagaacttccatggtagtttaatgggaatagcattggatcaataaattactttgggcagtatggccattttcataatattgattctccctatacatgagcatggaatgtttttccatttgtatcctctctgatttctttgagcagtggtttgttgttctctttgtaaaggtccttcacttcccttgttacctgaattgccaggtaccttattcttcttgtagcaattgtgagtgggagctcactcatgatctggctctcagctcgattgttgttggtgtatagaaatgctataacaatttttgcacattaattttgtaacttgagactttgctgaagttgcttatcagcttaagaagctttgggggctgggcgcggtgcctcatgcctgtgatcccagcacttctggaggccgaggtgggatgtgtgtgcagtggtgaagggaacggctccttcctcataatggaccctccgcccccagcctgtgcagtgcgggggctgctggcaggcagagtgccgccccaggggccctgggagctgcagggcatattgctgctgagccagaatgagctgtaccgccagatcctgctgctgatgcacctgctgccgcaagacctgctgctgctaaaggtcaggcctcccctacggcccacttggtcctaggccttcccctcttggtggtaggaatggcccatccctgcccatgctctacctctgaaacctcctgggtrgtaggtstggccttgcccggtctttggctaggcccctgcccatgtgcctggctctcctgaggccacatgggtgcctttttctcccagccctgccagtcttcctactgctactgtcaggaggtgctggacmggctcatccaatgcgggctcctggttgctgaggaggtaggcagggcagttggagacaagatccttgcctggagcctggcctcctccagcctcccaccctgagtgccagctgccccaggctcctcctctgcccygtgtgtgctgtgggggtgggcagcccctggccttgcagcggggaagcctagctcgcacctctgctccctgtgccttgggatatrgccacctatgccccggttctgtgtgtgctctctggatagcactggacatgtgtgcctctgaggttctctgcacacctcctgctccccacatttcttggccacagggctactgcccttgagggtgggaattcacttcctctcactctgcaagttggcccagcaggtgctggggcatggctctggccatcctcttgggtctctaggtctgcttttactggtttcacctgcatgtacctggtctgggggtgtagggttgatccctggccagcttgtcagagaacaatggctccgggtccggccagcctgtgacacagggcracggcgaytgagcagaaagctgctgtggaaaccgagtggggattttactgatagtgacagtgatgacttcaaagagaccgagggccagtactccagggtgtgtttcaaaaagctgcccctggagggaggtggtagggaggyggtggggagctgcactcaccccggcctgtcccctccagctcagccagcagtcacactgcccagatttctttcttttcctctgcygcctgctcagcccgctgctcaaggcctttgcacaggctgccgccttcctccgccagggccagctgcccgatactggtgaggcccttgttcccttgcagtcctcgaggcaggctgtgtctgtgctgggtgccaggtctaggtcttctctcttctgcagagtcgggctacacagaccagctgttccagttcctgcaggccaccgcccaggaagaagggatcttcggtgagtctcaaccagtcagcccaggctcctgcaggcagtggtgtttgctggtggctgctgccccctgccagacagtgacaacccaagtctaggaaggtgggctgcagagtacagacagtcttctgtccagtctgagttctatccctcccggggcttctttaaacaagaggagagaagcctgtgcccagtggctccctgtcctccctacctagagccttcacttctctcttctttccagagtgtgcggacccaaagcttgccatcagtgctatctggaccttcagagacctaggggtgagaggagccagtgtcaccatcttctgtccccctgctcccaccccaatagagtggctcagggaaacccagctatgtccccatcactccacagggctggcctgatggtgcctcattaagaccctgggatttacttggtgtcttccagcaacagatgtggtgatgggttggagaaggtgggatggtttcctgcctcttggtctcccaaatcactggctcatctttctaggtggggctgctttgcggcagcatttgcatgcaaacactgaggtctaaggggccagaggtctcaaggcaggtttctgggggacaggcctggcccctgrgccatgcagacacagtccctgtggtgagcgcactcatggcgcatcttccatggcccaggttctgcagcagacgccgagccctgcaggccccaggctccacctrtcccctacttttgccagccwggacaatcaggaaaaactagaacagttcatccggcagttcatttgtagctagaactgtgaggaggagcctgtgctgagacttctcagccccagaacacagctgtgtcctagagccagaagatggagaggaggctgcaaacccttagctgctctataaatataatcattgaggcttgattgtcccttgccatctcttgctttttccctyctttgatgtgataaacaaggggacgagacgagttgtcttttccccagcccagcagcatctttttggcgtatgtgtgtgtatttgctctcttcttccccagtcccacaaaatgccccaacttgttccatgaaacaaagcccaaaagaagacaaacagcacaagccaagctgctgctttgacccgacgcatttattgaagagagctctgtccttctcccttctaccgagaagaggcggcttgcagggctggcacctgyccacacctgccactgggcctttccctgggctaggctgagtgggagcagatgccctcatcctatgtcgggcctgtgcaggagccatcacaccaccttgttgatgatgacacctagttcttcaatctcacactggacttcatcccccttctgcaacagagcaggccatgacggtgtcagcccttccgtcagacacatacacaagcctgtacttctcaagtctgagccaagcctgccaggcctttggggcccttgctctctttgcttttcgctaacctaccttgagaaagacaggaggtttcctgaatacaccgacacctgggggggtcccagttaggatgacatcccctgggtaaaaggtaacaaacctggagcaaagcaaaaggacccagtgagaccaggggctggctgagtggccacagccaaaggtggagggctcaggtcagcctccacatgtgtggcaggtggagcggggctggcaggacagcccttgtcactcactgggagacccaggctatcaggtcctctgtcttgaataccatctggttggtgttgctgctctggacgacttccccattcactcggcagcagatctttaagttgtgtggatctgaaatgcaaagatggaaccttggagttatcccttttccccctcaaaccccccagtgttttacaaacacaactgtaggggcgcttcgtgacttggcaggtgaaagggctttaaagtgcccacattgactcagtgcactatgttagaactttctgtatagacactggccttctcaggcctccctgcatccccaccaagagcaccaggcagtagtcacttgaatgagttgagaggatgttccagactctgaaggagaagagaaaaatggctagggtttttgcctcaagaaagggcatctgtctacagcataggaagatacctgtagatacaaaaatgactcccgggcagggccaagcgtggtggctcacacctgtaatcatagcactttgggagggcaaaacaggtgagaactgattaagctcaggagttcaaaaccagcctgggtaacacagtgagtgcttgtctctatgcaaaataataaaaacattagtcaggcgtggtggtgcgtgcctgtagtcccagctactcaggaggctgaggtgggaggaccgcttgaacccaggaggttgaggcttcagtgagctgggattgggccactgcactctagcctgggtgacacagtaagaccatgccaaaaaaaaaaaaaaaaagactcagaatctataaagcagtgaggcagtggttctagccgggacagagaagcctcgtgtatcagccgctggcaggggatggattactgtaagaacatcctggctaaccagcacttttaactgttggtgttggtcttagtgttctaccacccttaagtagagcagctgaaacacaatttaactttgccgaggactctgtgtgggtgctgtgaggcactagggtctttggtatcctggcatggctggcccatgtggacaccccccacctccaccacagttgtgggtggctgtgtgttaagaggctgygctctgccctctggcacactgcctccaacctggcgctgtcccctcactgtgtgtggtcaatgctgttgtttccacagtggctgggtgagtcacactggctttcatctgtagtgtggaaaatgcctgggccttgcgatagctatgctccatgatgctcaacttagattatttcagatggtggcagccgcaggaagcccgatccacccatcagctcagtgttctttgtaatttacttcacgcatgcagtttcacatcctctgcagttgtgttccctctagggggcttgggaaggaagcccatgggagaactggtggctgaggataaaagactttccctgtatggagtcagcagtcaaagggcagccagggagggcaggtgccacatgtacctgaacccatgctcctccctggagggctgttcatctgtgcaatggtaggtaymagggggcagggaccagggacctacctgctacactgtccttggtcaccaaggcagggcccagagggcagaaggtgtcgaaggtttttcccagcagccactgtttcccattgcgtcttgttagccagtcacgagcactcacgtcatgagccacagtgaagccggccacgtgggccatggcatctgtggcctatgggggcaggggatttggccatacaggaggttagatcacgggtgacaccaacacctgtggcaagggatctcaaagctgttatcccatgttagtagccagagccagccaaaggtgggtgaagggaaaggcagtgtcagggagcaaggaggctgactgcttcctagtgtcagggacagctggcaccatgtgtcggtgagtgaggtcagaactaggagaggcaggagctggggcctctgctgcactctggcctgggagcccaccctttccacctcaccttgatgtgcttgcctttctttccaatgaccacggccagctccacttcccaatctacctcctgtagggtgggagaggaatagtgagccgcagtggcttcggggcccattatctatgctcagaggctgtacgccatggatctctgtcagtatggcttggctgccatcccacgtttgccatcaccctgaaccagagcccagtgaatgacaagggaggtgtgacttgtagacccatacattttgggcagtggcagacagcatcatggaatacaggcacaggtccccacaccactgtgactgcagaagagcaacacgtgtccagggcactgagtttaaaagtcactctggatacttttaacaaaggataaatacgaagtaatatcccctagcaatatgtaaccttactgtgtgtcaggcactgttctaagtgttttaatctattaactcactttagtaagagaaagattgacatgccacaaaggacttgagtaagcaattcacaaaaaggtaacggacatggccacaaaacatgaaaaaatgctcagcctctcccataatccataaaatacactataaaatagatataatttggccttcaaaattggtggctctttctaataataaccagagttggtataagtacacctgacatccagatgttggtctctaataccactccccactaaggagcactgggttccttggtccaagacagacagtacatgatgagcctggaacgtcttggccagaaagcaaatatatgctaaaagcttggggatggaacaaacttgaaggtccctcattggccaaattgaggtcacctgaagaatgtaaatgatggattacaaccaattgaataaaaacaaaaaggaattcacagtgatattgaagacacaggaataaagagggaggcagctttttttctttttttttgagacggagtctcactctgttgcccaggctggagtgcagtggtgcaatctcagctcactgcaagctccgcctcctgggttcacaccattctctcgcctcagcctcccgagtagctgggactacaggcacccgccaccacgcctggctaattttttgtatttttagtagagatggggtttcactgtgttagccaggatggtcttgatctcctgaactcgtgatctgcccgctttggcctcccaaagtgctgagatttcaggtgtgagccaatgtgtctggccaggcttttttcatagaagaatgccagctaacaaaaactgcatgatttagaaaaatcattgttcttggccgggtgcagtggctcatgcccataatcccagcactttgggaggctgaggcaggtggatcacctgaggtgaggagttcaagaccagcctggccaacatggtgaaaccctgtctctactagaaatacaaaaaattagccaggtgtggtggtgcatccctgtaatcccagctactagggaggctgaagcaggaaaattgcttgaacctgggaggcagtggttgcagtgagctaagatggtgccactacattccagcctgggtgacagagactccatcacaaaagaaaagaaaagtcattgctcttcatcccccaatgcaataatgggtccagtaaggatgactacaggatccttggatgagaatctatggggcaataagatagttatgtgatctcaaactaccacatagattgcttgttaattacaaaaatgaaaatgcgtcttcacaatggagggacctagtgaacgtcagctaaaccaagtggtcaaattctgggaccactgacatgagcctcccagtcagatgcaatgggaaatgtataacatctttgtagatctcttgataaaaatgcttaccctgacactaatcatgaagaaacaaccagacaaacccaggatgtgaaacatgctatgagacaactggattcttcaaggaaagggcaggggggattgtttgaggtcaggagttggcaaactatggccagctcactgtctgctataatcaactttgattggaaacccatcattcatttctgtatcgtccctggtggttttcacactataacagcagagttgaattgttgcaaaacagaccatatgacactcaaagcgtaatatttactaattggctcttgatatggtttagctctgtgtccccacccaaatctcaacttgtagcacccataattctaatgtgctatgggagggacccggtgggagatgactgaatcatgggggcaggtctttcccgtgctgttctcatgatagtgaatgggtctcacgagatctgataattttaaaaacgggagtttctctgcacaagctcttttctgcctgctgctatccacctaagatgtgacttgctcctccttgccttctgccatgattgtgaggcttctctagccacgtggaactgtaagtccaattaaacctttttcttttgtaaattgcccagtctcggatatgtctttattagcagcaagaaaacagactaatacagccctttaagaaaaagtctatggaaccctgttctagttaaaactactaaagagatataactgaatacagtgtgtgcccttggttgatcacagagcaacaaagtaaccaaattaaaagtcatctttggggcaactggatttcatattaaatatcattcaagttaattttcttggctgtgataatggtatggtcatgcaagccattgtccttataaagtgtctatttcagttttatgacaatatttgcaatgtgtcaccccaacccctgccaaaaaaaaaatgtgtgtttgccatgtgaagggcagggagagggcaagggagagaaagcaaatacagcaaatgtctacagtgaaaccaggtgaaaagtatatgagcattcactgtattatttcagcttttctataattcccaagacatttctaaaataaaaatttgcgaggaaaagtaaccagtgttagtaagggtatatacactaacgatggatgtgtaagttgctcttacaatttgcttaaaggacaattgggagattttctcaagggttttgaaatactgcctgtagtttgataatattcaaatcctaagagttcattcaaaggaaataataaggccgggtgtggtgactcacacctgtaatcccagcactttgggaggctgaggcaggcagatcacaaggccaagagactgagaccatcctggccaacatggtaaaaccccatctctactaaaaatacaaaaattaggtgggcgtggtggcatgcgcctgtagtcccagctactcgggaggctgaggcaggagaatcacttgaacccaggaggcggaggttgcagtgaaccaagatt

SEQ ID NO: 93688 - DNA, 16715 bp, Homo sapiens
tcagctcatctgagccagagggaagagatcctcgcggcctgagcctagaatcaggggcacgggtggttggaggagccagtagaaaggatgatctggctgggagggcaagagagcccctatctggggaggctccctggaggagctgttttcaccgagccctgaaggatgactgggaattaagcaggaggcagggggcagagagtacagctgtccaactgaagacagcctggtgcgattgagactcccagtgacttgagtagtgagcgccctctctcaggacctgtcttcacatccacaggacagctgtgtgggatggaagcgttgccggtccaggcttggctggggctccaggacaaagtcacaccaagactgagagccccatgagttatgtttttttgggtttttttctttttgtgatggagtctcactctgtcacccaggctggagtgcagtgacccaatcttagctcactgcaaaactctgcctcccgggttcaagtgattctcccgcctcagcttccagagtagctgggattacaggtgtgcaccaccacacccggctaatttttgtatttttagcagagacgaggtttcaccatgttggccaggctggtctcaaactcctgacctcaggtgatctgctcacctcggcctcccaaagtgctggaattatgagtgtgagccactatacccaacttctatgagttatgttttaatcagtcacagacaatgcccccagcgaggacatgaacagagaacagactcaggtcatcccttctggaaatggcttgcctgggagaccgcagtccctggcccagccctggccagtcgatcctccccactggcctgggcctggctgggaactgagacggtgaaagtctggggcagcatgaaacggcctcctggaaattatttctagaacagggaagtcgtgatacctgaaggtgaaacgtgggctctgtcacctctgtacccagcttgggagtgacagagtttaaggacatcctctgtcaaagacatccttccacatcctttctcttctgcattccaggaaacttacctggctccttggacttctacactgccctgcaggagtgggcggggaaagggagtggctttgaggcacacagaagggcttggtgaggccaccagagtggggcctgtgcctagtgtgtcagaagagagcatctcaggacgggtgtgggggctcccgcctgtaatcccagcactttgggaggctgaggtgggctgatcacttgaggtcaggagttcgagaccagcctggccaacatggtgaatccccatctctagtaaaaatacaaaaattaggtgggcatggtggcgggtacttgtaatccctgctcctgaggctgagacaggtgaatctcttgaacccaggaggcagaggctacagtgagccaagatcatgccactgcacgccaacctgcactccagcctgggcaacagagcaaggctatctcaaaaaagaaaagagagcatctcaaaccacacatcaacatggtaacccctctgcttgaagcctccaatggctccctattgccctggtgctgaacaccccatggctgaccgtggcctggcctctgcgacagctctgcctcttctcccatggtgaagacccagcctgctgagactccccccagttcctccaacgtgcctggacctctgctccttcggggcctttgcataggttgttccctctacccagaatgcttttccctccccgttttgtttagaaggccacagttttaattgttagttcccttataaggctcgcgtattgtcggtgactcaccctccagctccttgcaggagtgcttggcctggcacttagtaagtgcttaggaaatatttgtggttctgtgttttttttgtgagacagagtcttgctctgttgcccaggctggagtgcagtggcttgatctcagctcactgcagcctttgcctcctgggttcaagtgattctcatgcctcagcctcctgagtacctgggattacaggcatgcaccaccatgcccggctaattttttttttttttttttttagtagacatggggtttcaccatgttgcccaggctggtcttgaactcctgacctcaggtgatccgcctgcctcggcctcccaaagtgctgggattacaggtgtgagccactgtgcctggccttcaggaaatatttgctgatgaactaagtgggaggtgggatctggtgggaaggaaggcgggaaggtggaaattctgctcacttccccattcccacctcccaaggaacccctggtgtccctatggaacccactttgggaaccagtggttcaggtcagccttttccctttgtgctcaaagccgcattgcattgaggccaccggtaggaccagggtcatgacctaggcctccaaatccctgcaccctttccaattctacagcagggattagaggagacacacaatttgctttcagaggatgtcccagctccaggacaggacacactgggtcacctgatggcaggtgcagtggttggacagagcctggcttcagctccaggtatacttcctccttcctgctgctacctggtctggcctcttccacgtcctgagaatccagctggtactctgtcctcagcctcctggggaggtgctctcatcctgggcatgctgcccccgccatccagggagagagtcttggggcacctttatccccaacccagaaatcacgggagacctcgtaggaaaggcgtcctggctccgtttgttcccacctcagcgccggtcctgtctgctgtgattcaggatgcagctggatgggcacagaatccccggagaagggtctgcaggctgtgcagtggcctggaatttggccagcaggccctagtcgcaggcaggggtctttctgggtgctgcatgtagtgggatggaggaggggatggaaggttctggctgattcgccaaaccaggaggaactgggcatgctttttttgggggggacggagtctcactctgtcacccaggttggagtacagtggcgccatcttggctcactgcaacctccacctccctgattcaagcaattctctggcctcagcttcctgagtagctgggattacaggtgcccaccaccatgcctggctaatttttttttttatttttagtaaagacggggtttcaccatgttggccaggctggtcttgaactcctgacctcaggtggtccacccgcctcagcctcccaaagtgctgggattacaggcatgagccactgtgtccagcccaggcattctttttctagaaaaaaatatcttgggttcaacttgggtgggacctcagccctgaccacccctgaattacccattttccccaatctacccttctttttttttttttttttttttttttttttaaaattgagatgtcgtctcgctctgttgcccaggctcctgtgcagtggtgtgatctcagctcactgcaacctccacctcccaagttcaagcaattctctgtccttggcctcccaaagtgctaggattacaggtgtgacccaccacacctggccccaatctacccttctatacctcgttaaaatatacttcactgtctcctaagaggggctgccatgaacccagggcccatgtaattccatcttaatatcaattactttataaaaattaacctgtgcctggctgggcgcagtggctcacacctgtaatcctagcactttgggaggccgaggcgggcggatcatgaggtcaggagatcaagagcatcctggctaacacggtgaaatcccgtctctactaaaatacaaaaaattagccgggccctgtagtcccagctactcgggaggctgaggcaggagaatggcgtgaacccaggaggcggagcttgcagtgagccaagatagtgccactgcactccagcctgggcaacagagcgagactccgtcttaaaaataaaaattaacctgtgcctgaggctctagagtccaatggtacaaagcagtaattggtcaaagttcaacctccctcccactctgggctcggactgtgccctgagggcttgtgttttgaatctctttccagaaccttggcatgagcttgggactgggtgtctggatcacttcatcacacccaggtcacctgctgcaaggttaagaccaacttggcccaacagagaaagctggcaaccctacatcattttaaaacagcttcatcggctgggcgtggtggcttatgcctgtaatcccagcactttgggaggccaaggcgggtggatcactttaggtcaggagttcgagaccagcctggctaacgtggtgaaaccccgtctctactaaaaatacaaaaattagctgggcattgtggtgtgtgtctgtaatcccagctacttgagaggctaaggcaggagaatcacttgaacgcagaggtggaggttgcagtgaactgagattgtgccactgcactccagcctgggcaacagagcaagactcagtctcaaaaataaataaacggtttcatcaggatgtaattcacataccatacagtgagccaacttaaggtgtacaagtaaataagtcaatggtttttggtgtgttacctttttttttttttgagacggagtctcactctgtcgcccaggctggagtgcagtggtgctatctcagctcactgcaagctccgcctcccgggttcacaccattctcctgcctcagcctctcaagtagctgggactacaggcgcccgccaccacgcctggctaatttctttttgtatttttagtagaggtggggtttcaccatgttagtcaggatggtctcaatctcctgacctggtgatccgcccgccttggcctcccaaagtgctgggattacaggtgtgagccaccgcgcccagccaccttatttttaaattgtaattccatatatccatacatatatgtataacataaacttcaccatttaggctttttttttttttttatgagagagagttttgctcttgttgctcactgcagcctctgcctcctgggttgaagtgagtcttctgcctcagcctcttgagtagctgggattacaggtgtgcaccaccatgcccagctaatttttatatttttagtagagacggggtttcaccatgttggccaggcttgtctcgaactcctgacctcaggtgatcctcccgcctcagcctcccaaagtgctgggatgacaggcgtgagccaccgcacctggcgcatttaggcatttttaagcatacaattcagtggcatcgcgtgcagtgttgtgcaaccatcactccagcatctttccaaaactttcatcaccccaaacagaaactctggacccgttaaacaaacattctcccctctccagcctccagtcacctctgttctacttcctgtctctgtggatcggctcgtcctggacatttcccagaaatgggatcacacactgtgtggcattttgtgtctggcttctgtcattgaatgtgatgtcctcagccttcatccacgctgtggcctgtgtgggagcctcgctccttttcttttttttgagacagagtcttgccctgttgcccaggctggagtgcagtggcgcaatcttggttcactataagctctgcctcccgggttcaagcaattctcctgcctcagcctcccaagtagctgggattacaggcatgtgccaccatgccggctcttttttttatatctttagtagagacaggttttctctttttttttgagacggagcctcactctgtcacccaggctggagtgcagtggcacaatctcggcccactgccagttccgcctcctgggttcacaccattctcctgcctcagcttcccaagtagctgggactactggcgcccaccaccatgcccagctaatttttttgtattttccatagagactgggtttcaccgtgttagccaggatggtcttgatctcctgacctcgtgatctacctgcctcggcctcccaaagtgctgggattacagacatgagccacctcgcccagccttttcatggctgagtgatattccattgtgtggatggatcacactaggtatatttgttcttctattgatggacatctgggtagtttctacctttgggctgtttgttctgttgtgagtcaggctgctgtgaccatgggtgtacaagtatctgtttgcgtccttttgttgttaattctttggggcttctacctaggagggagattgctggtgatgtgataagtatctctcaggcttttcaaggaagcaccaaactgttttctaccccgaatgtaatttacaatttcccagcaataggccaggcacagtggctcacggtgactccatctcaaaaaataataataattttaaaaagaaagaaagaaagaaaacttcccagcaaccacattaaaaaagaataccaggaaatttaatgtttttctttttctttttttttttttttttttttgagatggagtttagcttttgttgtccaagctggagtgcagtggcgcaatctcagctcactgcaacccccgcctcccgggttcaagcaattctgcctcagcctcccgagtagctgggattataggcatgtgccagcacctggctaattttttgtatttttagtagaaacagggtttcgccatgttagccaggctggcctcgaactcctgacctcaggtgatccacccaatattgctggtattacagacgtgaggcaccacatccggccaatttaattttaatgatatattttatttcacccaatacatccaaagcgttatttcaatatgtaattaatgtagaaaatcattaatgagctacttcacatcctttctttcatactaagaaataacaatcgtatggaaatttgacaccataagcacctctctttttaggcactaaattttgggtagcaatggtgacatggtttctaccaaaacaatactgttgtgtttggtgggaaaaaaaaatttatttaggccgggtgtggtggctcacacctgtaatcccagcactttgggaggccgaggcaggtggatcatttgaggccaggagttcaagaccagtctgaccaacatagtgaaaccctgtctctactaaaaatacaaaaattagccgggcatggtggtacccacctgtcatcccagctactcaggaggctgagggacaagaatcacttgaatctgggaggcagaggttgcagtgagccaagtctcaaaagtaaatttaaaaaaaaaaaaaaaaaaaaaaggctgggcatggtggctcacacctgtaatcccagcactttgggaggcccaggcaggcggatcacgaggtcagatggagactatcctggctaacatggtgaaaccccatctctactaaaaacaaaaaaaaattagccgggcatggtagcgggcacctgtagtcccagctacttgggaggctgaggcaggagaatggcatgaacccgggaggtggagcttgcagtgagccgagatcatgccactgcactctagcctgggcgacagagggagactccgtctaaaaaaaaaaaaattagctgggcatggtggcgcttgcctgtaatcccagctcttctggaggctgaggtgggaggatcatttgaacctgggaggttgaggcttcagtaagctgagatcatgctactgcactccagcctgggtgacagaggaagatgctgtgttataaatttattattgttattatttgagacagagtctcattctgtcacccaggctggcgttcagtggtgtgatctccgctcatttcaagtgattttcctgcctcagcctcccaagtagctgggattacaggcaccaccaccacatycggctaatttttgtattttttagtagagacagagtcttgccatgttggccaggctggtcttgaactcctgacctcaggtgatctgcccgccttggcctcccaaaatgctgggattacaggcatgagccctcacgcctggcctataaaattttttttaaatatgctgttcagtttttagatgtacatttaaaactgtaaacagtccaccctggcatccaagcctcacctcacccatcacaaagcatggttcgggttccctcctcctcctccggtcgccctcttagcctctttgaaggtttttcttctcaggcttcccagacccagtgcctacactctgagggccctgggctccctccagttccgtgctgggtgtctccagaacaagcggggttccatgtcttccctgaaagcctgctcctccctggggccccagrtccccccactccctgcctggtcagcccctgcctctcctgagtcttcacacctgcccattctccctcctatcctccccacctctccccagcctcagcctctcccccaggacggggacagtgtgtctgagggccagaggggttaactttgagtgtctgttgattgaaagaccaagtgaatagaaaatcaagcctaaactggaagccctgagcacttccttttctttgtctgcaaactgctcaggtgtctcaccccgccaggctttggcactggctctttcctcatccaacggacaccctttccctcaactcctaccttatctggagaactcttatgttacctgcaamacctaatcccatygtacccttccctgtcagagttataaattcaatcctcaactcaggggtactgggggcatttatgacaagctgtgtcataaattataacagcttctctcaggacacgtggccaggaagtgggtgatcttccttaatgaccctcactcctctctcctstcttcccagmtactctgacccatggatcccctgggcccagccaagccacagtggctgtggcgccgctgtctggccgggctgctgtttcagctgctggtggctgtgtgtttcttctcctacctgcgtgtgtcccgagacgatgccactggatcccctaggccagggcttatggcagtggaacctgtcaccggrgctcccaatgggtcccgctgccaggacagcatggcgacccctgcccaccccaccctactgatcctgctgtggacgtggccttttaacacacccgtggctctgccccrctgctcagagatggtgcccggcgcggccgactgcaacatcactgccgactccagtgtgtacccacaggcagacgcggtcatcgtgcaccactgggatatcatgtacaaccccagtgccaacctcccgccccccaccaggccgcargggcagcgctggatctggttcagcatggagtcccccagcaactgccggcacctggaagccctggacggatacttcaatctcaccatgtcctaccgcagcgactccracatcttcacrccctayggctggctggagcygtggtccggccagcctgcccacycaccgctcaacctctcggccaagaccgagctggtggcctgggcggtgtccaactggaagccggactcggccagggtgcgctactaccagagcctgcaggcycatctcaaggtggacgtgtacggacgctcccacaagcccctgcccmagggraccatgatggagacgctgtcccggtacaagttctatctggccttcgagaactccttgcaccccgactacatcaccgagaagctgtggaggaacgccctggaggcctgggccgtgcccgtggtgctgggccccagcagaagcaactacgagaggttcctgccrcccgacgccttcatccacgtggaygacttccagagccccaaggacctggcccggtacctgcaggagctggacaaggaccacgcccgctacctgagctactttcrctggcgggagaygctgcggcctcgctccttcagctgggcactggctttctgcaaggcctgctggaarctgcagcaggaatcyaggtaccagacggtgcgcagcatagcggcttggttcacctgagaggccggcatggggcctgggctgccrggrcctcactttcccagggcctcacctacctagggyctcactagtcgggggatttacctacctggggcctcggctgcctggggyctcggctgcctggggyctcacctgcctggggcctcacctgctggagtctttggtggccaggcatgtgacttacmtgggatttcacttgccgggcttcactgccaggagcctcccctgctggggaccttgccagctggggctggggatggtgcctactggggaccttgctttctggaggctgcacctactgaggatctcggctgttggggactttacctgctgggacctgctcccagagaccttgccacactgaatgtcacctgctaggagcctcacccgctgggaggcacagggcccaagggagctggatgtgttgcccaaggtgtgcagggcaggtcagggaagggcagggtcccctaaggaggagggcgaagggtatgtgtgtgaccatcagcagtggtgtgcacatggctgggggacactcggtttgaccgccagcggatgggtgtcacaaatgcatcactrtgggtgtgacctcggcgtgactctgatagtgcctgtggatgtgttgcgatgcctcaccctggagggcactgggccctgagaacgggtgcccttgaggccctgcccccgggcgatggtgcaggctggtttgcttgtggttttattgctgttgttaaccacccatgaggggtgcaaacagataatgctgttaacattttcaggcgagaatgcttcaaggaaagctcctgtgtcccccctcactctagaacagtggttctcacgcagggcgattctgtccccaagggcacttggcaatgtctggagacattttcagttgtcacaaccaggggaggaggatgaggtcacctagtgggtagaggccagggttactccaaaccccctacaatgcacgagtcggggcccttacaaccaacaatgatggttccaaatgtccaggggcagaaaaccctgttctagaactttctatgaccctggaggtcaagcctcttgggggaggcgttcagatccctcgggggtcctctccttcagctggctccctggggtgggctctggcacccacccagaagtgaaagtcttttttctgaaggtctcaggtcaagaactccaaagtcaggcaagccctgcatagagccctgctccatgacttaggggctgcaggtggtttctgactgtaaatgaggatgtccagaatattccagaacattctggaacattctggccttgggggaaattgctgctctctggagaatgccaaggggaacctggtggtggaaggtggtagtgaattccaggtgctctctgagcctcaatctccccatttgcacagtggacatgcaggctctgagggctgaggagtggggcccacgctctccaggagtgaaggtgggcagggctgggataaagggaccctctctgcccagggtacggggtccaggggagctggatgtgttgcccaaggtgtgcagggcaggtcagggaagggcagggtcccctaaggaggagggcaaagggtatgtgtgtgaccgtcagcagtggtgtgcacttggctgggggacactcggtgtgaccgccagcgggtgggtgtcaccaacgcatcactgtggctgtgacctcagcgtgactctgatagtgcctgcagatgtgtctcgatgcctgcctgtggctctatgtgggtgctcgtaggtggcggtgattgtgagtgtgagacggaatgtgtggcctgggagtgaggctttgagtgttggacggagcagcggcccctctgagtgtgctgggctctccaagtctgtgtgtgtctctgtgtaactgcgcaaggctgtgtctgcatggacctgtgtccttgggtgtggtgaagtgggctgtgtggggacacatgtgggactcttaagctgtgtctgcaagtggctgtgaccgtgtgtgtggccttgtggatgggcagggagaggtgggcttcttaaaagtattacaggaggggaaactgaggcccacagagggccagggacccaggccaaacattcctccctgcaggggggtacgcagagaccctgcgggggtggtgggaggatcagcatgacctcagcctcctgaagaaggtgccggcagtggctccactctgtagaggaggtggctgatgcccagagaagttgaggaactcacccaaggccacacagctgccagaggcgaaagtcggttttctgaagatctcaggtcaagaactccaaaatctggcaagccctgcatagagccctgctccaccacttaggggctgcaggtggcttctgactgtaaatgaggacgtctggaacattccagaacattctggaacattctgggcttgggggaaattgctgctctctggagaatgccatgggggacctggtggtggagggtggtggtgactccccggtgctatctgagcctcactttccccatctgcacagtggacatgcctcagaggtgcctgtgatggctcccccaggcccaggtgggagggtggaggggcatagggtggggaaggtgtgaggggactggagagtctctgtcaaacccccttgtgactccgggcctgagccagcctcgatgggcccatcactcacctgccacccacaccacacacctgggcccctctctccactgcctggctgcaagtcaggggtcccaggaggggatcaggggctcacgggaggccaggccaggtcttcctaacagggtggtgtggggccagtccgctgggggtaaggagttggagtggggacaggctgctctgtcccctgacgcccctggagcccccatggtctccgcctctacctgagctgatgtcagagtgaacagctccctttcccaacttctctttctctccctctggaatttcctctgagacttagagggacatggaaaccctccttgggtcccacaagggcagaggcccagccacctggccaacgttgggggaccctggcctgcccactctggaaccccaggatggctcccaacccccattgcctccctgtatgccccggatctcacatgtggttcatggcgcacccagctcagcccgtggggccttctccctccttctgagcggcagctgcccttggctcccagccctgggccccagggggagaaaaatttccagcaggctggcagctgctccatcacccacccagcccaggctgagggaggagctggggggtctgatgagggcagagaccccaacgaggaggtcctcgtgatcccccaatctgggctctgggctcagctgtttgacagggagacctcacctggcactagcctgatgagccctgctcagagagggccagggaatctctcaggtcacacagcaatttcaagataagcacacactgtctctggcaattcgccgcagctcctcttccagatctcagtggctggaggctagtccagttgtggatctgatggccaaggggcctgggttgcaatcccaatccccacccgcagccctcccaactcctggctacatgaacaaggtggactggggttggatgttacaggaggagggaaccagttcaaaggacacaagaagtgattcagggtgagggccaatcagatgtgggccgtgagctgccagggcggatcttggggacagggcaggggctccatgggtgacagtgccagtgcggtaatgaccacatttgagtggggtggggtgacctcaccaggaatctgtcttctgccctgctctgtcaaaaggagcatgtggccgggcacggtggctcatacctgtaatcccagcactttggaaggctgaggtgggcagatcacttgaggtcaggagtttgagaccagcctgaccaacatggagaaactccgtgtctactaaaattacaaaaattagccggacgtggtggcatgtgcctgtagtcccagctccttggggggctgaggcaggaggatcacttgaacctgggaggcagagattgcagtgagctgagactgggcgacggcactccaacagtgcgagactctgtctcaaaaaaaaaaaaaaagcatgggattcatttccagtccctgtagagggacaggacacgcaggaaagggcagatgtggccaaattgaccacgattccttaatgacccaataaagtaggccgggcgcagtggctcacgcctgtaatcccagcactttggaaggccaaggcggatggatcacgaggtcaggagatggagaccatcctggctaacacggtgaaaccccgtctctattacaaaaaaatacaaaaaattagccaggtgtggtggcgggcgcctgtagtcccagctacttgggaggctgaggcaggagaatggcgtgatcccgggagacggagcttgcagtgagccaagatcgtgccactgcactccagcctgggcgacagagcaaaactgtctcaaaaaaaaaaaaaaaaaaaatgacccaagaaagcatttaccaacctctactttcttgctgttggggcttaggcagagtctggcctcaggtgtgattggagctcagcctggagtgtggacttggcccccattgccattgcctgaggcaggaggagcaccattgcctcagccagcccagcctcccattgcctggtgatcacaactgtggaatgggcagagtcctgtggccctccgctagagacctaccctcgggtttctcactccagcttccctcatctcttgctcttctaggttttctgtcctcacgaggctgccagcccagcaggggaaagaagggacacagtgtggcctgagctaggacaggggagacagaggcagttgcaggagccagtggaaggaattgatctggctggaagagggccgctatctgtggaggcttcctaggggagctgtctgcacctaagccctgaagaacgggaactaggcaggaggcagggggcagagagcgcagttgtccagctggagacagcctgctaccttggaaactccaagtgactcagcaatgaacaccctctctcaggacctgtcttcacatccacaggacagctgtgtggggcggaagccttgcccatccgggcttggctggggctccactctcggaggcatgtgaaccagagcaactccatcttgaataggagctgggtaaaatgaggctcagacccactgggctgaattcccaggtggttaagtcattctaagtcacaggatgagacaggaggtcggcgcaagatacaggtcataaagcccttggtggtaaaacaggttgcagttgagaagccggtgaaagcccacccaaaccaagatggcgatgagagtgacctcagggcatcctcaaagcccacccaaaccaagatggcgatgagagtgacctcagggcatcctcaaagcccacccaaaccaagatggtgatgagagtgacctcagggcatcctcaaagcccacccaaaccaagatggtgatgagagtgacctcagggcatcctcactgccacactcccagcagcaccaggacagtttacagatgccatggcaacatcaggaagttaccctatgtggtctaaaaaggggaggcatgagtaatctccccgttgtttagcatatcatcaagaaataaccagctgggcacggtggttcaggccaggtgtggttgctcactcctgtaattccagcactttgggaagccaaggtgggtggattacctgaggtcaggagttcgagaccagcctggccaacatggtgaaaccccatctctactaaaaatacaaaaattagctgggcgaggtggcgcacgcctgtagtcccagctactcaggagtctgaggcacgagaatcgcttcaacccaggaggtggaggttgcagtgagctgagatcctaccactgcactccagccagcctgggcgatagagtgagactccgtctcaaaaaaagaaaaaaagaaataaccataaacgggcaaccagcggccctcagggctactctatggagtagccattcttttattcctttactttcctaataaacttgctttcactttactctagggactagccctgaattgtttcttacgtgagatcccagaaccctctcttggggtctgattggaacccctttcctctaacaccaggacaaagtgataccaagactgataaccccacaagttgttttaatcagtcacagagaatgcccccagcgaggacatgagcagagagcagacttaggtcaccccttctggaaatggcctgcctgggagactccagtccctggcccagccctgtcccctcaatcttccccactgtcttgggcctggctgggcactgagatggtggaaccccaggcagcgtgaagcagcctcctggaaatgatttctagaacagggaagacatcatacatggaggctggaccttagattcggtcgcccctgcacccagtttgggactgacagagttgaaggccatcctgtctcaaggacagccttccagatcatttctcttctccattccaggaagcttatctggctccctggacttctcctgtgatttacaggagagggtggggaaagggagggcttttgttttttgttttgttttgtttttgtgagacggagtcttgctctgtctcccaggctagagtgcagtggcgcaatcttggctcactacaacccccgcctcccggtctcaagtgattctcctgtcttagcctcccaagtagctggaattacaggttcctgctaccgca

SEQ ID NO: 93689 - DNA, 33313 bp, Homo sapiens
ttgagtagaacatgtggaaaacatacaaagacagaaagaaaaagcaactgtaattggatcctagtttctcatcatcactaaaattttacatatcctgaccttctgattttagacattctggtgtttgggtagtagtactgaattgtgatataattttcaattgaatttatttaaaatagcatgagctgggcacagtggctcatgcctgtaattccagcactttgggaggctgaggcaagcagatcacttgaggccaagggttcaagaccagcctggccaatatggtgaaaccccgtctctaccccaatacaaaaaaattagccacgtgtggtggtgcgcacctgtaatcccagctacccaggaggctgaggaaggagaattgcttgaacccagaaggcggaggttgcagtgagccaagattgcaccacttcactccagcctgggcaacagagtgaaactgtgtctaaaaaaatgaataaatacataaataaaatagcttatttaattacttgatttgatttatttctctggtaattactgatgttggcatcttcatgtatttattggtcagatcatcatttatgaagtacctgttcaggtctcttgcccacttttctatttggctatcagtctttttctcatagatttgtaggagttctttatataatctggatacaaattttttaacaactgctatgttacaactatcttctttcaccttgtagcttgcctggtggcaggtagttgaatcatgagggtgggttttccccatgctgttcttgtgatagtgaatatgtctcatgagatctggtgattttataaagggcagttcccctgcacatgctctcttgcctgctgccatgtatgatgtgcctttgctcccctttaccttctgccatgattgtgaggcctccccagcaatgtggaactgtgagtccattaaatctctttttctttataaatttcccagtctcagttaattcttcttagcagtatgaaaatggatgaatgcaatcccattcgacaagtggttcccacatccttcccccattcccacccacagtgacacatctcatcccaagagatgagtatggctaacacaggggtagaggctttggtgtatctttttccatacagttgttgatggacaaaacattttttacaaagacaggatcacaccaaacacatcattttgtaatatgctgtttcgctcactatatgatcagttattcagtgtcctaacatatgtacaaaacattatttattaatttgagaaatccttaaagtgtgttgggactatcataggtctacttttctatgtttttgaagggttcaattatcacatatgatagacccagaaacttgcacaggragcccccatttaaaaattgactgcgctcaaagtatactttcagtcttttgaaacttgaaagatattttcccaaaaaacaatgctgaaatgagtactaggttctcaagattagagtaatatctacaatgaactcacaaggtagctgaaacaccaggcactccaaatgaatcataagtaaaaagataacgctactgcaaaactagctattaaatgaaacagattattgtatttacttgaatgtctgtgccttaaaacaaactgccaatttagctggagaaaatggtaaatgaagttgaaaactaccatggaattttgaaagaaacttttatttttttgttttgttttgttttgttttgtttttattattattacactttaagttttagggtacatgtgcacaatgtgcagatttgttacatatgtatacatgtgccatgttggtgtgctgcacccattaactcgtcatttaacattaggtatatctcctagtgctatccctccgcccccgctaccccacaacagtccctggagtgtgatgttcctcttcctgtgtccatgtgttctcattgttcaattcccacctatgagtgagaacatgcggtgtttggttttttgtccttgcgatagttggctaagaatgatggtttccagcttcatctacgtccctacaaaggacatgaactcatcattttttatggctgcatagtattccacggtgtatatgtgccacattttcttaatccagtctatcgttgttggacatttggggtctatttttcaaagctccaaaaactgatattagtgtgttatgggttgaattgagtccccctcaaaaatgttgaagtcttaactcccagtgctcgtgaacgtgactttatttggaaatatgatatttgcagaggagatcattagggtgagccttaatccaatatgactgatatccttataaaagggggaaatttggacacagacacacacaatgaagacagagattggggtggtgcctgcaaaccaccagaagctgggaaagaagcatgaaacagattctccctcacagctcgagaagaagcccatactgcaccttgatcttggacttttacttatcagagctgtgaaacaagaagtttctgtagcttaagccacccaatttgtacagaaaccctgggaaactaatgcaatgtgattcttcattatttctaactttgtgtcaatcatgtctcaggatttctctcttccttaatacaaatgtgccacatccccatgccaacagccatcagccatggctggagtggagccagggtcagcaaatggaaggatgagtaggagaatatgaaagaaaggagatagtagaaagtgagagagaaaaagacttgttccatctttccctgggtgactggacaagaattagacaagaaaagagaaagggagaattaaagccaatgagcattgcaaagtaagaaaaatggcttgagagacatgtaattatgtgaattgcggatggtcaaaaacagaaggaaaaaaatttaaacgacaagggagcacaagccaggagaatgctgagccagtttcctggataataagcgagatccatgaagttacaaaggagtcagagtttgcccacctagtacctcaccacctgcaggaaagagctcatctgctctcttgtggacttggtcaaaggatctgtgtgactgaggcaagtgttacaacgcttgcccgaagcagttgcagctgtaggacatagcacccagaaggaatggctatgtcccggggggagacctttgctcccgctgctcctcaaagccagcctgctggaacacaggcaccttccactttgtgccagtggcacaaagcagcttggctacttttcccaattgaaaaccatgatcagatccctcacaaaactcttccaggaggcaatagtgactttggtctttctagcgggacagaggctgccgtgtagacattcccctaactccaaagaaggcacactttacctggttctcagaaacagctcagaaagttccagaggtacatgaatcacaaatcagggaaaaatccatgtggatggattatgtataaaccagggcagggactagggtgaggtaagggcatagcattgaaggaggcattcattctcttgcacggccctggagcgagtgtctccttacattttgcaccttagttccctcattcaagtcccagtcctggtgaaaactaaagtttttgtttcattcatttgtttattcattcagtaagtatattaatccagttgaatgggtacatggtacaggtggtcttagagataggccccaatcgacacactgggagggtagttaatttcctcattcaagtaaaaacagaaaattgctgtaagagaaggccaaattaatcctatggaccacacattgtatgattcaatttatataaaatgtccacaatagacaagtctatagagacacaaagtagattttggtttcttaaagctggagatggtggtaggaggaattaggcatgactattaataaatatggggtttcattttggggtgatgaaaatattccaaaattgagtgtgatgatggttgcacaactaaaaacattgaactgtacacttgggtgaagtgcacagtatgtgaatttgatctcaataaaacttatttttaaaaaagcatatggtagttcacagagagattgcttccagctataacctaaggaaaggcttcaaggaaaagatgggttcaaagctgaagaatctgactctatggaaacagagtaagaacatttttttagagatgggatctcactatgttgcccaggctggactcaagtaactgggattacaggtgcacagcagtgtgccaggctaagagtaagagcatttttggcagggagaaacaggagtaaaccagggaggcaggaaattataggatgcatacaggggacagtaagtcattcagttcacctggtgtgtggggcccatggtggggatggtgttatattaaagaaggccttgagccaggcattcaggaggcttgaagtaggaggatcacttgagctcaggaggtcaaggctgcagtgagctatgatcatgcctcttcactccagcctgggcaaaagagtgagaccctgtcttataaaaaataagaattaatgaatttagaaggtcttgaattccaagtggaagcacccagaatttgagccataaacaaccaaaggatagcctgatctgagctgagcttaatttatatgctgaaagtatgagagactagtagggaagagaccagaaataaggagactgctagaagattgtgcaacatcccagttcatcctccacaaatgtggaggaagcagatactagcagtggttactaactgtaaattctgggattgtagagactgtgacccatgcagacagcaaaggcagggagatgcagcatgcagcgcagcatggcaccgatactggcagacactttagtagacttagggactttaactgcagagaaaatgtgaggttgcactaagaactgtgaatcagccctatggggctgaaaattgacagcactgggataagtggaactggaaagagagcagaagtagaaaaataaagttcagccgggcgcagtggcttatgcctgtaatcccagcactttgggaggtcaaggcgggcagatcacctgggagcaggagttggagactagcctggccaacatggtgagaccccgtctctactaaaaataccaaaaaaaaattagctgggcatggtggcgcacgcctgtagtcccagctactcaggaggctgagacaggagaatcgcttgaacccgggaggcggaggttgcagtgagccaagattgcaccattgcactccagcctgggcaacaggagtgaaacaccatctcaaaaaaaaaaaaaaaaagaaaaaagaaagaaaaagaaagttcaatttattgggaaaaaaagagccctttggaaacaaggaggaagaagaagtgtcggcaaagaagcattaggaggttcagggtcaaagaagacaaggaaagctttggcaagaagggcagatggggtgcagaattatgcttcaattccagaaaggaaagcactggggtagatacaaggttggggctggcagaagagtagcagttcagagatcattaacacttgatccatttaatttcccaggtaaccaaagacaccatggaatataatctgcctccactaaagtgtaccttttgtacaataaggcaaagaaaaaataagtacacacctaagctctagacttttgttctatcctctctgcattttcggtgtggatgaatacaacttgggaagaaaggaaagaagaaccagcagttttaagcacttactatttgctctgcaaagtgtattcatcaacattgttgctttcaatcttaaagcatggattggagacaggcagtattacccacacttcatagatgcagaaattaaatctcaggctaaggaggaaggaaaagggagttcaccaaataagcaggagcctacctgaagcctgatgcatctggtcctagagccaaccttccatttccccccagcccccacctgtttaagcttcgaggccagtgggaggagggaggggccaggcagctgagggccaggaaagatgtgaaaaactctagctggtgaccgagaggaggagtagagtgtgcccttagttcatatgaactagagggagttggtatttgcacagcagtcagggtcacatgagtgatcatggtacagtgagaagttctccctcccagggccaggtcacagggtttgtttctgttcaatccggattcttccagtaaaagcttcaacttcccacactgaagctgagagcctcccaaagtgctggctacctgctgagcgcccccgtaactctgacacagtagtaatttgagcctctgcaattgccgtctgcttcctgtgaaagtcctttccgtgcccactgacccttgagtgggcctttgagctgctgactttcagctggaacttgaaggtaagaatatggcttaaaagaaattctgtacctaactcgttaatttattttttaacctttagccacataggtgtggctttacagatgcatttattcaaaccagaaaagatcctaagaatctgataaaataatataaaagagttttgttaacagcctccagcctaaaaattcagacctagaaattcaggacccccctcaaatcacctccaaaagctctctctcctgtaatactatctctgtctcccaccctgatcttttcccaaataccctccctgtcccatcctcctccagggccagctcaacttctctggccaagactatttcttcttccatgacagccctcctcttatgccagccattgactaagacacatgctgggcctgcaaggggactgaaccagatcctgtgctccaagggtccagacttataagcaagtaattgtaggacgtggagtaagacctataaaatttgcacacaaaatactataggatcccatggaaaggagtgattacttctgtttacagagtcagggatgcctccacaaaggaggccatagtgatctggcctgatatgatgaaaatgtccctgctggctgctcaaggggaaatgtatgtgtctacatgcctgactctccaagggcaggaaccatgtgctgatgtggcccagcaatgaggggcctggggagggtgagaaggacttgggacttctcctgtgggaactggcagatccctctgctcccactgcactacccagctgcctcaatctcttgctgcatctccttctcccagctttagccaggttctatcactccccgtgcaggcctccaacaagagcaatacagtgggatccatagttcactggacagccaagcccttaaccgccctggtmctcagcagcagcasgtgcccttccacacatgttcacagctgtgcccaggccctcggtcatcagctacctgcccagagcacracgcctaccacagagttggtcaatgtgttgcgtggattattctcagggcattagttcaaggccagagccctaagctcacatgtacacctgcctacaggtgtacattgggaagtcccataaatacatcagactcaaccccagaattggactcaccatcccctcacccccaccctatggaggaccttctcactgtgtccttacatggtctttcctccatgtgcacacatccctggtgttgccttgtgtgtcctaatctcctctcattacaaggataccagattggaataggtctcatcctagcagcctcattttaacttaatcacctatttaaagacattatctccaaatacagccacatgctaatatactatgaattaggacttcaacatatgaacttagagagacacaattcaaaccacgataatgtccgtcttagtccattttatgttgctataacaaaatacctgaggctgggtaatttataaatataagaggtttattttgaatcatgattctggtggctgaaaagtccaagagcatggtgctggcatctgctcagcttctcgtgagggccatgctgcatcaagacatggtgaagaaatagaaaggcaagcaggcatgtataaagggaccaaactcacccacttctgggagatggcattaatctactcatgtggaatccacccttatggcccaaacacctctcacaagaccccgtgtcctagcactgccacactggcagttaaacttcaacagagarttttggtggggactaaccacatccaaaccacagcagtatccaaaaagtgttttgtagttttatgtttatatatatgtatactttttgttcataactmtgtataaayagttttctatcactatcactgccataacaaattatcaaaaatttagcagcttaagacaatacaagtttattatctcacacctctgtaagtcagaagtccaaacaggtgtctctgggtaaaatcaaggtgttggcagggctgcgttcccttctggagggtctgaagaagaatcccttccaagctcattctggttgttggcagaattcagattcatgtggctgtaggatggaggtcccatttgcttgttggctgaggttcattctcagcttctggaggtcatgccttgtcttgtgttcccctttgtctctaagccatcaatggcaagttgagtcattctcatgcttccaaactctccagccacttcttctgccacacgactctctgactgctcttctacacccttgtccacttttaagtgcccttgtggtcacattagacccaccgggataatacaggacatgctcattgccttaaggttcttaacctaaattccatctgcaaagccctttgccacacaatgtaatgtattaggaattaggacgtggacatctttagggccattattctgcctacaacaatatacatttgaaaaagacagatagaaatacatcaaaataataacaactcttgtgtgatagatgttttccttgtacatttggactgtttccaaagtttctgcaatgtataactttaaattcacaataaaaaaaaacaagaggcaatttttaaagaaggaacataggattcgtatacagatgttggctgcgatcctgggcaagttattgatcgtgtgactctcagcttcctcacatttatgagggtgataattattccttcctaataaaattgtcatatgaattaagaaagaaaaagaaaagtccacgaaggacctaacatagaaggcctgcaagaaatgtttgttcttatccctcctctcctgaatttgatcataccattatctcaggagtactgtccaaactccaccttctttgatgtattataaatacaactgcttctcatatttgaaaattttcataaataatttgtctttcgttttccaaaaattgtcttcatcttaaagggctcagctcaatctggaagcagaagccaccatgaaaactgccctcactaatctgggcacctagttttctcatccattccatgaagcagctgggccagattattttattcaacctctagcaagcatgtactgttacattttctgtaaggaccctttcagctccgaagttctatcactcattttcagcaaaagttaaaataaattaatgtatacaaggcctcagcccagcgttggcaaattgacgtgttcgataaatgttagcttttaactactatttcattagtagtagtagtaataaatgtcttctggaaccccagtagccagttatccttgagtaacagtgatttacatcttctgctttctccttttggtgcatttaaaagtcttccctcaatacaacaatgacaacacacacacacacacacacacacacacacacacacacacacacacaatgcaaaactgggcaaagcagatatttctcccacaaatggccaataagcatgagaagatgctcaacatcattagacattaggggaatgcaaatcaaaaccccaatgagctatttatcaccgcacaaccattaggatggctattatcaaaaccaaaaaaacaaacaaaaaacacaagaaacaacaagtgttgatgacaatttggaaaaactggaacccttgtgcactgcttgtaaaaatgtaaaatggtgcggctgctgtggaagatgctgtaacatttcctcaaaatattaaacatagaattaccagatgatctagcaatttcacttctgagtatataccaaaaaaaattgaaagcaataattcaaagagatatttgtacatcgatgttcacagagacctaattcatgacagccaaaagtttccatcaatagatgactgggtaaacaaaatataggctgggcacggtggctcacgcctgtaatcccaacactttgggaagccraggtgggtggatcacctgaggtcaggagctcaagaccagcctggccaacatggcgaaactcggtccctactaaagtcacaaaaattagtcaggcatggtggcgggcacctgtaatcccagccactcaggaggctgaggcatgagaatcgcttgaaccctggaggcagaggttgcagtgagcagagatcatgccattgcactccagcctggataaacagagtgagactctgtctcaaaaaaaaaaaaaaaaaaaaaaaaggaaaggtgtatatctacagtgaactagggaaggaaatcccatcacatgctacaacacggatgagccttgaagagattaagctttggatcaagctttcaattaagcataagattaagcttaattaataagacattcacaaaaggacagatgttatgtgattccacctaaataaggtacatagagtccatagagacagagaataaaatggtggttgccaggagctgagggagggggaatgggaattattgtttaatagatacagagtttctgtctgggatgatgaaaaaaattctagaaaagatggttataatggttgcacaacaatgtgaatgtacttaatgcctctgaactgtacacctaacgatggttaaaatgatcaattttatgttatgtatattttaccacaacttctttaaaaatctcctctattcttttcccatagggaccccaaccctgagacactatggccctgacctcagacctggggaaacagataaaactgaaagaggtggaggggaccctcctgcagcctgcaactgtggacaactggagccagatccagagcttcgaggccaaaccagatgatctcctcatctgcacctaccctaaagcaggtgattgcagggtaggagggacagcaaagacctgctgagccagcacaggctcatcacttaagttagaattccccttcttaggaaacctgctccttcttattgttccacaatgggttttggagctcagggctcacacaggatgcctgatatccgagttttccaggaaagctgctatgctctaccatgcactggtcttgggtggagagacccttgcctgtgctgctccactccctacagagatccaaagtccatccctcatggacttctatcactcatggcaaacaggattctgacccaaggggagggtgatgcaaacaccaaggctctacatcctcttcgtttactcgggactcttcagggaagattgtctaacagatttctgcttctcatccttcctttctgagcctcagggacaacgtggattcaggaaattgtggatatgattgaacagaatggggacgtggagaagtgccagcgagccatcatccaacaccgccatcctttcattgagtgggctcggccaccccaaccttctggtgagagcacctccctctttctctcttcctgctttctttccctctctcttctgttttcccctgtcttttctcacttttctcctcttctctcctctctctctcccccatctctccttcctcttctctttctctctcattttcactgtcatatgtttcttccttttatcttcctctcatcctctgtctacatattatttaagattttttaccaaaagtgaatcaccaaatgaaaaggatgtgtgctagggtcagattctgccttattttcttcttaagccctccctctgatcatgtgcaactgtagatcacattgaagatgtgaaaaactgtaagccatttattccttcttctatctgtaccccaacctgataaaacccagtgcagccaggagggtatccaagaatcgataattcacacacacatacacacacacacacacacaccccattgcatttggaaccaattatttctgttcaacagagaagacttttcaggtaatgctcaacctagaagtgtttctcttcacatcaaaaaataaagaaagctaaaaaatataaccagaatgctatatttcaggtaactggagctgctggaactattttgcaaaacaaggataggaggaaggcctacttccctaagttatagcattgcagagatccatgtgatagaaagctgggagcacagtagctgaagctatgaaaatgtagttaatgcagctctagcatgaagtctagacttggagcaactgtagacagaggtctgataaatccctaaaaatgtcctaagatagaaattccctgatctgatgcatacaagacacttgtaacctgtggaaggaggtgtctccaagtcagaatagccttaaaggattttgctttcccctatgatcctaccatccagcccctctggctcctctggctttcgaagaagagaaaatggtcactaggtaggtaactactcgctttgtaacccagtgcctgttcccgccctgctctgaamtacctgtggggctctgaccccatagacaggccagcctctgcctgcttaaccatgatctcactccatgtgccatgaggacctgctgttttgtgtgygtctggtcttctgctccttgagcagcaggatggtataatagttaaggactaccagggtttaaatcctgactccatcactcacctcacaacgtttaaatcctgactccgtcactcacctcacaatgtttacataacctctctgtgttacagtttccttagctgcaaagtgtagatagaatcaaggcctatctcaaagagttgttgtgagcattaacaaattcagtataggtaaaaagcttgaagcartgcctgacactcagaggatactatctacgtgttagctatctttactaaccacttctccaggccccatgaccccatgtgttccctgattatctaagaccagcattttttgtttatttaaagatggaggctagctctgtcacccaggctggactgcagtggtgccatcataggtcactgcaacctggaactcctgggcttaggcaatcttcccacctcagactcctgagtagctgggactacaggtgaacaccgccacacctggcaaattttttgcttgtagagatcgggtttcactatgtttcccagattggtctcaaatacctggcttcaagcaatcctcctgcctcggccttccaagccactgggatcacaaacatgagccaccacacccagcccaagaacggcttttgatctttgttctacctcctgcccctgccgctgcccagtgtcttacctctggcaatttgagagattaaagaaagaggagaggcctaagcaagatttctaatgaagtattcttagmagtagagagcagagtgttcaatcactaaatcggcataaaaaccaggatagagctgtagaatccagagaaaggatggtaatcaaacggccagcttggcatgtcatacagaggcaccctggcctctttaggaaccaaggtgccctgtgtgagaataacaaacagtctcaggctttatgatctgcccagccacagacagctgaatgctggctggagactcagctgtgcagtggtcgtttgtttggtttttttttttgagacaaagtctggctctgttgcccaggcaggagtgcaatggcatggtcttggctcactgcaacctctgcctcccgggttcaagcarttctcctgcctcagcctcccaagtagctggaattacaggcacctgccagcacgcccagcaaatttttggtatttttaktacagtcagggttttaccatgttggccaggctggtctcgaactcctgacctcatgatatacccgcctcggcctcccaaagcactgagattataggcgtaagccaccgtgcccagccagtggttttctttcagagtagataatccctgccagttgaggtgaggagcatcactgggaggagaccagttgctgacatagactcatggctgtcggccaaaggtctcaaccacccttggagcattctggagtggtcagacactactggacaatggatgagcttgtgccctgcayggtcagtctcccttccaggcccccttctgctctcccatcaactcccagccttgtagccgttctgtgacaaaagggattacatctgtgacccacagagaattggtttggaaagactttgaaaagacctgtgtgcatgtgtatgcatatgcatgtgtgtgtgtgaactgtatataggtgaaatctaggaatgatccacttagtttcagcaaacatctatgctcaagggcctatgctgctcataagacttcacacctacttgccctcaataagttattgtcccatggaagaaaccaatgcagatgatataacaacaagcatggagggctactggcagggtgaggggaacatggccaatgaaccgttcctggaggtgacacctgaaatgataaactgttgtcattactaattttctgcctctgtctcctgccagactgcaaactctttgatggcaagaaacaagttctgtttaactttgtactcccatggggctgtttctacagtattggctgaattgatttatccctcacagccacatgcaatttggctcaaatcccaaggctaaaatcttagtgcaactgacgaaggccaaaaatgaccccgtttgcccccttcttccaagctagtgggcttgggaatgggccctgcagcctgggctgtgtcatgcacactctccacgctgtgcttctccaccctgagtctgagcaaccatcgtggtattcctggcgggtgaggcaaccccatggggcttttctgaatcattgatgagagagaggtggggcgagggtgtgggggggcagaatgtacaatgtacctatgttcataaaagaaaacactggtcaactgctttatgtcaagccccgactccacagtatctctctcctgtaggggttttttggcagaaaaatttggagttagagctggactgagcccaccaacagggctggatcaggagtaggagtgggccttcttatttgtcatgggcaggaaggatgactgtgagccatctaaggaccataatgactgagtacagatttcccaattagaagactgggtctcttttaggcattaagtggttactgcccacagggcattaaatcaggtgtaataggaaagaggagagccgcgagtaccaggaaggaaatcaaccagcctgcagatctcactttctggcagattccctgaatttgctccccagcttgggattgacagtccaactccatccataaccttcccttctgtcctctatgtctgctaaggtttcttatagctttcatctccgtttctctacattgtgcttctttagctctgccactatttttcttttcagctatataagctctgctatttaaccctactcattgtaggttttcatgtccaaacactataaatcttcccagtctttttagtagtctcttgtttccttgctcatgttttcaactttctcttttattcctttgcacttttttttgagacagggtctcactctgtcacccaggctagagtgcagtagtgcaaacacagctcactgcagcctcaatctctcgagctcaagcgatcctcccatctcagcctcccgagtaagtagctgggactacaggtgcgtatcaccatgcccagctaattttggtattttttttttttagagacaggatttcaccatgttgcccaggctggtctcaaactcctgagctcaagcaatccacctgcctcaacctcccaaagtgccaagattacagacgtgagccactgcccctggycttctttgcatattttaaacatagttatttatattctctattaggtacccaataactgaggtcactaggggtttagttcttccacctgttttttttctagctcttgttcatagggcttttccctcayttgttttgtaattttgtataaaaagctcttttctccctgtcttgatctcacacctacattggaacatttccaatctagaatagtttaagttaacttctggtccaagctggtagtataatttcatatccatgcatgtagtatgaaaacaggattgtggttatgagttctcaagaaagcctctttttctgcacccagaggcgaggcaaggaaattaccttacctctctttggcagtaggtgatctttttctctctcacctttcactgaggtagcagacatttgagtttctccggctaatgcatgggtctctgttcctaatctgtgcctcactaaagtccagggctaycagcctcttccctgagcagaggtcactgaactgagcactgggtgtccagagggtgaacccactcagggcagctgtcatcaaagcctttgcccacttctccatcttgcagctccctccctcttcactttcgtccctggagggtccccttattttcttatgagcctgattatgcacttaaatgatacgtttggtgttttaatcagaatctgcaggtgtgtgattaacaggaaagatcttcataatgttcaggccaccatgtctccagcagtgaaagtacttggagagacccttgaagagtgagtgggactgtccagatgtgtagaaatgagagccggagggagccacaggggcgtggggcagcaggaccagggcatgtggaaggtcagagtgtgagctggcgtagaggtggagctgagaaaagagactagaggcaggrgagctttgcagttcttctaaggaatatggacttcaaaaatggttaaaggtggttttccaacttttctttttagtaccaaaacacttttttatttaacaaaaattaccatgactacatgatccagcaattccacttctgggtatatatcccaaagaaataaaaacagggtctgaaacagatacctgtacatctacattcaaaataacattattcacaatagccaaaaggtggcaacaacccaagtgtccaccaatggctgaattgataaacaagatgtggatatacaatggaacattactcagtcttaaagaggaaggagattttctgcactaacttgacccagctcctctgacatgattcgcatgagcctctgattcccacactagagtggaagctccttagggagaaggcctgtgtttttcttgtctttgttgccttttcccctaacctcagcttaacacgatgattgcacaaagtgctcgttaaggcttttaaatgagagagtagaggccgggcaccgtggctcatgtctgtaatcccagcactttgggaggccaaggcaggtggatcacgaggtcaccagatcgagaccagcctgaccaacatggtgaaaccccgtctctactaaaaatagaaaaattagatgggcgtggtggccaagcgcctgtaatcccagctactcgggaggctgaggcaggagaactgcttgaacctgggaagcggaggttgcagtgagccgagatcgcaccactgcactccagcctggtgatggaccaagactccgtctcaaaaaaaaaatgagacagtagaaatcatgactcacaggccagcaagtatacatgtttttagagatgaaacaagtgattgcaaacaggccgggtacatgagacagcctgctgcaggcacatgggggtcatctctggctggcaggaaggtgagggagtcctctcttctctggtcctggctgactctgcctcagcaggacttcacttgaccattctcaccttctgtcacctcatccttaaagtgacagagtaaattaactctaaggccccatccaggactcaagctgtgtgattttacaaaaatgaaaattatattaataatcccattgtaaaatcccaaaagaaagtcaagagactagcagaaagacaggtgggtgatgggatrtcctggacagagcctggatcatgaggtccccatgtagtgcttgtactacgcagatgtttcctcttgagctattttaaaggtgtggaaaaagccaaagcaatgccctctccacggatactaaagactcacctttccactcagctgctgccaccgtctttctgggaaaacaactgcaaggtaagataccaacagctccctgtgacagaagggaaagtaagccaaccaaagcgagtcctgcagaccccaacgcagagcattcgtgatcacctttgcctctccactgtctctgatgcttaccagcaaagagaaaacataaagttctacattcagcaggacattcacctgaacagtttcaaataggacatgaaggcaggatccagattgaatgtttggagggaactagagacatggggaggcagtgagtgcagtaagcgtagctgtgaaatgaaggggagaagatggtggtcccaggctgcaggccatggggaggttttctaacagaccagggagggaagaatgagaggaaaaaagctaaagctctccccaaaggaggccaggcgcggtggctcacgcctgtaatcccagcactttgggaggccgaggcgggtggatcacaaagtcaggagatcgagagcacggtgaaaccccgtctctactaaaaataaaaaaaaacttagccgggcgcggtggcgggcgcctatagtcccagctactcgggagggtgaggcaggagaatggcgtgaacccgggaggcggagcttgcagtgagccgagatcacgccactgcactccagcctgggccacagagcgagactccatctcaaaaaaaaagttctccccaaagggtaaacagatgaatcaggcagagcaacgctcttgaggacaccccacctctgcctctggtagactctgagttcttcgttttatttattctgtgactttattcgtatgcaccccagtgcctaataagttcctggcacatagagggcattagacacgtccttgctgagtaaatacggaagtggctgtagagcaggtggagtcaagggtacaaactgagccgccagccttggtgagaaagtggggcactgcttccttaaaggcaggaatgaaggggaaagaagggctaagaaagatatgttgctaggggactggagtgaagttggaggactcaaatgacttcactccttttagtaataatgttggataaggggacaaaaacttccatttccagaattatggcaaactaggtgttctgaacccctgaagcccttatatgtagaacatccaggattactgcataaaaaaatcacaagtttccttttaatgcataactgagatcaaaataaagtccctaagtttagaaactgcagaggaaactgaaactcagagaggcaaattgagactgggactctccaggggaaatctgatgacctggataatccagcaatttaagttttaatggctgcacagggacagggtcaaagcccatggcacaaggaaccagaagaatgaggagccaaagctgggaccactgaagggctacatcctcaatggatgggtggaggaggcagagaaagaccttagggaaccactctgccttgacctaggcgctcagctcccttgagaatgtatagccacaggtttactccctcggggtttgagattgaaaattgcactccttgcattgtccaagaaactacaagcagagacattccacaaggtgrtccccacagccagtgttcccaggtccgctctggagggacacagctgcaactcagacccccataggatccccacttgagctcaccatcccacattacaaaatacacaaaagaacaagccaccatgagatgcagtcttcagaaagaacccatggaagagtcagacctcaagaacttcagacaatgtaattatcaactctagaaataagagaaggttcaagttgtgtgaataaatgaaaaagtgtatcaaaaataaaataaagaaataagatgctacttttagacacagaaatattaagtaaataaatggaatttctataacaaaaaaatataaaatcatggaaattaaaaactcaagcataggataaagtgcagaacagctgcatagagaattagtgaactcagacaggaaggtttgagggtaaaggtttgaggagagaggagagacctgtgtctggagctaagagccaagagatggagcacgggagggattaataaaaggattatcaagcagcaatgaagaggaagaaaactgagcataaaaaatttagaaactaggggaattttttaaatcagcatttcttaaaaccttctttactggtgcttggcagcttggtaagttggagaagagaagatggggagtaggacttagtagacagtaacagagtcaacgctttcaggagcagggtttctcaaccttagcacttgctctaaagggcctgggacttgatataatcaggcatggcaagacatgcaggtacagtggtgactgtcataaggaagaagtgtgtcctcgcagatacctagaacaggaggcatggcatgtcacacagagcctcacagggaagcaatgggatagatcaggaggaagagacagtgagtagaagacatgggcaagagccttgatgtggtttctttgggaaggaatagttgaggcaaggtaggcaggcttgggattggccagtttgaaccactggagcaggctttcagccacaggggcttggcctagtggtctggtatctgaccctggggtgtcagggcaggtgaataatggcccagtgtgtaaaagcccaacagtggaagtgttgggggtataggctctggggtgttgtaggcagttcctccagagtcagcaaagccccaggatgtcaaagcatcagatacagaatataaaagacataattaatacagcactcctgacatttggggcagatttttctttcttgtgggtgggagcaaggggactcttctatgtattgtagaatgttgaacagcatacttggcccctgcatggatgccagtagcaccactactccaagctgtgcaaccaaaaatgtctccagacattgccaaatgtcccctagtggatacaatcatcccatcatccccaattgagaaccacttaaaagtgaaagaataaaaaagcacagcattgaaatagctggtcatagatctgagatgcatagtcaagaggcccatttggcattgatgccattaaaatgtgaactgagtactggataaaaggtcagatttggtaaaatgaaaggttgggagagtggagggatgtgaaattgtgggcaaagtggaacttgaaggaatgtttgtaggggcagagctgaaatgattagagatggaaatcattcaagccgaggaggccaggagaaaaataggagctattttcttgctgtgtggctcaaactcttaaacatgaagcttctgtgcatctttgggagggtgcgcgaggggtcatcagtttacgttgatactgtggaagtctcctattcaagtggcaggtcatagtttacagaaaaagattttgctcctgataccaaaggggcaatcaggcaatctaatcctcaccaatccctaattgattagctaattaaaaggactgagtttgaagtagagagcagacttggtgacaaagcagagacagaaagaagagggaggtcacaaggccaagtcgcagggccagcactgcagaactgagccagagtgcacagcaaccctcaggatggctctgcctaagggaactctgtgaaagtccactttttataccatcttttacccayctcttttcttaccccaaagttccttyatgtagctcgaaatgccaaagactgtatggtttcctactaccatttccaaaggatgaaccacatgcttcctgaccctggtacctgggaagagtattttgaaaccttcatcaatggaaaaggtacrggaacatccttcacacccttgcattctcactccagctaggctgggtctagggaaccacaggcagcattttatcccctagaatgcctgtacttcatcaggtgtgtcctaccacagactgggactgggcagagcaagctggccactgagtgtatgcccacagccctcagcaaacatcttccacctgattcagagtctttaattacagccatcctcttccaaaaggtgtccttgtccctatgtgattgcacataataggaagccactttagggacgatgttggggcaagtaaccctaaggctgtccccatctacaccaccctcaaaatcaaacagaycagaacccttaggacatatctaatacagaatttgggttttctctctctaactcacttcaggaaaatccctaatactcagaaggttttgtgtgatgcctatgtagactattctgtttcctgtgtctatttcagtggtttggggttcctggtttgaccacgtgaaaggatggtgggagatgaaagacagacaccagattctcttcctcttctatgaggacataaagagggtgagtgaaggctctgcagaagaaccattttaaagtggttcttcaggtgcagagaaattcaaagttgtttcaraggacatcccagagaattgtagtatttctttatgatactctcattcattccagtccaatgttacccttgccgcaggacccaaagcatgaaattcggaaggtgatgcagttcatgggaaagaaggtggatgaaacagtgctagataaaattgtccaggagacgtcatttgagaaaatgaaagaaaatcccatgacaaatcgttctacagtttccaaatctatcttggaccagtcaatttcckccttcatgagaaaaggtgtgtggggcctctttatcatacattcagattgtctcgtaacatcctgtctgcctcttagcagamaatattgagttttattaattccaagccaatgcatttcaactattcctaatatgtgtttctaataaaaccagggatttgatcctgttgtagaagagagctttctagggtattgttccagtatttggttgcaaggaacagagagtccctcaagctagccccaaagaaaggggcttactgtgaagattcaccatggacaataaaggaaatgcaatcacatagaaaactaggaagaggagccaccactggtccagacctcccaggggccgctggatctcagggtccaggactcagcagcaggagggatgtgtctttgctccaaagctccaccacttacaggactcagctgcttttcacatatctattaggcatggcttcctctgctaaccagcttccggtctctccacccattacaactttctcccactttataacttctgatgactcagtttctgctcataacttggtcttgacccttacccaaacctgctctacttcatgagtttcaactacaactactgttgagaactgcctcatcctcagtatttcttagttccaattcccaaaggaggaattctaactggcccatctaatattttttaagaaaaaactttatcactttctaatttaaaaagcaaaacatgtcattgttaaatattaaattgggctgggcagattgacttatgcccataatcccacgttttggaaagctgaggcatgaggattgcttgaggctaggagttcgaaactagactgggcaacacagcaagaccccatctctacaaaaaaaaattaattagctgggtgtggtgatgcatccctgtattcccagcttctcaggaggctgaggtgggaggagcacttgagcccaggattttgagaatgcagtgagctaggaccttgccactgtactccagcctgggtgacagagaaagacaccagcttttcttaaaaaataaactaaataggctgggcatgatggctcacgcctgtaatcccagcactttgggaggcctaggcaggcagatcacgaggtcaagagatcaagaccaacctggccaacatggtgaaaccctgtctctactaaaaataaaaaaattagctgggcgtggtggtgcacgcctgtagtcccagctattcgggaggctcatgcaggagaatcacttgaacccaggaggcagaggttgcagtgagccaagatcatgccactgtactccagcctggtgacaaagtgagactgtctcaataaataaataaataaataaaatcagtataaaattatattttttaaaagtctctccacaaaaactccacccccaagaagtaactaccaacagtatggaagtccctttctctctcatttataacatacagattttttattcacaacagtgaaatcatggtatacacactgctttgaaacatcttttcttcttcctctttgattttgcatgtgcttgaatttatgttgttgcattttccaatctacaacagtattccataccaatgaaacaaaccaaaatattctaccccttttctctttggataaccagtggtaatgatttgtcaaggtgcccttcttcaggctcatacataaccatctttctatacaccctccttcttcagactcacacagacacaaagatatgtaaccataatgaaagcttgctccctaaaatgcagaatggggtcatattttatacctttacttaccaggatatgagaaacccctctagggcaaggcatatagactcatacacctcattgatttctttggtcccatgttataccaagcgaaggatgcatcataattcatccaactattcccttaatgatagacactatagttattattgttttcaatgtttgtttttatgcataatgttacagtaaatatctttgtgcataaattatttccagatgcttttatttctgttgcataattttctggaagaggtattggtggggaaaagagaatttcccctgtttaaaattagtttaagttgttgtttggtgaaaaatattatctcattcatatttttccaaaatagttttttattgagatataatcaaaataccaaaaatgcacagatcttaagtatacagttcaacccattttaataaatgtatatacccacaccacccgcaccccaatcaagatatgaaacattttcattaccccagaaagttccctcttgtgcccttttcagtcaatgtctacctccagggacaaccgtttttccaatttctattactctagattgattttgcctgttgctggacttcacgtaaatggaatttcacagtatttactttcctgtgtctcgtgtcttttgctcaacataatgttttgagattcctccatgtggttgtgtgtctgtagttcatcattcttttatgtctatgtagtaatccatcaggtaaatacactacaggtggggccaggtcatgcaggccactagctgccttgggtcagttgtccagctgacttagaagtccatccccctgcacagagtcccctaggcctgcttcttataggagagctgctcatggacaggtgtccactgaagggggagttgggtgagtcaggtatgtggacaggccagattcagtatgggcactacaccactttactcagggacaccacatctttcaatcagagtgacactcctgtctggccttcctttttctaggaactgtgggggattggaaaaaccacttcactgttgcccagaatgagaggtttgatgaaatctatagaagaaagatggaaggaacctccataaacttctgcatggaactctgagcaagatgtaaataaaattaaaaggtggatggcaagagtgcaaatactatcttcaatccttcagtcccagccagaagaatctctgaaagcatattgtkaatgtatacaatgtagtacaaacaatctctgtgatgattaacagtatgtcaccacttcwttttttaaaaaggatcacgtctaatgcccattttcccaactattctttccaaagtaagatataaggtagcttaataaactaagtaaaacrtatgacttgagtacaawaggattgttttaatccccattattctggaaagtgcrtcctagtctcccagtctataacatcataataccttgagtataagtccaaatattaggttatatctatattaaaaacaaaatttctgtcatctgtcctggccattcaggcaactccagcctgggctcaatcctggagttctgtctggtcactatcagaaggaacactttgagggaaaccctggtgcagccagccctgaggaaacatggcctgagtgccctcactggtgggtgggaataaaatggaagtgcacagaggagatgtcagaagaccaaaacttggtgaatagtcccagtgctaggtcatataggaaacagaaagcatgacagtggccttttgggaacccaagttacrtcctggtgaaagcagaaaggaggagacaggatggctgtcaacaacgtcagcatgggcatggctcccaggcatggaggtaattgggtcttggcttcaatgccacccttttgggaagccctaaaccaagtgaggtgttcttttcccttgcttcccatatttgtcccagttgcagccctsttsttatgtatttactcttcaatttcttatytatacctctcactcaattgttaattctttgggttcagtctcatgccatatttactcctagtacctaatgcagtgcctggcacacagcaagtgcccttgagaacttgtagagggagtaaaaaagtgcatggataaatgactgcagcaaatcacaaattttgaactttgacccttttcttttagtcccaaatagtggcattccatagctgagggtagtaggagcagttcaccctgggagcagacaataagaggaagaatgaagccaactaaaattctgaatgctttttgttggatttcgtagggtattttttttaaaatagggtcttgctatgttgcccaggctggtcttaactgactgctttttattattaccatgcactggcaattccaaacaatgtcagtgttaaaatgcttctccctgaaaaagagaaaaaaaaaaggaaaaaaagaaaagaaaagtgaaaagaaaaactcttattggcctaagttctaaataatagctaggttaccactgagttttaactatatgtatatgagcttcaaataagcacctttttattatgtaaataaataaaagttatctgtatccccactgcattgtaaaatttttgttgttttgtttcatgtcttattcacctttgtatggaaattaattcagaaaccccaagcatagagtctacctctttaattccagcaggcagatgtagttctgcctgcttccttccaaggttaagttcataacagttcagaatcttgcaagctcacttcaggtataacctgtgtctccaaccctgcagtatttggatattgctgtttaaacagtagatttggcatagatgatggtggcacaatggttgtaaaggaaaagaagcagaacacctcagtttgttcaattctctcattggggttttcagttgtatccagaatttaaaacagtaaaatttaagagtgtgaacagcaacattcacactttgtttagtaagtacaaagttgtgctcatacaggaagtttactgactttgaataataactttaaaaacaaaatttactcttttctaagtgttaattatttgttttaaaatttaagaatgaatcaagaaataaaacattacaccagtggtatgatttagtaattgtctgacttatactttttgtagacattttagttttatttaaattggcattctgatttttttactggtcttgagtctatacacaaaagttgaataaaagaaaagtttcactgactacatttctttactattattattacttgtctctattcatgatcaacactgaaaataattttgttgtatacggaagtaatgttgatatggttaggctgtgtccccacccaaatttcatcttgaattgtagctcctataattccctcatgttgtgggagggaccccgtgggagatcattgaatcattgaggtggttttccccatactgttctcatggtagtgaataagatgtgatgattttataaggggtttcctctttcacttggctctcattatctcttgtctgtcaccaggtaagacatgccttttcaccttctgccatgaatatgaggcctcctcagccacatggaactgtaagtccattaaacctctttttctttataatttacccagtcttgggtatgtctttatcagcagtgtgaaaatagactaataaagtaaactgatactggtagagtggggtgctgccataaagatacccaaaaatgtggaagttgctttggaacttggtaacaggcagaggttggaacagtttggagggctcagaagaagacaggaaaatgtgggaaagtttgggacttcccagagacttgttgaatggctttgaccaaagtgcttataataatatggacaatgaaatccatgctgaggtggtctcagatggagatgaggaacttgttgggaactggagtaaaggtgacccttgctatgttttaggaaagagaatggtgtcattttttccatgccctagagatttgtggaactttgaacttgagggagatgatttagggtatctagtgaaataaatttctaagcaggaaagcattcaagaggtgacttgggtgctgttaagagcattccattttaaaaggaaaacacagcataaaagttcagaaaatttgcagcctgacaattcactagaaaagaaaaacccattttctagggagaatttcaaaccagctacagaaatttgcgtaaataacaaggagccaaatcttaatcaccaagacaatggggaaaatatctccaggccatgtcagagaccttcatggcagcccctcccatcataggcccagaggcctaggaggaaaagatggttccatgggctgggcccagggccttccctgctgtgtgcaccctagggacttggtgtcctgtatctcagccactccggccatggctgaaagaggccaacgtagagctcaggccatggcttcagagggtgcaagccccaagccttggcagcttccatgtggcattgagcctgcaggtgcatggaagtcaataactgaggtttgggaacctccacctagatttcagaggatgtatggaaatgcctggatgtccaggcagaagtttgctgcaggggagggctcctcatggagaaccacctctaggccagtgcagaagagaaatgtggggttgaagcccccacaaagagtccccactgggacactgcctagtggaaccatgagaagagggccaccatcctccagaccctagaatggtaggtccaccgacagcttgcacagtgcacctggaaaaaccacaggaactcaatgtcagcctgtgaaagcagcctggagggaggctgtaccctgcaaagccaaaggggcagagctgcccaagaccacgggaacccacctcttgcatcagagtgacctggatgtgaacatgtagtcaaaggagaccattttggagctttaagatttgactgccccactggatttcagacttgcatgcagcctatagcccctttgttttagccaatttctccaatttggaatggctatatttacccaatgcctgtacccctactgtagctaggaagtaactaacttgcttttgattttaaggctcatgggtgaaaggtacttgccttgtctcagatgaggctttggactatggacttttgagttaatgctgaaatgagttaagactttggggaactgttgggaaggcatgattggttttgaaatgtgaggacatgagatatgggagggggcaggggaggaatgatatggtttggctgtgtcctcacataaatctcaccttgaattgtagctcccataattcccacgtgttggggggaggggactggtgggagataattgaatcatggtgcagttcccccataccattctcttggtagtgaatatgcctcatgagatctgatgattttattaggggtttcccctttcaattggctctcattttctcttgtctgctgccacgtaagacatgcctttcaccttccaccatgcttgtgaatcctcccgcctcagtttcccaaagcactgggattacaggcatgagccactgtgcctggtctttttcattttaattgcagacacagttctttagtacttgcatgcttgtgaggcctccaaagccatgtggaaatgtaagtccattgaactcttttctttataatttacccagtcttgggtatgtctttatcagcagcatgaaaatggactaatataaagatagttaaaaaaaaaaaaaaacattcactccagggtcagctatgatcccaaatgataaaatgagttctgacttttaattggttggttggttggtgggttggtggttggttggttgattggttggtcctgttaaagaaaaaattattcaatgacacttattaaagcacagtagggcagattttagtcaggaccatctccataggtgtagggaccatggcaatggagtctggcagtggaagagattgtgttcgactcttaatataacgtgggcaagtgggaatttatagccatgcagaagggtggagaaggagggatagaaaatccctaagaggaaacatcatcggtaaggaaagggatgggttctggctacagtgatccaacaggattcttgctaaagataggccagggtgattagatattacctgggtggtggtggaggatgaagaacctgatcagatgttgggggtagggagttcctgctatattgacttaatagttttcttgcaaaaactggatttttcaaagaattacacagaggggtataggagatatgttaagaaccttactaaagtttggtcaagaaaataatctttgtcatttggtttaaactctttctgcttccttttcttcactagctaggacctaaacatgccgactttgaggtttagtatttcaaagagctttgaagtttaatgctgtgagattacatgggactgtgagtttttcaaacacccacaaatcacatttaaattcaggcttccaacaaccagtagaaactacatggcaactggaacacgttagaatcagggtcaagaatgaaaagccaccatgatggtaaagcacagtgttttgcaactcgaccagttgtccacaactcaagcaaggagggaccaatctaacaagaacagagatgcaagaaatagaactagccccaggaaattcagtattcaagctaagatgcaaagagccctagcacaccctctccccacatatacctgcaccataagtatgtaccaacagctaaaaagaaatgattttatgtttctttcctcttaagagttacagccattcttcattcagtcattcattcattctcaatagtacacgtactatgtgccaggtactgtgtgaatgatggggatacagtggtgagcaaagcccttcccctatggatttcatggtctagcatgtgaagcaaaagtccactaagtcgtgacacatgtcaccaaccgaggagagtgccatgtgagatggtttcaggcttcgagaggccagagcagatcagctgagactggggcctgaggcacagctttcctgagaggacatggtccttcctaggtgtgaagcatgtgctggctttaactaggcaagagactgggcagagagaaggagacccaggagcaggcttggtgaggcgggcctgtctcagggcaagaaggaagggctatgaggggaagagctacaagctcagggagaactgacaaaatggggccccaaagagagccgggcatgtcacatggggccttgatggtcatggcagaatgttagactttatcctaggagcatcaggaagcccctgcaggctccaagatagatggtgaaacactcagactaccatgtcaatatgtctactgtgtctgtgccatacacacagcacaagggtgggagccacactgttccagttgagagggctgggaattgttcatgggtgtggagacttccagggttaagggttaagggaacctcctccctcagcctctcacacctggttacaaaagcaggaagtagaatttcaggttgaccagcaggatactcactccttattaaaaaaaaaaaaaaatttaagacaaagtctcactctgttgcccaggctggagtgtagtgtcacaatcgtggctcactgcagcctcaacctcctaggttcaagcaatcctcccagctcagcatcctgagttgctagcaccacagatgtgtaccatcatacctggctaatttttatttcttactctttgtagagacggggtctcactatgttgcccaggctggtctaaaactcctggcctcaaacaatcctgccaccttggtttcccaaagcactgggattacaggcatgggacactgtgcctggtctttttcattttaattgcagacacggttctttagtgcctagtatactctttaagtaccactggagattcatgacaagaggaagagtaataggaaaagattaagatgaccaagcctcagatcagcaagcaaactatcagagattcacagatctctctgaaaagaaaaatgtggcctgagacatttaacagattctctatcaggagtgtttctcatatgcagcaatatatctgacccaaaggacacaatttagttaatgtcttaataatacagaagtagactcacccaagcaggttgctgcaagtcagagatctcagagattagcccaatgctggtcaggttgtcaagtgtttgtcagagtgactggtgtggtattctccactctgcctgtggcaggccaggtctcattaacagctgaagaggcaggcctccataacaactgtttcagcactgactgagtggttaaatattaaaagctgaaagaaccagtgcccttatacaaaggctggaatgtaacaaaagcccacaaagagttttgcctgggcctttcctgggccttgacaggaatgacaaataatgaaggaattcttaacaggacccataaagattaaacaagtttttattgggggtctaaagaaactccccagacctccacaaacaagttttattgtgggtctaaaggaactccataaacctccataatttagcaggagacaagataagggtaattaccctagcacctggacccatctagattaagtaaatttactgaggctccagaggaaggtcttcttcgaaactcagaccgtaa

SEQ ID NO: 93690 - DNA, 18172 bp, Homo sapiens
  misc_feature (1)...(18172): n = A,T,C or G
aaggcctagatgccagtgtgacctcccacaaggcgtggcttccagactccccggctggaagtgatgcttttttgcctcgggccctgggtttgaagcagcctggctttctcttggtaagtggctggtgtcttagcagctgcaatctgagctcagccacctacacaccaccgtggccgacactttcattaaaaagtttcctgagacgacttgcttgcatgttgatttcatgatcagcgccgctgggaaggacccctgagccagtggggtggggctggaagcagcaggtgcagtgatggggctgggtgcccaggaggcctcagtgctcaatcaggccaaggtggccaagcccaggctgcagggaaggccggcctgggggtgtgggtgagcacaggcaggcgccagctgggcagtgttaggatgctggagcagcatccgtaactccactgagtggggtagtctggttggggcagggaccgctgttgctttggcagagagagatgatccccactggggagaggctgttctgactctacaggtgggacagggacagatggccaccagggtgacccagctgatcttcctttgctatgctaagccctgggacatggaggattcccgccacacacagcctgggcccgggttcttacctgtggccaccgctctggcatgagcccctcagtcttgggtggtttctgcctggtccgggatttggtgttgctgctgagtccagcctttccaccacctccacatgggccgtgggtgttgtcagctgcctcccgccttggcttcagtagctcacccagcttacaggggagctgccctgggctggagatgggcacgcaccctgggtcctacttgaatgaatgcagcttgaggagacccggccatatccactgggccacaggttaccctcggcaatgcccacatcagccgtcagcctgagcctccccaggagagcaaggctcacacgacaaaggctgcccrtrgccartgaggtggctgagctttctcggacctttctcggactcccaggatgtggctctgcttgtgagctgcctggtcagctctctcggggtgagaggggcttgtcacatgggcccctgcctgcagtgtgacccttctcagcttctctcagcagccctgcctgcagagtgtcaccgccaccatgataatttccctgacactgcgagggtggggggacgtcctgggtagagaccgggcccgtggcagcagcaggctcaggggcgccctgcactggtgggctgggaacctgatggagaccatgccaagggctggacaaggggacgagcctccaccctggcctctccgcaggcctcagcagcccctcccacaggcagaagggttgacactgggttctgccctcactgcaagagctgcaagtgccacgtggtgtcctgcccaatctggtgtctgcaggtgaggaaagggctgccgctggcctgtttctgagtgttcagcacctaagggtgacagcactgtctgtccctaccctccgggtcctgtttgaaaatcaaacccatgctcacaggccgattttttttcttttagagacagggtctcagtttgtcacccaagctggagtgcagtggtgcgattatagctcaatgcagcctccaattcccggactcaagggaccttcctgcctcagcctgccaagtagcttggactatagctgtgtgttttattattattttgtagacatggggtctggctatgttgtccaggctattctcaaaattcccggcctcaagcaatcctcccgcctcagcctctcaaaggttgggattacaggtgtgaggcaaggcacccagctcagccacagagccctattgcatctctcttactaggagcaagagctgactgccccctcatccccattccagagtgttggggctgtgttcagctgaggccgggacactggcacggcccagggagcgggatcattcactgctgccccaaatctgagatcattccaccttgacaagacttcctcatccaatccctttacttgacagctggggaaaccaatgcgcacggagcacccccagctcacttggggtctcagagctcatccatgagcagaggctgagatcctgggatcttgtcccccagcctccctgcaagcttactccctttctgctggaagagatggggccggacctcgaccagcagccctggcctggacatgactgtgctcatgcaggtattgaggccaagatgccccggcatcatatgtttttcttttctttttttttttttttgagatgatgtctcactctgtcacccaagctggagtgcagtggcatgatattggctcactgcaacctttgcctcccagttaaagtgattctcctgcctcagccttccaagtagctgggcctacaggcttgtaccaccatgcctgactaatttttgtatttttactagagacggggtttccccatgttggccaggctcgtgtcgaactcctgacctcaggtaatccacctgccttggcctcccaaaatgctaggattacaggcatgagccatggcatcacttaaatgtagtgagaggccaggtatggtgactcatgcctgtaatcccagtactttgagaggacgaggctgtccgatcacctaaggtcaggagttcgagaccagcctggccaacatggtgaaactgtgtctctacaaaaagatagaaaaaaatatccctgcatggtggtgagtacctgtagtcccagttactcaggaggctgaggcatgagaatcgcttaaacctcggaggcggaggctgcagtgagctgagatggcgccactgcactccagcctgggtgacagagcaagactttgtctctaaataattaaataaataaatatggccgagcatggtgccttagacctgtagtcccaacactttgcgaggctgaggcaggtggctcatgaggtcaggagcccgagaccagcctggccaagatggtgaaacactgtctctactaaaaatacaaaaattagccagctgtggtggcaggcacctgtaatcccagctacttgggacactgaggcaggagaatcgcttgaaactggaagtcagaggttgcagggagccgagattgcaccactgcagtctagcctgggcgatggagcaagactccatctcaaataaataaattaataaatacagagcaagattccatcttaaataaataaataaacatacacctgtaatcctagcacttcgggaggctaagacaggtcgatcacctgaggtcaggagttcgagaccagcctgaccaatatggcaaaactccatctctactaaaattacaaaaattagccgggcgttttgacatgtgcctgtagtcccagctacttgggaggctgagacaggagaattgcttgaacccaggaggtggaggttgcagtgagccgagatctcggctgcacttcagcctgggtgacagagtgagactctgtctcaaaaggaataaataaaatacaaaataaaaaaaaaatgtagtaagattgcagagtcgtgccgcggaagcgtgctggtcctatccatgtagtgaaggctgatttcatacacaaatgtcacaagaacttttttttctttttctttttttttgagacggagtctcgctctgccacccaggctggagtgcagtggcacaatctcagctcactgcaagctctgcctcccgggtttatgccgttctcctgcctcagcctcccgagtagctgggactacaggcctgtgcagcagatgctggggggccactaggcccaggcagtcttgggacttgtgtctctcctgctgtgcatccatactgggtgctttagaaatggcaggcagaccagaagcccctgttgcaagtgaggacaaagtgtgggaaggccatgagggtctgcagtcctagatggccttgtcctcaacctgcagtgcactcttgatgcgctggaatgccacctccttctcccggtccaggtcttcagcagtgacccggtaccccagctctaagggaggaggcagcatcaaaggctcccctcgcctgcgtggcagcaggggaaacttgtgtctacagggcctagaggcctgggatctggggaagccacccctggggkcgagtgtctgccctggtgctgtatctgccgtcttttcacaatgggtgtgacccgaagagacagcctgaggtccgtcctcactcactgtgtttgaggaactgagggtcagctggcagtgggatgaggctggccccctcctccgctttcgttccgggaggcctcccgtagagctgtaggagctggagatggcctttcgtttggggcacgagctggtccgggaggtctgggatctctggttctgacctctgggcacctgctgcagctgtggctgaggcccagaaatgtgaagggcctctatccactctagtagtgaccccaacgtggggttcaatgtggaggggggaggggctgctgcggctgcaggagcagaagtgccagggcttgttcttctcatgcccgcatccatgcttgcagctgggaagggggcaggaatcagcgaggtgacctgggctgagtcctgggagtgggaagaggtggcaggaaggggatctgaggaggagaacagggggcctggtggtctgtgcttcttcccagacatgggagctgtagaggggacctctgcagcaggtgctaggggggccagtaggcccaggcagtcttgggacttgtgtctctcctgctgtgcatccatactgggtgctttagaaacggcaggcagaccagaagtccctgttgcaagtgaggacaaagtgtgggaaggccgtgagagtctgcagtccgagatggccttgtcctcaacctgcagtgcactattgatgcgctggaatgctgcctccttctcccggtccaggtcttcaacagtgacccggtaccccagctctaagggaggtggcagcatcaaaggctcccctcgcctgcatggcagcaggggaaacttgtgtatactgggcctagaggcctcggatatggaggagtcattcctgagggtgagtgtctgccctggtgctatatctgctgccttttcacactgggtgtgacccgaagagacagcctgaagcctgtcctcacccactgtctttgaggaactgagggtcagctggctgtgggatgaggctggtcccctcctccgctttagccccggcaagcctcccgtggagctgcaggagctggagatggcatttcgtttggtgcaggagctcgtccaggaggtctgggatgtctggttatatctgatttctcacctctgggtatggaggtctgtctgcagaggcccgggcccgggcacaaagggagagagaggcctccattgtcccgcaggggccgaaatgcagaccgtgcatccccggtgacctcggggaccattctctgatcatcaggattctcttggactctagggtccttgtcctgctcaggcatccctgccccgctctccttgagggccctcaacactgtcttccctggacacaagtctggggacagccgggtgttttggacaccaaaggggtgactcccggctcctgggccccacagagagtccttgtgctcagtggagtggctgagctggaggacgccctggaactcagagcacacagcactggcttgctgtggtacctgtgcaatcaaattgaaagcaggatcccaggaaggaacgcagggcttgcaggatcacggaaaaccttcttagagttgtcttgacaccactgatgtcaagtgtccgggtgcttgtaggatggcctgccactcagtccacaggcaggagcaacggggagatcccacaagcaaagtgaactgggggatgggctgaacgggctccaggcaactgagccctactggcaggtcctaggcctgggcccgaacaggaaggaggggcacagagtgcccaggtaaccgctcctgggagccctggggaaccgtcggttgcttgaactctcgagagctgggctctgcgtcctcgtccagccgccaactcggccaaaggcgaagccagcagtttcttctgctgccgggcaacgcgccttttaaacctgagggagtgggcgcgtgagcacttaatggcgccsgtgacagagtgagcttaacggattaataagcgcagccaggtacccgcgcaaggcacttgctggcaatggcgggaggcggacgtggggggycrtgcartaggtactggaaggagagacacgggcacaaaggtcgcgggaggaacaggtgcccacaatggcggcagatctgcccgtggatcactgaagattcctgctctcctgctgaggtggagattgcagtgagctgagatcgcrccattgcactccagcctgggcaacaagtgcaaaactcagtctccaaataaagaaaaagaaaaaaaagaggccgggcgtggtggcttatgcctataatcctagcactttgggaggtcggagcgggcggatcacgagctcaggagttggagaccagcctggccaacatagcgaaaccccgtctctagtaaaaatacaaatttagtcagacatggtggcatgcgcctgtagtcccagctactccggcggttgagacacaagaatcacttgaacccgggggtggggaagggattgtgatgtgccgagatcgcgccactgcactccagcctgggcaacagagccagactctttttttttttttttttgagacgcagtctccctctatcgcccaggctggattccagtggcctgatctcggctcactgcaagctccgcctaccgggttcacgccattctcctgcctcagcctgctggagtagctaggactacaggcgcacgccaccacacctggctaatggttttgtatttttagtagagacggggtttcaccgtgttagccaggatggnnnnnnnnnnnnnnnnnnnnnnnnnnnnnnnnnnnnnnnnnnnnnnnnnnnnnnnnnnnnnnnnnnnnnnnnnnnnnnnnnnnnnnnnnnnnnnnnnnnnnnnnnnnnnnnnnnnnnnnnnnnnnnnnnnnnnnnnnnnnnnnnnnnnnnnnnnnnnnnnnnnnnnnnnnnnnnnnnnnnnnnnnnnnnnnnnnnnnnnnnnnnnnnnnnnnnnnnnnnnnnnnnnnnnnnnnnnnnnnnnnnnnnnnnnnnnnnnnnnnnnnnnnnnnnnnnnnnnnnnnnnnnnnnnnnnnnnnnnnnnnnnnnnnnnnnnnnnnnnnnnnnnnnnnnnnnnnnnnnnnnnnnnnnnnnnnnnnnnnnnnnnnnnnnnnnnnnnnnnnnnnnnnnnnnnnnnnnnnnnnnnnnnnnnnnnnnnnnnnnnnnnnnnnnnnnnnnnnnnnnnnnnnnnnnnnnnnnnnnnnnnnnnnnnnnnnnnnnnnnnnnnnnnnnnnnnnnnnnnnnnnnnnnnnnnnnnnnnnnnnnnnnnnnnnnnnnnnnnnnnnnnnnnnnnnnnnnnnnnnnnnnnnnnnnnnnnnnnnnnnnnnnnnnnnnnnnnnnnnnnnnnnnnnnnnnnnnnnnnnnnnnnnnnnnnnnnnnnnnnnnnnnnnnnnnnnnnnnnnnnnnnnnnnnnnnnnnnnnnnnnnnnnnnnnnnnnnnnnnnnnnnnnnnnnnnnnnnnnnnnnnnnnnnnnnnnnnnnnnnnnnnnnnnnnnnnnnnnnnnnnnnnnnnnnnnnnnnnnnnnnnnnnnnnnnnnnnnnnnnnnnnnnnnnnnnnnnnnnnnnnnnnnnnnnnnnnnnnnnnnnnnnnnnnnnnnnnnnnnnnnnnnnnnnnnnnnnnnnnnnnnnnnnnnnnnnnnnnnnnnnnnnnnnnnnnnnnnnnnnnnnnnnnnnnnnnnnnnnnnnnnnnnnnnnnnnnnnnnnnnnnnnnnnnnnnnnnnnnnnnnnnnnnnnnnnnnnnnnnnnnnnnnnnnnnnnnnnnnnnnnnnnnnnnnnnnnnnnnnnnnnnnnnnnnnnnnnnnnnnnnnnnnnnnnnnnnnnnnnnnnnnnnnnnnnnnnnnnnnnnnnnnnnnnnnnnnnnnnnnnnnnnnnnnnnnnnnnnnnnnnnnnnnnnnnnnnnnnnnnnnnnnnnnnnnnnnnnnnnnnnnnnnnnnnnnnnnnnnnnnnnnnnnnnnnnnnnnnnnnnnnnnnnnnnnnnnnnnnnnnnnnnnnnnnnnnnnnnnnnnnnnnnnnnnnnnnnnnnnnnnnnnnnnnnnnnnnnnnnnnnnnnnnnnnnnnnnnnnnnnnnnnnnnnnnnnnnnnnnnnnnnnnnnnnnnnccctcccaaagtgctgggattacaggcctcggcctcccaaagtgctgggattacagccgtgagccaccgcgcccggtgtggaaactcccttgaggcattttcttcggccttcgggtccatcctctctgtctcctccttgacctcctcatctcctcctcgccactgccttggggaccttggccaggctcatggcatccagcagccactcaatgtcaatacctccatgttcatctctcagcccgcccttgcccgtgaacccatgcttatttatttattttttttatacgtgcacccatgctcttcaggtctgatgaagtatccaaaatcaagctcctgaccatccccaaacctgccccttctgcagagtttacctcgctagtcggcgccatccttgattcttctctttctcccacccaggccatcatctcttgcctggttgatacccacagcctcccctttggactttatccttatccccgtcatagctgccagagggaccctgtgaaaacactccccagcctgctcattcctctgccctaagcctgcatggcacagagcaaaagccagttgttatgggacctaggatgtcctgtgggatgggccccagcctgcatcttcagccttttctccccaccccactccattcactctctgcctatcactcaccagcctataccacctgcctcagggcctttgcactgaccatttaggcmacwttccaggctcttttcacacgttgcctcctctgagaagctctccctaaccactctgcccatacctcatgcctcttgattccccttacctggcttgtggtttcagcactttcgctgtgtgtgtttgtttttcttggcatgagggcaggacctaagtgtctgtttcctattgattccccagtgccaggcatgcagtgcaaactctagaaatattttttgcatgaaggaatgagtgattgaatgcagcaagggtctggaggctgaggaccaggcagacaaacattcagagttgctggaatgcgacagagacagggagtcagactggtcatgcaaggtcctgggcctgcccttgggtcctggggagccacggaaggttgtgggtgccagagggttgtggtcagagccacagtcaggggccttctgagacctgtgccccctccccaccctccctccccacctccctaggccagctctggggtctcggcaggtggtccgcgacatgacctccgagttcttctctgcccagctccgggcccagatctctgacgacaccactcacccgatctcctactacaagcccgagttctacatgccggatgacgggggcactgctcacctgtctgtggtcgcagaggacggcagtgctgtgtccgccaccagcaccatcaacctctagtaggggctgctgggccgcctgggtgggaaagggccaggggagggtggctcagggactgcccacttatccagtaaggtggctccatcacctcttttcctggtgggaaactgaggcccaaccttggtagcttatcctgagcctctcagtgagtatgtttgagcctcagtgggtggatagggaccaggctgggccaggcaaggtcgggcactgtctgacctggctgggcgatagctttggctccaaggtgcgctccccagtcagcgrgatcctgctcaataatgaaatggaygacttcagctctaccagcatcaccaacgagtttggggtrcccccctcacctgccaatttcatccagccaggtatggggtggaggtccgrgggtgggggactggggtggagaggggcgggtgtcctgggcaggcagctgacgggcatccctgtcttctcccattggccgcagggaagcagccgctctcgtccatgtgcccgacgatcatggtgggccaggacggccaggtccggatggtggtgggagctgccgggggcacgcagatcaccatggccactgcactggtatgtgtcacaccttttctccctggccrtgcccaccctgcacagccccyaagccatgctgatcacactcccatgccccaggccatcatctacaacctctggttcggctatgacgtgaagygggccgtggaggagccccggctgcacaaccagcttctgcccaacgtcacgacagtggagagaaacattgaccaggtgggctgggggttggagaaactgagtcacggtgtggggccccagggcatcgtgggctggaggcctggatcatcacagagtggacaatggttggtgtcctctctctagtgcctgggccatctggagcccctgtgccatgagrgccaaaccccttgctccaatgagacccagcaggccccaacctgctcttcctgatgacctggcctgaaatggcaccacctgggctgaggcctgtgaccacacaggtgtggttcaggtggcatctggagccctgctcaggcttcccctctcctcccacccccaggaagtgactgcagccctggagacccggcaccatcacacccagatcacgtccaccttcattgctgtggtgcaagccatcgtccgcatggctggtggctgggcagctgcctcggactccagraaaggtggggaacctgctggctactgattgctccaggcggacaaggctgacaagcaatccaggaacaaaatactcaccaggacgaggaagaggactttgggggacaggcttctcctgtgagcagcagagcagcacaataaatgaggccactgtgccaggctccaggtggcctccctggcctgtctccccactctctgggcctcagtgtattgtgtgtgaaatggagccatctggctggggaggaacagagaggtgggattcggagatcttcacaatgcgggcactggaactagcctcagcatcttcagcatggggagagcmaggcacatggctgggggccaggggaaggttcacaccaagccctgcccctttccaccctgatcccttgractttggggccaggccctcccttactggggctgggcastgacactacctaggatcagccaccagggggtgccacgaccctggcactttcttaggcagagggtggccagcygatgctgggaacccgggygccttctyagacccgtaggcgtcyagctcaccctgccgakgacactggakgtgaagctgaggtccgaggaatggggactgggcaacaggctgsaggaaaacatctcggtcagagccacgcccctggggggtttccaagwkyaagcccagagtgaaacccaagcttgtgatcctctccagagggaggcctggttctcagggaacagcaaacgggaagatgtccccagatcccagggatcagggcttggaccagccggggacgcagcccagagggagtgggtccagaaggaaacagctagacacagcagccttcaccatccgcagcccctccaggcctccctcrgggcctgctccctcctctgtgcacagttccaacacctggrgcagggttctgggaagggctggtggaggtgggctggtgggaggcggtgatcacagcccagcacctggatatcaccaggggcactggggccaggggccaggtgaggccaggtcggggctatccttcaggagccccgaaaacctggtgattccaaagggcccatagacaaacagggttttatgcctgtggagtcaagtcccactgggtctgagctctggagggctgtgtctctggggctctgcaggggtgagacggaggtgggctcaaatggtgtacaagtcattcctcaatccttattttatttatttaattttttwwaaaaaaaattaaaccaatagagatggggwctcactatgttgaccaggctggtcttaactcctgacttcaagcagtscccccatctcagtctcccaaagtgctaagattacaggggtgagccactgcacccggcctcaatccttattttggcctgagaggaaaggccgtggccccatttacaggggagaagactgaagctggaggggcaggccttgctctgggttgcacagcagcaagagaagtgggagctggccacgaggcttcctcgactcgacacactggtggggtacaccctggttctccaggtcccatggggctcagcccaggactacctcgggtggtgagggacttaaatcctctccttcattctcatcgccccttcccccatcatttcctgaggaaggacattcagggacctgaaggagtggcctgcccctccacatctgtgggtgtttctcatcaggttggacaagagactgagaaaagaaagagacacagagacaaagtatggagaaagaaaagtgggcccaggggacctgcgctcagcatatggagtccccacgctggcaccagtctctgagttccctagtatttattgatcattatctctaccatctcagagaaggggatgtggcaggacaatatggtaatagtgaggagagggtcagcaggaaaacatgtgaacaaatgtctctgtgtcataaacaaggttaagaaaaaggtgctgtgctttgatgtgcatatacataaacatctcaatgcattaaagagcagtattgccaccagcatgtcccacctccagccctaaggcagttttctcctatctcagtagatggaatatacaattgggttttacactgagacattcctttgcccagggacgatcaggagagagatgccttcctcttatctcagctgcaaagaggccttcctcttttactaatcctcctcagcacagaccctttacgggtgtcaggctgggggacggtcaggtctttcccttgccacgaggccatatttcagactgtcacatggggagaaaccttggacaatacctggctttcctaggcagaggtccctgcggccttctgcagtgttttgtgtccctgcttacttgagattagggagtggtgatgacttttaacaagcatgctgccttcaagcatttgtttaacaaagcacatcctggcacagcccttaatccattaaaccttgagttgacacaggacatgtttctgtgagcacagggttggggctagggttacagattaacagcatctcaaggcaaaagaatttttcttagtacagaacaaaatggagcctcttacgtctacttctttctacatagacacagtaacagtctgatatctctttcttttccccacagggaccttcctggctgtgcctcaggtcaggaccagaatgacacccattcatttccctgggcctttgctcaggcggtccctgcaccctgtcctcttgcctgaccaggatggtggagagaggaggggggacgtcccccacgctgctgtctccaccactgttcctgctgcccaggcctctgagcttccaggactgcagcgggtgggtgggtgggctggcctgagcccaggaatgcacttcagctcctggttgagcaatgtcactgaggcttgggagtcgggtggggacgggaggaggcgtccgcaggcccccctaccatgagaagcagccgtgggaacagcctgcctctaaacaatcactgcagcccaggctcaccaggggctctggccagacataggggcctggcaggctgtgtggcctgtaaggacacagtctgtctctgtgcctcagtttctctgctgcccagatggaggggcccagactccaggtgtagacatctggagcaggcagtgttcagctggggaggaagtgcggaggactatgggggccacgtgggaagaagtccagcccacatcacctgcacccctgctgagcctggtcaacagagcccctcagtgggtcctcactctcctggctgcctcccatttaggcaccctgaggcctggggagaacagagccaggccagtgtccccagagaggctgcgctgccagcacagtagtagcggatttggattcagggaagcagacctgcagccagggtgggaaagagctgcaggaggggtggagcccccacatggcacagcccccctccctggaggtccatgctgcatttccaggacagcaagtcccagggatggatggtgccgggtgccaagggctagaggcatggtctgtctgcattccccacaggggcgtcttgtagtcaccagcatttgatgctgtcaagtccccctgtcgtctgtgcagactgggaagcccttgatcaccctggggggttgggggacccaggccaggctgcagaagcataaggacttgaacccgggtcctgagtgacaccaccttgggtcctcctccctctgcctctgttcagctccaccttgatgctgactaggctgggccatgaggagagggttaggggatagagatgggagctggggagcagggctccactctgagacgggggcagccttgccggatccagggcagagttaagcggccccagctctgctttcctagagctgctgagaaccygggaaatggtgtggaggttccggggagccctgcccctacctggcaaccgcaatgcagcaggcaccaagttctcctgcacattgcgacagtgtgaccctgggctctggygggcggtaggtsgggcctttggacctaccagcagtgagggagttaacacagcagctgacttctgtaggcaaggaaaactcccctcagacactttgctgcctggcctcctgccagcaacaagcaggagctgaaaactagaagttgaggcgtgagtttggccactccgtagtgtgcacttggtgagggcagcaactcgccacagctgccaggcgtctgtccattcacccatctgtccatctggcagcccgctgttcagacctgtctgtctgtccgcccatctgtaagcccatctctgtcccattgtctatctgaccatctttctcttactgtcctctttgtctagctatctggcctatctgtcgatccatcttcgtgtctgtcttcagcccccacctgtttgtccatctgtccaattacctgtgagtctatctatgcatcttcttgtccattcatctgcccacccatctgtccctccgtctgcccaccggcctcccctctccttctgggccgcagagccacggtccaggactgcagagccatggttggcctggtccttctggggctggggctggcgctggctgtcattgtgctggctgtggtcctctctcgacaccaggccccatttgacccccaggcctttgcccacgccgctgttgctgctgactccaaggtctgctcaaatattgtagggtgagtgagacgtgggaggaagctgggtggcccttggcagccagcccctcctggagaaggcgtgtatgtgagagtgtgtgtgtgagcatatgtgtgtgtgagagattatatgtgagtgtgtgtgggtatatgtgtgagtgtgagtgtggggtgtgggtgtgtgtgaatgtgtgtgatcgtgtttgtgtgtgtatgtgtgagtgtgggtgtgtgtaaatgtgtgtgattgtgtttgtttgtgtgtgtatgagtgtgtgggtgtgtgtgggtatgtgagtgtgagtgtggggggcgtgggtgggtgtgaatgtgtgtgattgtgttttgctgtgtgagggtgtgtgtgactatgagtgtgtgtgagtgtgtgggtgtgtgtaaatgtgtgtgtgagtgtatgtgtgggtgtgtgtgagtgtgtgagtgtgagtatgggggtgtgggtgtgtatgaatgtgtgtgattgtgtgtgggtatgtgtatgtgtgggtgtgtgagtgtgtgtgtgcgcgtgtgtgtgaacgtgcactggcccaagaagcaggagctgtgtgtgtgagcttcaacacctgcagggcttgagcgcaaggagacagcctcagggactttgcacagaacaggtggcagggtgtgcccgtggggcagatggggacttgggaacaatggtggtgtgtgagtccatacctggctccaggattcaggaggcccatttgcatatcccaggtgggaacctgtctggccccgcctgaccctgctggccggtgcaggccccttcagtgaggccaattctccaaggctggggtcttctcccagggtcatgggtgaaggggtttggaggctccctgcgtgggtactggcctgctggggtacacacaatgctgccatagccagtctgccctaacacccagcccggggccacatctcaggtctctcagtcctgaggagcccggtgccccacccctcacatcctctctccctgaatcagggcctgggtctcgtgagctgagtgactgatacttggtgtcctggatgagggcgtgatggagaggggccacagtgggtgtttcctgaccctcttccaggaaggtgctgctgccgctgcagggaggacacatacaggatgccccttcctgccccctgcctcccattgggcccacaaaagccagggcaagcctcccctccctgccagccacctggtctgcttcccagaaattgtcttgcaggctgttgggaggatcccagtacttcgtaaactaaagcaagggaggagtggccgttctctctctttgttcattcattcaccttttcattcattccttcttccctccattcccccatctgtccatccttccctgccctgattgctcatgccacccccccagcccctcctgacctggtcctttggtttctcttcagggctttctgtctcctcccacagggctgagaatggcagctcagggacaagtgggggctggggactgcttagtctccccagtggctctcaggggatttgagggtttgacgccagctgccaccccaggctgtgcccctcctctgctcaggaggacatacaggatgcgacacccacttaaactcaaagttgcaaagatgcaaatgagactggggtctcaggcaccagagaccacccgtgggcacgtggcttttgggagtggggacctgctgccacagatctctgaagagtctggacctgctgggtctccccgagtgactgtctgggggtctccatagcatgccctgctgtgtgcgtgactgtcactggttgggtaggggtctctactctaaagctccctctgctggcatcccctcgaactctcccttggtgaagagagagttttatcaaacaactctctccacttcctgttttaagaagctgggagtggaagagagcctggggctggccccagctgctgctgcgaaacaggggtcactggatgctgggtccctggccgggctggctggaggcctcaggaagaggcctgctacagcatcatcctggccaagattcctccctgcagaggaccctggccacgctgccacagggtctgctggggccaccagaagcccatgttcctgcctccatctctcccctttgtgctcacctctcaccaggaggccctcccagagttcagtctcctgcttttttttttttttttttttttgagatggtgtctcgctctgtcaccaggctggagtgcagtggcgcgatctcagctcactgcaacctctgcttccttggttcaaatgattctcctgcctcagcctcctgagtagctgggactgcaggtgccagccaccacgcccagctaatttttgtatttttagtagagacggggtttcaccatgctggccgggatggtctctatctcttgattcgcccgccttggcctcccaaagtgctggaattaaaggagtgagtcgtggtgcccggccccatctcctactctttcagcaccaggttttactcttgggattctgctacagctggagcccctgggtgcgagttcctaagctttctgtgagtgtggacccagcaccgtgcctagtagacatacaaaaggagcatggtgacagtgaggtctgtcatctccagcataatgactgttttgatccttgtaaaaaaggtgatttttggctgggtgtggtgg

SEQ ID NO: 93691 - DNA, 12962 bp, Homo sapiens
cagctctccctaccccaggcttcctagcggggatttccttgattggtatcttctgagcctgggcttcttgagtgaagcagagacagaaactgtctgttggagctcagcagcctggaaaaattatctacataagcctttcctcttttccttccttcctttctccttcaaagctggaatcccagggcaccgcagctctggaaatgtcaggaagcttaattcaccagaaaagttaatcccctcatggctctgtgaagtcttcccttcccagggcctctcccaggtggcagtaaggatgtctcagacctcatcatccaagtgggagtaaaaagctgaggctaacagtgcaggagtgagcccccagctgtctcccacataccaccctccagcttctctcgcttgcttttccagcctggaattttttctgccaagcatctttggaacccagcagcgagccttcccctgctgtctcacggctggccccccttccttgccattctgaatatgccttcgccccctgctctgctcctgcccgtctgcccctgcggaccattgcccccttttctcctgcccctcagagcaaagcagaccacagatcttgtccccaagaactgtgataaagtttcccaagcagtttggctcaggggtgaaaccttcccattttccacccacagcccagaggagggagggctcccagtcaactcacctgccgaagtgaggttatcggggccatcagaggtgttgctggcrttgggaccagtgggcagcagcgaggcttccaggtccatccagccagtgccggtcgcctgctcccacaaccgagctgagctcccctccacccacgcaggctgcggcagcctccagcgcctgccaccttgtcccggagcgcaagccccgcagtygggaagggggtcttcctccgtagcctggcagccgctgccgcctccaagcccaactgccctccccactcccttcttcatggctcccactgacatcacctagacacattaacattcggaggcagatgcacattaacctcttcagtcccaggctgtggctggcttccacttctgaatgcctgcagagccccagggccctggggaagctgggagggactggacacaggcagccccatcaggaaagggatctccttcccactgacacttgggattgtctcgtgtgcttacaggggctgctgcttgccttgcgtgaggatcgaggtctctgcaaaggcaaacggacaaagcacacaggctgcctccctttggaggagagagcagcttggcttagcccctattccaggtatgggtggctgggccacatggcagagtccagaggaaactgtgcacatagcttgggaatcaaaggcttggactgcagcagggctgccccccatgcacactcagggcaccctcggccccttccctgtgccctgacggcttccaactatctcgctggctatgctgccagcatcctgcagaagctgagtcgtcagctgctgaacccttgcctggcactcagaggtgacacaggtcactccatgctggcaatagccaggacctcggggactggaaggggacaaactcctctctgcatgggatctgcctggaccaagctcacagaggtgttatttttctaaacgctctgaggtccctgaggtttggcctgggattctttgagacaaatatctgagcatgatcccccaaagagatcatcccggaggaacagctgcagaggcaaaggcgttaagggaattttccacggaggcatcctgctgccagcctctggggccctcacagacaggagctgccactgcacccactgccagactcaggagccaggggtcgaggttcacgggcagatccctacatgtgtcctctatcttgtttacttattgggttcatccaacaaacattcattgagtacttactacctgccaagcactgttctaggttttgcagtaaaaaaaaaagaaaaaaaagggggggtggggtgggggataaagtccctgtcctcatgaagattgcattcaagttggggggagacagaaaacccctcaaaagacaattcatggtattggcaatt[450 bp omitted]caggaggcagagattgaagtgagctgagattgggccactgcactccagcctgggcgacacagaaagaccctgtctcagaaaaaagaaaaaatatggccgggcgcagtggctcacacctgtaataccagcactttgggaggccgaggctggcagatcacgaggtcaggagatcgagaccatcctggctaacatggtgaaaccccatctctattaaaaaatacaaaaaattaaccgggcgtggtggcgggtgcctgtagtcccagctactcgggaggctgaggcaggagaatggcgtgaacccgggaggcggagcttgcagtgagccgagaccacgccactgcactccagcctgggtgacagagcgagactacgtctcaaaaaaaaaaaaaaaaaaaagaaaaaatatatactccacataaagataacttatgatattggcaattgctgtaaaaaacttaaagcagggtgagagggcccaggaataccaagagaggtggaggttaccattttatagaggattgatcatcaaggaaggcctctctgagaaaagtcctgaaggaagtgaggaagcatgcttagaaatattctggagtggccgggcgcagtggctcacgcctgaaatcccagcactttgggaggccgaggcaggcggatcatgatgtcaagagatcgagacaatcctggccaacaaggtgaaaccccctctctattaaaaatataaaaattagctgggcgtggtggcgggcgcctgtagtcccagctacttgggaggctgaggcaggagaatcgcttgaacccgggaggtggaaattgcagtgagccgagatcatgccattgcactccagcctgggtgacagagtgagacgccgtctcaaaaaaaaaaaaaagaagaagaaatattctggaggaccagcattccctgccatggaaattgtcagtgcagaggccctgtggcaggagtgtgcagtgtgactctggagagcactgtggctatagtagagattagcaggagctgtcatcagagaggaaggagcaggaagggcagattctgccaggccttgccagccagtataagcactttggctttgcctttaggggaaatgggagtcaccagggggttttcagctgagaaaagacatgatcagacatgttttgaaaggatcagtcttggccgggcacagtggctcacgcctgtaatcccaacattttgggaggctgaggcgggtggattgactgaggtcaggagtttgagaccagcctggccaacatggtgaaaccctgtgtctactaaatgtacaaaaattagccaggtgtggtggcaagcacctgtaatcccagctacttgggaggctgaagcatgagaatcgcttgaacccaggaggtggagattgcagtgagctgagatcacgccactgcactccagcctgggtgacagaacgagactctgtctcaaaaaaaaagaagctctttgtggcaggggaagctttttgcagtagaggaaggcctcactgagaagcacttccagaaaagtccttaaggaagtgaggaagcatgtttggtgggaggtgattggaccatgggaacagatttcccccttcctgtttttgtgataatgagtgagtgctcatgagatcttgttgtttaaaagtgtgtagctggccaggtgtggtgactcttgcctctaatcccagcactttgggaggccaaggcaggcggatcacctgaggtcaggagcttgaaaccagcctggctggcatggtgaaaccctgcctctactaagcatacaaaaattagccgggcatggtggcatgtgcctgtagtcccagctactcaggaggctgaggcaggagaattgcttgaacccgggaggtgagggttgcagtgagctgagattgtgccattaccctccagcctgggcaacaatagcgaaaatccatcttaaaaaaaaaaaagttctagaaatggacagtgataatggctgcacaacattgtgaacgtacttaatgccactaaattggacacttaaaagtggttaaaatggtaaattttatgttacgtatatcctaccacaatatataaagtgaagaggcaaattttatgtgtattttactatgcacaaaaaatcccaaaactctgcaatggccatcccagcatccccaccttattattgtaaaccatttcatggagctatcccagaagcatgttaggactggctccagctacatcctgtgttgcaggagagttctcccctgtcaataaactatctcctttcttttttaattaattaatttatgtatgtattttttcatttgagacagagtcttgctctgtcgcccaggctggagtgcagtggtatgatctcagcccactgaaacctctgcctcctggttcaagtgattctctggcttcagcctccagagtagctgggattacaagcatgtgccaccatgcccggctaattttagcagagatggagtctcactatgttgcccaggctggtcttaaactcctggcctccagtgatccaccagcctcagcctcccaaaatactgggattacaggcgtgagccaccacacctggcctactcattttatttgagacaggggctcactctgtcacccaggctggggtgcagtggtgagatttcagctcactgcaacttctgactccccggttcaagtgatcctcctacctcagcctcctgagtagctggtactataggcacaagccacaacgcccaactaattttggtttttaaaattttttgtagagacaaggtgttgctatgttgcccaagctggtcttgaactcctgagctcaaggtatcctactgcctcggcctctcgaggtgctgggattataagcataagccaccacgcctggccaaaactctctcctttcaaccttatatttgcatcatctagcaccctcaagatccacttctggccagatggggtggctctcacctgtaacccagcactgtgggaggtagaggtgagagaatcgcttgagcccaggagttcaagaccagcctgggcaacacagcgaggccttctctacaaaaaattaaaaattagccaggcatggtgacatgcgactatagtcccagctacttgggagtctgaggcaggaggattgcttgagcccaggagattgaggctgtagagagaagtgtttgcacaatggcacttcagcataggtgacaaagcaagaccctctctcaaaaaaaaaaaagatccactcccacacatagtccctttatttctcccagtccttattagctggtcctggtcctcatgggtgaagtattttctccaaaagcagaagctgtatttcccatcccaagctataacactgagacctgccccagttattgagtctgaagcaatggcaggctctctgctcctcctgttcgactgacagctgcatcttctcatgcagcaccaattgcgtccctgaggcaccaagggaaaagcgaaggctggagtaaacagatttggacatattggatgcctggttaccagggctgcttttaactctagcacaatggatattgttgccatcaatgaccccttcattgacctcagctaaatggtctacatgttcgagtatgattccacccatggcaagttccacagcaccatcaggctgaaaacgcgaagcttgtcaccagtggaaatcccatcaccatcttccaggaatgagatcccaccaaaatcaaaggaggtgatgctggtgctgattatgttatagagcccaccagtgtcttcactaccatggagaaggctgggacttacttagatgggggagccaaaagagtcaccatctctgccccttctgatgcccccatgtttgtgatgggtgtgaatcatgagaagtatggaaacagcctcaagattatcagcaatgcctcctgcaccaccagttgcttaacccccctggccaaggtcatccatgacaactttggcaccatggaaggactcatgaccacagttcatgccttcagtgccacctagaagactactgatggtacctctgggaaattgtagtgtgatggctgcagggctctctagaacatcattcctgccaagcctgtgggcaaagtcatccccgagctgaatgggaagctcactggcgtggccttccaygtccccaccaccaacatgttggtcatggacctgacctgccatctggagaaacctgccaaatacagtgacatcaagaggatggtgaagcaggcattgagggagatcctcaagggcatcctgggctgtactgagcacaaggtcgtctcctctgactttgacagtgacacccattcttccatcttcaatgctggggctggcattgccctcaacaatgactttgtcaagctcatttcctggtatgacagggtggtgaacctcatggtccacatggcctccaaggagtaagagccccaggccaccaatcccagtgagagcacaagaggaagaggggggccctcagctgctggggaaccctgctgcgctcagcccccaccacactgagcatctcccctcgacacagtttccatgtcagacccctgaatagggtggggcctacggagacccaccttgtcatgtaccattaatgaagtcccctgtactttgccaaaaaaaaaaaaaaagtcccttgtacttgcgagtgttaagagtcaggagaagtaacaatgagaggaaatgaggagcatatctgaggaaaaacatcctcttgcaagtcagttgaatcctagcatgacttccagacaagggcaggctgctctcctctagcaagggagagaaggttacttttgctggcctggaatgttcagggggttcagagaaatctgggggttcagtgttctcaagtacacccagatgtcccctgctaggcatcagggttccaatcctttcctatcagggacttgactttggctttggtgatgtgttagggctgcccatattccatctttcttgcacctctgcaactcttacaattagaatctgggtcttattctcagcaatgtctgccttattgctgcagaagatgagggtctctcattgttgctttggaggccttctggcttttgttgtatgtcctgaattgatagctggctatctgactctgccattttttttttcttatctcttctttttttttgagacagagtctccctctgtcacccaggctggagtgcaatggcccgatctcagctcactgcaacctccacctcccaggctcgagtgatttttgtgcctcagcctcctgagtagctgggattacaggcacctgccagatatccaactaatttttgtattttagtagagatggggtttcaccatgttggctaggctggtcttgaattcctggttctgccaggatctgcccaccttggcctcccaaagtactgggattacaggtgtgagccactgcacacagagtctgccatttttttcttccagtcttccaaagcagttaacaaaaaccagctaactccatagtccttataattaccacagctcccacactgttcacatctagagctactgcatagttcaatgtttcctcttccacttatacttcatttcaaccaaccacaggtaagagtgtcaatatgatgctactgcacaccaggccagggttgttaagccccctatttaccaccagcaatggaatccttgttggcttctgactggtaattgatatattccagaaactcaattggatggagttgtgggggaggtccccttctttctactgtcactcctggtaccaattttcttaatttgattttctctaaaagcagagcttgaaacaaggacttgtgtgcagtagtttattttagatgtgattttaaggagcaggtgtcagggaacagagtgagtcagggaagaaggaaaagccaggataagggtacattgccaagtttgctgctgtgggcaatgggggctcaatttgtccaggctctcccgggaagtttaagaatgtctaccagccgggcacggtggctcacgcctgtaatcctagcattttgggaggccgaggcgggtggattgcctgagctcaggagttcgagaccagcctaggcaacacagtgaaacctgtgtctactaaaccacaaaaaatttgccaggcgtggcagcgcgcgtctgtagtcccagctactcgggaggctgaggcagaagaatcgctagaacacgggaggcggaggttgcagtgagccgagattgcaccactgcactacagcctgagcgacagagtgagactctgtctcttaaaaaaaaaaaagaaaatctgggacctcctccctctttctcaggtagctgaggcatgagaaccacctctaggaggcagaggttgcagtgagccaaaaaggtgccactgcactccggcctggcaacacagcaagattccgtctcaacaacaacaaaaaagttccgttttaggccagatgcggtggctcacgcctgtaatcccagcaatttgggaggccaaggcaggtcaatcacgaggttaggagattgagaccatcctggctaacacggtgaaacctcgtctccactaaaaaaaaaatacaaaaaattagccgggtggtgacgggcacctgtagtcccagctactcgggaggctgaggtgggagaatggcatgaacccgggaggcagagcttgcagtgagccgagatcacaccactgcactccagcctgtgcgacagagtgagactcaatctcaaaaaaaaaaaaaaaaaaaaagttctgttttagacatgctacattggagatgtctattcacttcctaatggaagtagtggttagcagttggatgtaagagtcagaagttttagccaggcgtggtggcgcatgcctgtaatcccagccactcaagaggctgaatcaggagaatcgtttgaacctgggagacggaggttgcggtgagccaagatcaggccattgcactccagcctgggcgacagagcgagactctgtctcaaaaaaaaaaaaaaaaaaaaaaaaaaagaagttcaagggagaagtcatgcctgaagataaaaaatgtttattttatttatttatttatttatttatttatttatttattttgagatggagtcttcctctgtcgcccaggctggagtgcagtggtgtgatctcggctcactgcaagctccaactcccgggttcatgccattctcctgcctcagcctcccgagtagctgggaccacaggcgcctgccaccaggcccagctaattttttgtatttttagtagagatggggtttcaccgtgttagccaggatggtctcgatctcctgaccttgtgatcctcccaccttggcctcccaaagcgctgggattacaggcgtgagccaccgcgccctgccattttattttttattttatttagcaatctcaaaagctcacagagatataaatttaaactgatgagactggatgtgcttacttagggagtgagtgtgaataaaggtgttgtgaggactgagctcttgggcattccaaagtttacagtttgggaaaatgagcattactgtccagtatctcctcctcttccacatgccatagtcttcccatctccatttactcatcctttcatccatcagacaaatcattacacagcatgtactacataccaggcactgtgctaggctctgtggatacagtggggaaaaacgagcaaatgcctggtataagggagcttaaactaaagtggggagagacaaataatgacaagcaagctgataagtgaacgagatgtccttttcagggttcaaatccagacaaatccatgtaacttaatcacaaagggctttagggactcacaaaatcatggctctggagttaggccatccctgccattatctgcactaccaaagtgactgagcctggccagaggaacttaaaccaagactgagcagcaagggaagcagagaggggtgggtctgagctctctggcctttgaatggtaggagtgaaggtgggaggagtgaacactgagcaagtcaatccataatgccagctacacaggctgattactgactgtttttagtgtcactgaggaaatggatggggtgatgagagtgactgggggtgaaggggtcttttagagagggagttaaggatgtcctctttgaagaattcaggtagcatgctcaacacccattctactacaaatgattactttaaaccagtgaatcaacagcaatctcattcctcttgccagtgactgtttcaggggtgagcatgtctactggacacccatgtgcatctcttcaggtccttttcaccacacctagctcatagttcatccattgacctgctctggcacagtccccaacaaagtccaggtacaggtgcagatacagctgtgacctcacggtgctgtgtgccttttaccctctgtcttgggtcttctctgttgctgccacaacttagaatctgggaatccacggagtgccctcgcatgaacaacccagaagtgcagggagagttaatgctccttaggggaacctttgaccaatgtagggtggaagccatggataggtactttccccaggattccccaggacataccatcctgaggcatatttcatgtagcttcccagcagccccataggttagagcaaccaaacacttttagccctggccaaccggaaatcattgctttgttgctatctgcttctctgctttgctcctctaccctccttcctgattcccaggatcgctcttcccagtaaaataccgacacaccccctttgtctcaggctctgttttctgggaactggaggctaaagcagcatgtgactcattcttactagtgacagtaaaggggaggagtgttgtggtgagaggcatttggtaaagatttccttgttcttgcaaagatgatacaaaacgagattgtctcttttgccccctttgaactttgttttgcctggacatgacactggtgtattagttggttctcacactgctataaagaactccttgagactgggtaatttataaagcaaagaagtttaattggctcatggttctgcaggctgggcaggaagcgtggctgtggaggtctcaggaaacttaaaatcatgttggaaggtggtgaggaagcagggtcatcttacatggcaggagcaagaggaagcaagcgaaggggaaggtgctacataccttcttttcttttcttttttttttttttgtttgagacggagtttcgctcttgttgcccaggctggagtgcaatggcatgatctcggctcactgcaacctccgcctcctgggttcaagcgattctcctgcctcagcctccccagtagctgggattacaggcacctgccaccacacccggctaatttttgtatgtttagtagagacagggtttcaccacgttggtcaggctggtctcgaactcctgacctcaggtgatctgcccgccttggcctcccaaagtgctgggattacaggcatgagccaccacacccggccagctacacacttctaaacaacaagatttcatgagcactcactatcacgagaacagcaagggggaaacccgcccccatgatccaatcaccttctaccaggtaactcctccaacactggggattacaatttgacatgatatttgggcagggacagaaatccaaaccatatcagttgggaacacttgcagcagtggaaagtgtcctcattgatgggatccatcgggttgtcagaaggaaacagaacaaactcaaacagggaaatgcaggagagtttagtaaagggcctatttgccagggtttgggcatagctaagggagatcaacagggaatgctgagcagtgtgctggggctatgaacagcagagagccactgccgctctcaggcctgggggctgagggaaggggagaagtgagcagaatccagaaagagcagttaaaaagtgagggagcccggaatggtggctcacgcctgtaatcccagcactttgggaggccaaggtgggcagatcacctgaggtcgggagttcgagaccagcctgaccaacatggagaaaccctgtctctactaaaaatacaaaattaggtttggtggcacgtgcctgtaaccctagctactcgggaggctgaggcaggagaattgcttgaacctgggaggcggaagttgcggggagctgagattgtgccattgcactccagcctgggcaacaaaagtgaaactctaactcaaaaaaagaaaaataaacaaattagccgggtgtggtggctggtgcctgtaatcccagcttcttgggaagctgaggcacaagaacctcttgaacccgggaagcagaggttgcaatgagctaagattgcgccactgcactccagcctgggcaacagagcaagactcagttgctgtctcaaaaaataaaattttttttaaaagtgaggcgg

SEQ ID NO: 93692 - DNA, 23992 bp, Homo sapiens
aatgcccaggctcacacagtccacttcagacacctgcagacagaggggaagccaggatgaggggagagaggtctggggaggctgtgggaaggagggagtgggagtggacagcaggtctcatgctcacctggtctcctggtgggtccccagacagcgcacagtgcagtaccgggcaccgcagctgacacaggtgtagggggatgggaagccacagacagcacagaaggggcgctggggccgcgatgggggtcccgcacaggccgtcaggtagttagggccctcggccacactcaagttctgcagagacaaggggccggctctagaactcctccgcccacccacgcagcgaacacctgcccgggccaggctcaccccttccctgtggggtcctcccaggccgaccctcctctcacctgctcctccaacagggcctgaaagttttttcggaagcgaagtttaaaatgatcacctcgggttttcttctttttctttcctaggggtcaagggtgatccgttgcttggcacttgcccagaaagacagcagctttctctggttcatcactccccatgcccatgtgccctcctggttctttttgagacagtctcactctgtcacccaggctggagtgcagtggtgcgatcttgactcactgcaacctccatctcctgggttcaagtgattttcttgccttggcctcctgagtagctgggattacaggtgtccaccaccatgcctggctaattttgtttttgtatttttagtagagatggggtttcaccatgttggccaggctggtcttgaactcctgacctcaagtgatccgcccacctcagcctcccaaatgctgggattacaggcgtgagccaccacacctggccctgccctcctggctctaagtcggcccctcgctaccagcctctgccctccaccccaattctccaatcccagctgacagtcacctccatgcccccaagcctaaggcttcgtgtcagagcttatccagtctctcttgtttatttcacatacacgagaggaaactgaggcacagaaagggggtgtggttgctcacagccatgggagccagtcactggcagaggcaccaggagctcctgggtcctcccacagcctgagttgggcggactctcccgccctcctctcagtcccatcccccgcttcctcctccatccgcctcaccagtgtccgcatcgtcatcaaactgaggcagtctcttgccgagctgagggagtcccgcgtgggggtcatcctggaagttgtcattctccagggcctccagctgccggttgatgcgacgctgccgggcagcccggtccagcacccgccgctgcccggggtcctgggagcgaactggatggagcagggcacgcaaagttacagggcttccaagaaagagcagtgtggccgccgctctgggcagggcgaggaaggcacccggggtggaagctgcagctctctgatctcatccccattgccaagcccttggtccccttgtctcctcccgggccaagcccctgggcccacacttcctgtcccgccagctgagaccctttcagtttctcctgcctgttttctccgccttcctctcaatcccagtcccagccagtgagccccggcctggagacagctcactgctgactggggaggtcacagcgccctggggcttccaggctgtcctgggccctcaatacacatggccctcacactcagcatctcacctcctacctcaaaggaaccaggggccacccatgcttggatacgctcatcttccaggccacctacccacaaacgtgatgccaagtgggcacacccctgccctggagcgccccaagtcccaccactgaccccgagccttcacctccagcccattccctccctctcccatcttcaacccctcctcctcaaccggcactttccatcaaagagctggcgacgctcatgtgtctactcggcttcacagctccttctccttcacagcaactcacgtgatgtgtcactttttcacctcccatcctctccttgaaccccaaaatctgacacctgcctggtcatcctgggggaccacccacccacgctctgggccccagagcggctccagtgtgccttcctcctcctccttggacctgagccctgtccaccctgtggcggtgccgactaccttcatcgagtagaaagagaccctttgcttgcttccttgacaaaactgcaggccttctccatgtccaggaatcctccggctccagctcggctgctctccctgcctctatggaggtggctggccctcttctctgctcagtctatgcactcttcctgggattttgactccaaacaaagggctctgatgatcacccacaagcaaatgactcccagagtgactccctcaacacagaacctgctcccgggctccagaactggccatgcagccagcgcctggtgaggccgggtgtggtggcgcacgcctgtaatctcagcactttgggaggccaaaggatcgcttgatgccaggagttagaaaccagcctgggcagcatagccaaaccccatctctacaaaaaattaaaaaataagccaggcgtggttgcacatgcctgtagtcccagttacttgggaggctgcggtgggaggactacatgggcccgggaggttgaggctgcagtgtgcagcaagccgtgatcgcgccaccactccagcctgagtgacaaagcaagactgtctccaaaaaaaaaaaaaaagaaagaaggaaaaaagaaatcacccactggccctgtggacactgcaactcaaaaaaaaaaaaaaattcccatccaagtctgcttctcctgcagattctctctacgcaaatggaaccgtctatgcagacatccaaaccagaaacctagaagttattttaaacctctttcctcggctggacatagtggctcacccctgcaatcccagcactttgggaggctgaggtgggctcatcacttcaggtcaggagttcgagaccagcctgaccaacgtggtgaaaccatgtctctactaaaaatacaaaaattagcagggtgtggtggcacatgcctgtaatcccagctacgcgggaggctgaggcacaagaatcgcttgaacccgggaggtggaggttgcagcgagctgagatcgcgccattgcattccagcctgggcaacagagagagaccctgtctcaaaaacaaaaaacaaaaaacctctttcctcattgccttatcagctgtttgccagattctgataattttgcataatatatctctttattcattaaccacctgttaagcataataataacagcagcagccccagtagctatcacttgttggacacttactatgagccaggcacgtgctcagctctttgcaacacttgaaccatttaacccttacaacagctgtatgggacagtatcatcatccccaatttaccaacattcagagattaagaaatgtgtccaaagttcacatagctaacaagtggccaggtcaggagtcaaagaactacccagcatcaaaaagcatgaccttgccaggcgcagtggctcatgcctgttatctcagcactttgggaggccaaggtgggtggattgtttgagcgcgggagttcgaggccagcctgggcaacatggcaaaaccatgtttctacaaaaaaaatacaaaaattagccaggtgtagtgggacacacctgtagtcccagctattcaggaggctgaggcgcaaggattgcttgagcccaggagctcaaggctgcagtgagctgtgtttgtgccactgcactccagcctgggtgacagagcaagaccctgtttcaaaaaaaaaaaaaaaaaaaaaaaaacccaaaaccaaccaaacaaaaaaaaatatgattatgatcactgtactactctgtctcccctccaaatgccaggcagtgctctaggttttagggatgccaaagcttacagtccagtggcaaacacaaatgattaatgaaacaaacacagtaagtacagcatggagtaggctaggatacggaagtataaagtgctgcagagcccaggacagaaacacccaacctggccttggagtagtcagggaagacttcccagaagaaggtaagtctaggttaaggcctaactggtgaatgacctggctaggggagacagcggggtatttcagaccttgaggccaacatgaaaaaactgatggctgggagactgcgatgcctttgaaaaactgagagggccaagcgcagtggctcatgcctgtaattctagcattttggggggccgaggcgggtggatcacgaggtcaggagatcaagaccatcctggctaacatggtgaaaccctgtctctactaaaaatacaaaagataagctgggtgtggtggcgggcgcctgtagtcccagctactccagaagctgaggccagagaatggtgtgaacccgggaggcagagcttgcagtgaaccgagattgcgccactgcactccagcctgggggacagagcaagactccgtctcaaaaagaaaaaaaaagaaagaaagaaaaactaaaagggccaagcgcagtggctcatacttgtaatcctagcattttggaaggccgaggcaggaggatcacatgagctcaggagttcaagaccagcctgggcaacatagtgagacacccatctcaacaaaaaatataaaaactagcccagcatggtggcctgcacccacctgtagttccacctactcaggtggctgaggtggaagaatcacttgagcatgggaggttgaggctgcagtgagttatatagaaccactgcattccagcctgggtgacagagcaagactctgtctaaaaaaaaaaagtctttgctggctctccagtgtttccctacagagttcaaactcctgggcagtgtgtataatgcctttcaaaatgtaacctttccccagccttcgatcctttcttattactctgtaagatccaaactgtgaacttggcttcctaagcgacttgctttttcttgcttcactgcctttgcacgtgaggttcccactgagagaaaccctaactagactttcaagactcaattcaagctttttcatttttccttcaagctttcacagtcccctgcctcccagaacctgggctagatgccacgtctccctgttcccaggcgctgtgcttccctctgccatagcacaaatcacaaatcacagtaaaatacagtgttaggtctgcgtttctgccccccttccagaaaaagccaatgcttggataagaggggtctttctcctcttcatccccagcgcccggcttggagcaggcaccaataaaacgtgaatgaagggtcaacgccaggacccgagggctgaggaagggatttacgaggaatagctggggccgggcgcggcagctcacgcctgtaatcccagcactttggaaggcccacgcaggaggatcgctttgaggccaagagttggagaccaacctgggcaacatagcgagagcccgtcaccacataacaaattaaaaattaaccaggcgtggggcctcatgcttgcagttccagccactccggaggctgaggtgggaggatggtttgatcccaggaaatcgaggctgcagtgagctatgactatgccactgcactccagcctaggcgaaagagcgagaccaaaaaagaggaatgactaggtaagaaaattctaggactgacttgggaaggggaagggggcgaaccgcgggggctcacatacccgaagttttcttctccaccattggcacaacacaactgtcggaagaaactgctgcgcacgcgtactaaccccaaggctttagtaggggcgccatcacttccggtagcttgtacttctgcgcgtgcgccacagctttgactcattacgtggcgtttccttggagacaagaaagcttttcgccatgttttataggggcaaaaccacttccggcctcagtgtggaggtgtaaatcttgtgggagccacgaaatgggtcattttaaagatgtggtcacggtgttcttacragaaatcttattttcctttggtccttgtgaagatgctgtgatcacaaaggcagcccctggagcttctccgggcagaagaggaggtgggctggactgtcaaagaaagtggctggcttccgtgggcaatccgaggttcctagtggccctctgcagaaagctgaactcccagttcccccaggcctccgtcccgcggcggactcctaggcttcctccctccctgtcgccgccagcctctcgctctccccgtcttccgcccgcactctctgggcagggctgcggccaggacccgcccccgcgtcccgcccgaccctccgccaggggtcacttcccctgtccaggtttcagcttccacatgtgtcaagcggctggctcagcccagagtccctgtctcccgcccgccggcccgagccgccgcccctcccccgcctcccgtgcgcccgggacaatcctcgccttgtctgtggcgccggcatctggagctttctgtagcctccggatacgcctttttttcagggcgtagccccagccaagctgctccccgcggcggccgcacagcagcccgagcgccccctttccrgagctcccctccggagctgggatccaggcgcgtagcggagatcccaggatcctgggtgctgtctgggcccgctccccaccatgacctcctcggggcctggaccccggttcctgctgctgctgccgctgctgctgccccctgcggcctcagcctccgaccggccccggggccgagacccggtcaacccaggtgagatcccggggaggcccggcacggccgagggggcagaggctggcgtgcctgccagcctggcccggagagggtcggaggctcgaggaggtgtctggcccgtcccccgcccagcgtgctcttgaggctgagtcgcgccaagcccctcgcccatcactaccctgaactggggtttccagcctccctatgcaaagggactcggaattcctgggcaccactcscaccctgccctccttggggtcagagtgttcctgggtgagaagagtttaagaatgggaaggaagaaagggagggaagtcgagtgagagggaggacagcaaagcacgtgaggcccggagctgggcggtggatctcaagtgccatttccctctggtaacagagaagctgctggtgatcactgtggccacagctgaaaccgaggggtacctgcgtttcctgcgctctgcggagttcttcaactacactgtgcgggtgaggagagggaaaggcccctgggagggggtcccagcaggaggggtgggctgaagtctggatgcccaggtccccacggtaagcctggtcaggagttccccccacaactccccaccccttgcctggsacggggcaatcttctccacagaccctgggcctgggagaggagtggcgagggggtgatgtggctcgaacagttggtggaggacagaaggtccggtggttaaagaaggaaatggagaaatacgctgaccgggaggatatgatcatcatgtttgtggataggtaacggggctggggatagggagcggggtaaggatgctgaggttcccagtggacccctgcccatcctccccttcctcacccagctacgacgtgattctggccggcagccccacagagctgctgaagaagttcgtccagagtggcagccgcctgctcttctctgcagagagcttctgctggcccgagtgggggctggyggagcagtaccctgaggtgggcacggggaagcgcttcctcaattctggtggtgagtggcagagtgcccaaggcagaggggccaagagcggtgggacacagagtgttaaaggcgcctgagggctggagacagcctgggggacaggccctgggaccctgggagtctcgaggtcaacactccccctccccgccaggattcatcggttttgccaccaccatccaccaartcgtgcgccagtggaagtacaaggatgatgacgaygaccagctgttctacacacggctctacctggacccaggactgagggtagggaaggcagaggagtgggcgcatcccgcagctctgtgggagtggaggcctcaggctgaatgggatttggggagcaaagggggttgcaaagagaaaaatgtgtgcctgggcgtggtggctcacgcctgtmatccaagacttttgggaggcttaggcaggaggattgcttgagtccaggaatttaagaccagcctggacaacatagttgagacctcatctctacaaaaaaaaagaaagaaaaaattagccaggcttcatggtgtacgcctgtaatcccagctacttgggaggctgaggtgggaccatcacttgagcccaggagtttgaggatgttttgcaccactgcattccagcctgggtgacagaatgagactctgtctctcacaaaaaaaggaaaaccatggtggctcatgcctataatcccagcactttgggaggctgaggcgggtggatcacctgagattgggagtttgagaccagcctggccaacatggtgaaaccccgtctctactaaaaatacaaaaattagccaggcgtggtgacactctcctgtagtcccagttacttggaaggctgaagcaagagaatcaattaaaccgggaggcagaggttgcagtgagctgagatcgtgccattgcactccagcctaagcaacaaaagcaagagaagaaaaaaagagagagaaaagtgagaaatgatgtcctttccactccttccattttaaccactccatcgcatctcattccatttaggagaaactcagccttaatctggatcataagtctcggatctttcagaacctcaacggggctttaggtgaggaggaagacagccgcaggtgggcgatgcgcagcctctgcagctaggggtcttgagctgggagaggcttctggaggagctgggctgatccaagcccacctctatgtggttttgtcaggcgtctgagtggctggttgtgtaagttgcactgtgctgatggtactaccagaagcaagggaagcaaaaacgtgtctggcatctgttgcacacatgctgtgcctgggcaccgggccagggacttttttttttgagacagagtttcgctctgttgcccgggccggagtgcagtggtccaatcttggctcactgcagcctccacctcccgggttcaagtgattcttctgcctcagcctcccgagtagctgggattacaggcatgcgccaccacgcccagctcattttgtatttttagtagagacagggtttcaccatggtggccaggctagtctcgaactcccaacctcaggtgatccgcctgcctcaacctcccaaagtgctgggattacaggcatgagccactgtgcccggtctacttctgtgattccatttaacaaagggaaggtccctggttatccttcttgtacagatgaggaaaacagcttgtggaggggttggtgacttgcctcaggggatggggagaacggggagagagagaggccaggcacggtgcctcacgcctgtaatcccaacattttgggaggcccaggcaggaggatcacttgaggtcaggagtttgagaccagcctggccaacatggcgaaaacccgtctctactaaaaaaaagtacaaaaatgagctgggcgtggtggcgggtgcctgtaatcccagctattcagaaggctgaggcaggagaatcactggaacccgggaggcagagcttgcagtgagccgagattgcgccactgcactcctgcctgggtgacagagtgagattccttctcaaaaaaaaaaaaggccaggtgcgacagctcacatctgtaatcccagcactttggaaggctgaggcgggcagatcatgaagtcagaagtttgagaccagcctggctgacatagtgaaacccagtctctactaaatatacaaaaattaggctgggtgtggtggctcatgcttgtaatcctagcactttgggaggccgaggcaggtggatcacctgaggtcaggagttcaaggccagcctggtcgacatggtgaaaccctgtctctactaaaaacacaaaaattagccrggcatggtggtgygcgcctgtaatcctggctacccgggaggctgaggaaggagaatcgcttgaaccctggaggtggaagttgcaatgagccaagatcgtgccactgcactccagcctgcgtgttgggagtgagactccatctcagcatraaaaacaaaaaatacaaatacaaaaattagccaggtgtagtggcatgtgcccatagtctcagctacctgaaaggctgaggcaagagaatcttttgaactcaggaggcagaggttgcagtgagccgagaccacgccattgcactccagcctgggtgacagagtgagactccatctcaaaaaataaaaataawaaaaaaaaaaaacaaggagagagagaatatgaggaggggtagggatgctgaggctcctactggcctcccgctcagctcaccctccccttcctcgcccagctgcggtgtgatcacgcaggtagtaggcagtggagctctctgggccagcagcctggtcagaacccaaaggttcctgcccacaacgagccacactccaggatagccctggtgtccctttattccctggagaatttgggaccccatatttagaagaatgtgttgcttggtagctcccagagaaagggggtctgaagcctggcctttttcttccccagatgaagtggttttaaagtttgatcggaaccgtgtgcgtatccggaacgtggcctacgacacgctccccattgtggtccatggaaacggtcccactaaggtgccaccagtggtctcaacccccgccccgccctgccccaacccccaggcacctccaacccttctgagaagctggcccttcccagcccccatakcagaggtgcctgacccccacctccacccctggaggcctcagccactcagcctcagtctgtccccaacagctgcagctcaactacctgggaaactacgtccccaatggctggactcctgagggaggctgtggcttctgcaaccaggacyggaggacactcccgggggggcaggtgaggtgggggtgccagggaggggcacgagagggcagcgtgctgagcaggaggtacaaggacagcggactggggggcggtgggggcatcgctcctgggtccctgcacctgtcagggtggaggttgggtgggggcagcagggaagtccgggcttctctctgagtccctgcgtgttgcatcttccagcctcccccccgggtgtttctggccgtgtttgtggaacagcctactccgtttctgccccgyttcctgcagcggctgctactcctggactatccccccgacagggtcacccttttyctgcacaacaacgtgagactcccctgttggagcctctcctgagggaccctttccctgccctgatcagaactctcgtgcccccacccccatctccttccygcacccccatccctcaggtgccgcctccctgccctctgagcccatccccctatgtcttcccctcccaggaggtcttccatgaaccccacatcgctgactcctggccgcagctccaggaccacttctcagctgtgaagctcgtggggccggaggaggctctgagcccaggcgaggccagggacatggccatgtgagcgggtgcttgcggggaggagagggtgggatgaggctgtagggtcaggggtgctgccacctgctgcctggcccttgcctcacctgtcacccatccagcccctcctgggcctccccattcgcatccttgcagcccccatgctgtcactcctgcccttgccagctcacscagacagcagagagcctggggaaggaaggatagacactgcctccctcctcttctcctgggggcatgggccagttaccccatccacaccgcctccccacctgccgccgtctcagctcgcctctcacctccagggacctgtgtcggcaggaccccgagtgtgagttctacttcagcctggacgccgacgctgtcctcaccaacctgcagaccctgcgtatcctcattgaggagaacaggtggcttaccccctctcccygcagccggagggcaccccaacaggccccgggaaccccactcctgccctgggcaccrggctccccaggcctgctccsgtctgcccagccctcacccccacctgtccrcaggaaggtgatcgcccccatgctgtcccgccacggcaagctgtggtccaacttctggggcgccctgagccccgatgagtactacgcccgctccgaggactacgtggagctggtgcagcggaagcgagtgtgagtcccgccagcctgcagccccccgcctcctccgacccggggcccaggtagacccaagccccctactctcaggggtttggagtggtcaccagtcagaggtgccatgaggctggctgcagtggctcacacttttgatgccaccactttgggaggctgargtaggaggactgcttgagcctgggagtttaagatcagcctgagcaacgtagcaagagcctatctctacaaaaaacttaaaatattagctgggcacggtggtgygtgcctgtggtcccagctactacggaggctgaggtgggagaatcacttgaacttgggaggttgaggctgcagtgagccatgtttccaccactgcactccagcctggaaacagagggagaccctttctcaagaaaataaaaaacaagggccggccgcggtggctgacgcctgtaatcccagcactttggaaggcagaggcaggtggattactcgaggtcaggagttcgagaccagcctggccaacatggtgaaaccccatctctaccaaaaatacaaaaatcagcygggcatggtggctggcacctctaatcccagctatttgggaggctaaggtgggagaattgcttgaacctgggaggtggaggttgcagtgagccaagatcacaccactgcaytccagcctgggtgacagagcaagactccgtctcaaaaaccaaaaacaagaaacaaaaaagaagtgccacagcttggggtaggaactgaccgcattttgggaggtggggtggttgkgaccagcagtgcttgacaagggacatgcaggggccttatgttcagggactgggataccctgagggaagaaggacttcccgggatgagctgggcagaatttggggggctgtcctccmagctgaccgcggtgtcggtgcctccaggggtgtgtggaatgtaccatacatctcccaggcctatgtgatccggggtgataccctgcggatggagctgccccagagggatgtgttctcgggcagtgacacagacccggacatggccttctgtaagagctttcgagacaaggtgagcgcgggtgcacggtctggcctgggggcagtcccccagactmcaggcatcgcctgcatcacggacacccccaccccactacagggcatcttcctccatctgagcaatcagyatgaatttggccggctcctggccacttccagatacgacacggagcacctgcaccccgacctctggcagatcttcgacaaccccgtcgtgagtggggaccccacgcccagagcacacaggttccccgccttgtgctaaggaagacaccaaacgtgatggctgctgccagcgcaggacactgagtgggagggggcggtcccctgggggctgggagcgaggggggcacagatctgatgtgccccccaccctctcacaggactggaaggagcagtacatccacgagaactacagccgggccctggaaggggaaggaatcgtggagcaggtgagcccacgcagcctccccacccaccccctgccctcatggccatcgcctcttgggggcccccgcctggattcaaagttttcacactgagttccccagagatctgagggttttctgttcagacaagatgaaggcagaggccgaacagaaaggactcttgcccccaaagccagcattgatcagacagcctcttctcctgtrtattgggtatactggtgttatgcttgaaatcacatcttaaaagaagaatggggctgggctcagtggctcatgcctgtaatcccagcactttgggaggccaaggtgggtggatcggttgaggccagaagtccaagaccagcctgggcaacatagcgagaatctgtctctacaacaacaacaaaaaaattaaataagaaatgaggccaggagtggtgctcatgcttgtaatcccagtacattgagaggccgaggcaggcagatcacctgaggtcaggagttcgagaccagcctggccaacatggcaaatcctgtctctaccaaaaaaaaaaaaaaaaaaacacaaaaattagtcaggtgtgatggcgtgcacctgtagtcccagctactcgggaggctgaggtgggagaatcgcttgaacctgggaggcagaggttgcagtgagccaagatcacgccactgcactccaccttgggtgacacagcragaccctgtctcaaaaaaaaaagaaaagaaaaaattagcttggcatggtggcatgtgcctgtagttccagctacttgggagtctgaggcrggaggatcgcttgagcccagaaggtcgaggctgtagtgagctatgattgtgccactgcactccagcctggttgacagagcaataccctatctcaaaaaaaaaaaaaagaggtatgcactgttacggaagtttggaaaccactgtcccagcacgaggggctccaggaccctctgccacctctcctgtgccagaaaccggtcctcagccttgccactccctcagcccctacctggcgggtccccggctgctctcacaaagccttccctgctcctccctgccccttcccattctgcctgctgcctgtccccttccccrttctgcggcgtcagctagccctgttctccctcgccccatcctcagccatgcccggacgtgtactggttcccactgctgtcagaacaaatgtgtgatgagctggtggcagagatggagcactacggccagtggtcaggcggccggcatgaggtaagggcctgggcgaggagggcagaggccttcccagaggaggaggtgcaggatctggtaaacaaacaatggaatcaggaaaatgggagcaaagaggggttcccaggggggaggcagaccctggggtcacaactgcattcattcatgtattcaagaaatatttactgctgggcacagtggctcatgcctgtaatcctagcactttgggaggctgaggcgggaggattgctcgagcagggggagtttgaggccagcctgggcaacatagcgagaccctgtctctacaaaaaatttaaaaattagccgagtttgggccaggtgcggtggctcacgcctgtaatcccagcactttgggaggccgaggcaggtggatcacctggggtcaggagttcgagaccagcctgaccaacatggagaaaccccatctctactaaaaacacaaaattagccgggcatggtggcgggcgcctgtagtcccagctactcgggagctgaggtagaattgcttgaacccgggaggcagaggttgcagtgagccaagattgaactccaggctgggcaacaagagtgaaactccatctcagaaaaaccaacaaattagccgggcatggtggcatgtcccagctattcaggaggctgaggcagaaggatcacttgagccccagagttagaggctgcagtgagctatgatcatgccgcagtactccagcctgggtgacagagcaagactctgtctctaaaaaaagagaaaaggaaatcattcctgggccactgtcctagactgcactgcaggaatgcctcatgccggtcgagctctgccctgctgtgagcagcagccaccacacagcttctaaggctgcgatgagcagcctgggtgcaatagaagccacggggaagccttgacccagacttgggaggagtagggagcttcacaggacaggtgacatcttagctgagacttgaagggccgggagcagtgagtcaggccragaagtagcaaagaagactgttctgcacagaggaacacaggtgtgaaggctggaggacgggaggaaggaggctggactgccctggggtggggagcgccatggctggaggggcgggtggctcagtgcccgccgcccccaggattcaaggctggctggaggctacgagaatgtgcccaccgtggacatccacatgaagcaggtggggtacgaggaccagtggctgcagctgctgcggacgtatgtgggccccatgaccgagagcctgtttcccggttaccacaccaaggtgcgctgcccacctgccagctgcctccccaccttccccaccccagtcccggacaggaagtctccacgcagacccctttcggccccggcagcatttgggctccatgcattttagttcccaggggaatgagacgctgcaggaggcaccccaggggagggagggcgccaggctgagacccaaggtgaggcttggccctaatttaatgccagtgagcagcgagagcctcctacgcaggggtcccgccgcccctcccctcccctccctggacagggaccgtcatctccctgaagacaccctgcgatggccgggcgtggtggctcacacatgtaatcccagcactttgcgaggcygaggtgggtggatcacctgaggtcaggagttcaagaccagcctggccaagatggtgaaacctcgtctctactaaaaatacaaaaattagccgggtgtggtggcaggtgyctataatcccagctactygggaggctgaggcatgagaattgcttgaaaccrggaggcagaggttgcagtgagccaagatcgagccaagatcgcaccactgcactccagcctgagtgacagagcgagactmtctcaaaagaataataataatacaaaataaaagaccccctgcgcccgcagctgtccctgcagcctcttccctcctctcccccaggcgcgggcggtgatgaactttgtggttcgctaccggccagacgagcagccgtctctgcggccacaccacgactcatccaccttcaccctcaacgttgccctcaaccacaagggcctggactatgaggtgcgccccagycacactacccacccacgcttcacctcaggaccctcgggtccccacctagagcccctgcgtgcaycccccagctcccctccctgcccatttcccagtgactttgtgggtatcagctcctggatcgcttctgggcaggcggcctctgcttcctcctggatcttcctgtctgcaggcaccccagcctccggtgtctgccatatctgccatctcccttgtcaccccggyctgctgcacygtgcccccyggtctggccgccctgccccgtgtatctgcctgctccccaggccccacgtctgctcactccatgtttcctttcccttctctttccagggaggtggctgccgcttcctgcgctacgactgtgtgatctcctccccgaggaagggctgggcactcctgcaccccggccgcctcacccactaccacgaggggctgccaacgacctggggcacacgctacatcatggtgtcctttgtcgacccctgacactcaaccactctgccaaacctgccctgccattgtgcctttttagggggcctggcccccgtcctgggagttgggggatgggtctctctgtctccccacttcctgagttcatgttccgcgtgcctgaactgaatatgtcaccttgctcccaagacacggccctctcaggaagctcccggagtccccgcctctctcctccgcccacaggggttcgtgggcacagggcttctggggactccccgcgtgataaattattaatgttccgcagtctcactctgaataaaggacagtttgtaagtcttgagtccattggtctgcccattaaccccatctcccctcctgccagcagcgtagaggggagagacccagaaaagcgaagacaagaggaaaagggagaggcagaatgttagaccctcgtgggaacctgggagcttccctggctcccactttccccttcccctgtattgcctgagctggagacagtgtgtgagaggggccgggcgcggtggctcacgcctgtaatcccaacactttgggaggccaaggggggcggatcacgaggtcaggagatccagaccatcctggctaacatggtgaaaccccgtctctactaaaaatacaaaaaattatccaggcgtggtggcgggcatctgtagtcccagctaatcaggaggctgaggcaggagaatgacatgaacccgggaggcagagcttgcagtgagctgagattgtgccccggcactccagcctgggccacagagtgagactccatctcaaaaaaaaaaaaagtgcatgagagggcacagaccaaaagagggacttcccaggctgggcacagtggctcacacctataatcccagtactttcagaggccaaggcaggcggaggatcactggaggccaggagttcaagaccagcctggacaacatagcgagaccccccccatctctacaaaaaataaattagctgggcgcgatggctcacgcctgtaattccagcactttgggaggctgaggtggatggatcacctgaagttgggagtttgagaccaccctggccaacatggtgaaaccctgtctctacttaaaaaatacataattaagctgggcacggtggcccatgcctgtaatcccagcactttgggaggctgaggcggacagatcacgaggtgaggagttcaagaccagccaggccaaaatggtgaaaccgcatctctactaaaaaatacaaaaattagctgggcatggtggcgggcgcctgtaatcccggctacttgggaggctgaggcaggataattgcttgaacctgggagggggaggttgcagtgagctgagatcgcgccatcacactccagcctgggcagcaagaatgaaactccaactcaaaaaaataaataagccgggctcagtggctcacgcctgtaatcctagcactttgggaggccgaggcaggcaggcagatcacttgaggtcaggagtttgagaccagcctggccaacatggtgaaaccctgtctctactaaaaatacaaaaattagccaggtgtggtggcacaggcctgtaatcccagctactcaggaggctgaggcaggagaattgcttgaacctaggagacggaggctgcagtgagccaagatcgtgccacggtactccagcctgggtgacagagcaagacttcgtctcaaaacaaaaaaacaaaacaaaaaaagctttccacgctacccacagagggctccatccggcgttgttctggattcctgttgtaacttaaagagaaactttcacaacatccggagcccttgatgtcctgcaaatgaaggaggaagatgtccttaatttccttgcagcaggaaaccaattaggtggcaccaaccttgacttacagatggaacagtacatgtataaaaggaaaagtgatggcatctacatcccaaatctgaagaggacctgggagaagcttctgctggcagctcgtggcattgttgccattgaaaaccccgctgatgtcagtgtcataccctccagaaatactggccagagggccgtgctgaagtttgctgctgccactggagccactccaatcgctggccgcttcactcctggaaccttcactaaccagatccaggcagccttccgggagccacggcttcttgtgtttactgaccccagggctgatcagcagcctctcacagaggcatcttatgttaacctacctaccttgctctgtgtctcacagattctcctctgcgccatgtggacattgccatcccaagcaacaacaagggagctcactcagtgggtctgatgtggtggatgctggctcgggaagttctgcgcatgcgtggcaccatttcctgtgaacacccgtgggaggtcatgcctgatctctacttctacagagatcatgaagacattgaaaaagaagagcaggctgctgctgaaaaggctgtgacaaggaggaatttcagggtgaatggactgctccggctcctgagttcactgctactcaacctgaggttgcagactggtctgaaggcgtgcaggtgccctctgtgctatctagcagttccctactgaagactggagcattcagcctgccacagaagactggtctgcagctcccaccactcaggccactggatgggtaggagcaacaactgaatggtcttaaacacctgtactgtgagctccccctgccccatcttccagcccaggtgcacctggcagcctggctcttgcattcctcggctgggcttggatgctggcggtcctctacctggtctggctctattgggatagaaacatacccagggctggagcccgcagatctgcctgggtttgcaactgggcagtttgagacatttctgtgactacttccccctctcagtgaggacctgggctgtggggtgctgggtgcggttggggcttcagaatagactcttgggaccaccatctcccaaagtgcaatctcaccgttggggtggggtgcgcccgtctgctccccagctagttaaaactgcaaagttgggcacctcctggaactacctctttgacttccaccctcacagggtcctggtcgtgggagccttcgccaacttctgcacagagcccacgggctgctcctgcctcttccccaaactcccgccacacctgctcatgctgccttgttggttccatctcctcttcttccaggactacatcatgtcaggtggtgagaagaggaggaccttgctgctgtctcccgccccaccatcctcttcccaggggacactggggcccagctctcctttccccatgtcctctccactcttctttccaagtcccaggctttggctgggtgcggtggttcacacctgtaatcccagcacttgggaggcgcaggcgagaggatcgcttaaggccaggagttcaagaccagcctgggcaacacagtgaaaccccatctctacacaagaaaaaacaaaaacaaaaatttagccaggtgtggtggtacacacctgtggtcccagctactgggaggcttgaggtgggagggtcacttgagccctgaaggtcaaggatgcagtgaaccaagatcaggccactgtactccagcctgggcaacagagcaagactccgtccctaaataaataagtaaataagacccaggcgttgggtcccccagcttctgccctccccccaggtttggtctcctttgtcaaggccccgctgcctcagtggtggccaggtggctgtcctggcgtgggagggcccctgcaggcgctggaggcaaaacccggacaactgagcttgccsattcggaatcagaagagattggttaagtcagctctggaactcgggtgaggacccgagcgtgacccggtggggacgccccagggctgccgggccggggaggaggagagtggcgccacccgcggaccccggggccaggagtcagccgcgccatgctctcctgcggcctccctagtgcctgtcttctccagggagaatgagctcttccagcagttcccgaacccgcagagctcgtgggtgcagaggacgcaggaggctctgcgtccgctgctaagcgtggccctgcagctgttcctgggccgccggggcctcccgctgcccttccgcgcgcccatccgcaccgtaggtgagccccggcctccgccccgcgatcctggcccagggcccgctccctccccgtcccgggttggggcctcgccacccagactggcctttggccaccgcgccagccctgaactctgttcccgcctatccccaaggaggaaaagaggaggagaaccggggatcccagcccagatcgcctcccgtcccgcccgcagtggggtcggcgattcccgtgcagcagagccccccgcccagtccggcccaggtggacacgctgcaagcgcgctacgtggggcgactcacgcagctcttcgaggagcaccaggcgcgctatggtgtccccgccgacagacacctggtcctcacggaggcgcgccccaccgcctggcctcgcctgtccgctgggtgactgcaggtggggaagtgaaattaaagactggcggcagggcacggtggctcacgcctgtgattccagcactttgggaggccgaggcgggtggatcacttgaggtcaggagttcgagaccagcctggccatcatggtgaaaccccatctctattaaaaatccaaaaaaaaaaaaaaaaaaattagccagacgtggtggcgcgcctgtaatcctagctactcgggaggctgaggcaggagaatcgtttgaacccgggaggcggaggttgcagtgagccgagatcgtgccactgctctccagcctgggtgaccgagacgtgtgaaaaaaaaagaaaaaaaagaaaagaaaagaaaaagaaaaaaattaaagtgggaaacagacctgcagcctgtgtgtgtttgtgcatggcgggggaggtccaggcaggggtggtgaccttgacattcctggagatgccccggaccaggccctgcccccaccccgactggaggtcaaatagtctcagcagggcttctggccccttccagcacctgggacccagtgggtggggctagccagatcactcttgtccactccaacatcaattcctgaggcactcgggtgtcacctctcccttgcacaccccttacgcctcccagccccacccagcagccagcccagactggtgactgacaggaagttcaaagatcaggctgagaaaaaacccagagacatctggggctctggatccaaagatctccccactcacacacctacggacacacgctactctgggaggtgatttgcgacttagccaggcccccaaagctgggctcctgtagggagaaagtctgcccaggtccacatccaagccttcatcgtttgtcctccgggttctgggatcctgctggaagaggggagcttctgcaatgggagttgccacaaccctgcagcccccaaccacttccaaaaccttgcagaagcagcatctagaagcagtgggcgcctaccaatatgtgctcactttcctcttcatgggtgagagctggggaggcgtgggtgcctggggtctgccaggggagtagggcttggagggagagtggctgggctgctggcttgcatgcctgaggacagtgaccaggtgactggtctgggagagggccagaggagagagctggttgttctgaaggggaggaagggaagggagcagctggagggaatgatggagtttcagaagtgaactcttttctttctctcccttcccccaggccctttcttctcccttcttgtctttgtcctcctcttcacgtcactctggcccttctctgttttttacttggtgtggctctatgtggactgggacacacccaaccaaggtgagctccggatgggggcccaggtagccagagatggtggggacatggggggtgaggggaggtgactccgggggttcgtccaccagtatctcattgtccgcaggtggaaggcgttcggagtggataaggaaccgggcaatttggagacaactaagggattattatcctgtcaaggtgatgggtcaccctgcagaaaaactgcttcctacctctccccatctccctcccacacctaggagcccttccttgtgctggggcctgagctccccgctgcctaagctcaggcagtgggacagggaatggatttttttttttttttagactgagtctcctgtcaccgaggctggagtgcagtggtgcaatctcagctcattgcaacctccgcctcctaggttcaagctattctcatgcctcagcctccctagt

SEQ ID NO: 93693 - DNA, 18813 bp, Homo sapiens
cgttgctcaggctgatcttaaactcccaggctcaagcagtcctcctacctcagcctcccaaagtggtggcatcaaaagtgtgagccactgcagccagcctcatggcacctctgactggtgaccactccaaacccctgagagtagggggcttgggtctacctgggccccgggtcggaggaggcggggggctgcaggctggcgggactcacactcgcttccgctgcaccagctccacgtagtcctcggagcgggcgtagtactcatcggggctcagggcgccccagaagttggaccacagcttgccgtggcgggacagcatgggggcgatcaccttcctgcggacaggtgggggtgagggctgggcagacgggagcaggcctggggagcccggtgcccagggcaggagtggggttcccggggcctgttggggtgccctccggctgcggggagagggggtaagccacctgttctcctcaatgaggatacgcagggtctgcaggttggtgaggacagcgtcggcgtccaggctgaagtagaactcacactcggggtcctgccgacacaggtccctggaggtgagaggcgagctgagacggcggcaggtggggaggcggtgtggatggggtaactggcccatgcccccaggagaagaggagggaggcagtgtctatccttccttccccaggctctctgctgtctgggtgagctggcaagggcaggagtgacagcatgggggctgcaaggatgcgaatggggaggcccaggaggggctggatgggtgacaggtgaggcaagggccaggcagcaggtggcagcacccctgaccctacagcctcatcccaccctctcctccccgcaagcacccgctcacatggccatgtccctggcctcgcctgggctcagagcctcctccggccccacgagcttcacagctgagaagtggtcctggagctgcggccaggagtcagcgatgtggggttcatggaagacctcctgggaggggaagacatagggggatgggctcagagggcagggaggcggcacctgagggatgggggtgcaggaaggagatgggggtgggggcacgagagttctgatcagggcagggaaagggtccctcaggagaggctccaacaggggagtctcacgttgttgtgcagraaaagggtgaccctgtcggggggatagtccaggagtagcagccgctgcaggaarcggggcagaaacggagtaggctgttccacaaacacggccagaaacacccgggggggaggctggaagatgcaacacgcagggactcagagagaagcccggacttccctgctgcccccacccaacctccaccctgacaggtgcagggacccaggagcgatgcccccaccgccccccagtccgctgtccttgtacctcctgctcagcacgctgccctctcgtgcccctccctggcacccccacctcacctgcccccccgggagtgtcctccrgtcctggttgcagaagccacagcctccctcaggagtccagccattggggacgtagtttcccaggtagttgagctgcagctgttggggacagactgaggctgagtggctgaggcctccaggggtggaggtgggggtcaggcacctctgatatgggggctgggaagggccagcttctcagaagggttggaggtgcctgggggttggggcagggcggggcgggggttgagaccactggtggcaccttagtgggaccgtttccatggaccacaatggggagcgtgtcgtaggccacgttccggatacgcacacggttccgatcaaactttaaaaccacttcatctggggaagaaaaaggccaggcttcagaccccctttctctgggagctaccaagcaacacattcttctaaatatggggtcccaaattctccagggaataaagggacaccagggctatcctggagtgtggctcgttgtgggcaggaacctttgggttctgaccaggctgctggcccagagagctccactgcctactacctgcgtgatcacaccgcagctgggcgaggaaggggagggtgagctgagcgggaggccagtaggagcctcagcatccctacccctcctcatattctctctctccttgtttttttttttttttatttttattttttgagatggagtctcactctgtcacccaggctggagtgcaatggcgtggtctcggctcactgcaacctctgcctcctgagttcaaaagattctcttgcctcagcctttcaggtagctgagactatgggcacatgccactacacctggctaatttttgtatttgtattttttgttttttatgctgagatggagtctcactcccaacacgcaggctggagtgcagtggcacgatcttggctcattgcaacttccacctccagggttcaagcgattctccttcctcagcctcccgggtagccaggattacaggcgcgcaccaccatgcccggctaatttttgtgtttttagtagagacagggtttcaccatgtcgaccaggctggccttgaactcctgacctcaggtgatccacctgcctcggcctcccaaagtgctaggattacaagcatgagccaccacacccagcctaatttttgtatatttagtagagactgggtttcactatgtcagccaggctggtctcaaacttctgacttcatgatctgcccgcctcagccttccaaagtgctgggattacagatgtgagctgtcgcacctggccttttttttttttgagaaggaatctcactctgtcacccaggcaggagtgcagtggcgcaatctcggctcactgcaagctctgcctcccgggttccagtgattctcctgcctcagccttctgaatagctgggattacaggcacccgccaccacgcccagctcatttttgtacttttttttagtagagacgggttttcgccatgttggccaggctggtctcaaactcctgacctcaagtgatcctcctgcctgggcctcccaaaatgttgggattacaggcgtgaggcaccgtgcctggcctctctctctccccgttctccccatcccctgaggcaagtcaccaacccctccacaagctgttttcctcatctgtacaagaaggataaccagggaccttccctttgttaaatggaatcacagaagtagaccgggcacagtggctcatgcctgtaatcccagcactttgggaggttgaggcaggcggatcacctgaggttgggagttcgagactagcctggccaccatggtgaaaccctgtctctactaaaaatacaaaatgagctgggcgtggtggcgcatgcctgtaatcccagctactcgggaggctgaggcagaagaatcacttgaacccgggaggtggaggctgcagtgagccaagattggaccactgcactccggcccgggcaacagagcgaaactctgtctcaaaaaaaaaagtccctggcccggtgcccaggcacagcatgtgtgcaacagatgccagacacgtttttgcttcccttgcttctggtagtaccatcagcacagtgcaacttacacaaccagccactcagacgcctgacaaaaccacatagaggtgggcttggatcagcccagctcctccagaagcctctcccagctcaagacccctagctgcagaggctgcgcatcgcccacctgcggctgtcttcctcctcacctaaagccccgttgaggttctgaaagatccgagacttatgatccagattaaggctgagtttctcctaaatggaatgagatgcgatggagtggttaaaatggaaggagtggaaaggacatcatttctcacttttctctctctttttttcttctcttgcttttgttgcttaggctggagtgcaatggcacgatctcagctcactgcaacctctgcctcccggtttaattgattctcttgcttcagccttccaagtaactgggactacaggagagtgtcaccacgcctggctaatttttgtatttttagtagagacggggtttcaccatgttggccaggctggtctcaaactcccaatctcaggtgatccacccgcctcagcctcccaaagtgctgggattataggcatgagccaccatggttttcctttttttgtgagagacagagtctcattctgtcacccaggctggaatgcagtggtgcaaaacatcctcaaactcctgggctcaagtgatggtcccacctcagcctcccaagtagctgggattacaggcgtacaccatgaagcctggctaattttttctttctttttttttgtagagatgaggtctcaactatgttgtccaggctggtcttaaattcctggactcaagcaatcctcctgcctaagcctcccaaaagtcttggatgacaggcgtgagccaccacgcccaggcacacatttttctctttgcaaccccctttgctccccaaatcccattcagcctgaggcctccactcccacagagctgcgggatgcgcccactcctctgccttccctaccctcagtcctgggtccaggtagagccgtgtgtagaacagctggtcrtcgtcatcatccttgtacttccactggcgcacgayttggtggatggtggtggcaaaaccgatgaatcctggcggggagggggagtgttgacctcgagactcccagggtcccagggcctgtcccccaggctgtctccagccctcaggcgcctttaacactctgtgtcccaccgctcttggcccctctgccttgggcactctgccactcaccaccagaattgaggaagcgcttccccgtgcccacctcagggtactgctccrccagcccccactcgggccagcagaagctctctgcagagaagagcaggcggctgccactctggacgaacttcttcagcagctctgtggggctgccggccagaatcacgtcgtagctgggtgaggaaggggaggatgggcaggggtccactgggaacctcagcatccttaccccgctccctatccccagccccgttacctatccacaaacatgatgatcatatcctcccggtcagcgtatttctccatttccttctttaaccaccggaccttctgtcctccaccaactgttcgagccacatcaccccctcgccactcctctcccaggcccagggtctgtggagaagattgccccgtgccaggcaaggggtggggagttgtggggggaactcctgaccaggcttaccgtggggacctgggcatccagacttcagcccacccctcctgctgggaccccctcccaggggcctttccctctcctcacccgcacagtgtagttgaagaactccgcagagcgcaggaaacgcaggtacccctcggtttcagctgtggccacagtgatcaccagcagcttctctgttaccagagggaaatggcacttgagatccaccgcccagctccgggcctcacgtgctttgctgtcctccctctcactcgacttccctccctttcttccttcccattcttaaactcttctcacccaggaacactctgaccccaaggagggcagggtgggagtggtgcccaggaattccgagtccctttgcatagggaggctggaaaccccagttcagggtagtgatgggcgaggggcttggcgcgactcagcctcaagagcacgctgggcgggggacgggccagacacctcctcgagcctccgaccctctccgggccaggctggcaggcacgccagcctctgccccctcggccgtgccgggcctccccgggatctcacctgggttgaccgggtctcggccccggggccggtcggaggctgaggccgcagggggcagcagcagcggcagcagcagcaggaaccggggtccaggccccgaggaggtcatggtggggagcgggcccagacagcacccaggatcctgggatctccgctacgcgcctggatcccagctccggaggggagctctggaaagggggcgctcgggctgctgtgcggccgccgcggggagcagcttggctggggctacgccctgaaaaaaaggcgtatccggaggctacagaaagctccagatgccggcgccacagacaaggcgaggattgtcccgggcgcacgggaggcgggggaggggcggcggctcgggccggcgggcgggagacagggactctgggctgagccagccgcttgacacatgtggaagctgaaacctggacaggggaagtgacccctggcggagggtcgggcgggacgcgggggcgggtcctggccgcagccctgcccagagagtgcgggcggaagacggggagagcgagaggctggcggcgacagggagggaggaagcctaggagtccgccgcgggacggaggcctgggggaactgggagttcagctttctgcagagggccactaggaacctcggattgcccacggaagccagccactttctttgacagtccagcccacctcctcttctgcccggagaagctccaggggctgcctttgtgatcacagcatcttcacaaggaccaaaggaaaataagatttctygtaagaacaccgtgaccacatctttaaaatgacccatttcgtggctcccacaagatttacacctccacactgaggccggaagtggttttgcccctataaaacatggcgaaaagctttcttgtctccaaggaaacgccacgtaatgagtcaaagctgtggcgcacgcgcagaagtacaagctaccggaagtgatggcgcccctactaaagccttggggttagtacgcgtgcgcagcagtytcttccgacagttgtgttgtgcyratggtggagaagaaaacttcgggtatgtgagcccccgcggttcgcccccttccccttcccaagtcagtcctagaattttcttacctagtcattcctcttttttggtctcgctctttcgcctaggctggagtgcagtggcatagtcatagctcactgcagcctcgatttcctgggatcaaaccatcctcccacctcagcctccggagtggctggaactgcaagcatgaggccccacgcctggttaatttttaatttgttatgtggtgacgggctctcgctatgttgcccaggttggtctccaactcttggcctcaaagcgatcctcctgcgtgggccttccaaagtgctgggattacaggcgtgagctgccgcgcccggccccagctattcctcktaaatcccttcctcagccctcgggtcctggcgttgacccttcattcacgttttattggtgcctgctccaagccgggcgctggggatgaagaggagaaagacccctcttatccaagcattggctttttctggaaggggggcagaaacgcagacctaacactgtattttactgtgatttgtgatttgtgctatggcagagggaagcacagcgcctgggaacagggagacgtggcatctagcccaggttctgggaggcaggggactgtgaaagcttgaaggaaaaatgaaaaagcttgaattgagtcttgaaagtctagttagggtttctctcagtgggaacctcacgtgcaaaggcagtgaagcaagaaaaagcaagtcgcttaggaagccaagtycacagtttggatcttacagagtaataagaaaggatcgaaggctggggaaaggttacattttgaaaggcattatacacactgcccaggagtttgaactctgtagggaaacactggagagccagcaaagrctttttttttttagacagagtcttgctctgtcacccaggctggaatgcagtggttctatataactcactgcagcctcaacctcccatgctcaagtgattcttccacctcagccacctgagtaggtggaactacaggtgggtgcaggccaccatgctgggctagtttttatattttttgttgagatgggtgtctcactatgttgcccaggctggtcttgaactcctgagctcatgtgatcctcctgcctcggccttccaaaatgctaggattacaagtatgagccactgcgcttggcccttttagtttttctttctttctttttttttctttttgagacggagtctygctctgtcccccaggctggagtgcagtggcgcaatctcggttcactgcaagctctgcctcccgggttcacaccattctctggcctcagcttctggagtagctgggactacaggcgcccgccaccacacccagcttatcttttgtatttttagtagagacagggtttcaccatgttagccaggatggtcttgatctcctgacctcgtgatccacccgcctcggccccccaaaatgctagaattacaggcatgagccactgcgcttggccctctcagtttttcaaaggcatcgcagtctcccagccatcagttttttcatgttggcctcaaggtctgaaataccccgctgtctcccctagccaggtcattcaccagttaggccttaacctagacttaccttcttctgggaagtcttccctgactactccaaggccaggttgggtgtttctgtcctgggctctgcagcactttatacttccgtatcctagcctactccatgctgtacttactgtgtttgtttcattaatcatttgtgtttgccactggactgtaagctttggcatccctaaaacctagagcactgcctggcatttggaggggagacagagtagtacagtgatcataatcatatttttttttgtttggttggttttgggtttttttttttttttttttttttttgaaacagggtcttgctctgtcacccaggctggagtgcagtggcacaaacacagctcactgcagccttgagctcctgggctcaagcaatccttgcgcctcagcctcctgaatagctgggactacaggtgtgtcccactacacctggctaatttttgtattttttttgtagaaacatggttttgccatgttgcccaggctggcctcgaactcccgcgctcaaacaatccacccaccttggcctcccaaagtgctgagataacaggcatgagccactgcgcctggcaaggtcatgctttttgatgctgggtagttctttgactcctgacctggccacttgttagctatgtgaactttggacacatttcttaatctctgaatgttggtaaattggggatgatgatactgtcccatacagctgttgtaagggttaaatggttcaagtgttgcaaagagctgagcacgtgcctggctcatagtaagtgtccaacaagtgatagctactggggctgctgctgttattattatgcttaacaggtggttaatgaataaagagatatattatgcaaaattatcagaatctggcaaacagctgataaggcaatgaggaaagaggttttttgttttttgtttttgagacagggtctctctctgttgcccaggctggaatgcaatggcgcgatctcagctcgctgcaacctccacctcccgggttcaagcgattcttgtgcctcagcctcccgcgtagctgggattacaggcatgtgccaccacaccctgctaatttttgtatttttagtagagacatggtttcaccacgttggtcaggctggtctcgaactcctgacctgaagtgatgagcccacctcagcctcccaaagtgctgggattgcaggggtgagccactatgtccagccgaggaaagaggtttaaaataacttctaggtttctggtttggatgtctgcatagacggttccatttgcgtagagagaatctgcaggagaagcagacttggatgggaatttttttttttttttgagttgcagtgtccacagggccagtgggtgatttcttttttccttctttctttttttttttttttggagacagtcttgctttgtcactcaggctggagtggtggcgcgatcacggcttgctgcacactgcagcctcaacctcccgggcccatgtagtcctcccaccgcagcctcccaagtaactgggactacaggcatgtgcaaccacgcctggcttattttttaattttttgtagagatggggtttggctatgctgyccaggctggtttctaactcctggcatcaagcgatcctttggcctcccaaagtgctgagattacaggcgtgcgccaccacacccggcctcaccaggcgctggctgcatggccagttctggagcccgggagcaggttctgtgttgagggagtcactctgggagtcatttgcttgtgggtgatcatcagagccctttgtttggagtcaaaatcccaggaagagtgcatagactgagcagagaagagggccagccacctccatagaggcagggagagcagccgagctggagccggaggattcctggacatggagaaggcctgcagttttgtcaaggaagcaagcaaagggtctctttctactcgatgaaggtagtcrgcaccgccacagggtggacagggctcaggtccaaggaggaggaggaaggcacactggagccgctctggggcccagagcgtgggtgggtggtcccccaggatgaccaggcaggtgtcagattttggggttcaaggagaggatgggaggtgaaaaagtgacacatcaygtgagttgctgtgaaggagaaggagctgtgaagccgagtagacacatgagcgtcgccagctctttgatggaaagtgccggttgaggaggaggggttgaagatgggagagggagggaatgggctggaggtgaaggctcggggtcagtggtgggacttggggcgctccagggcaggggtgtgcccacttggcatcacgtttgtgggtaggtggcctggaagatgagcgtatccaagcatgggtggcccctggttcctttgaggtaggaggtgagatgctgagtgtgagggccatgtgtattgagggcccaggacagcctggaagccccagggcgctgtgacctccccagtcagcagtgagctgtctccaggccggggctcactggctgggactgggattgagaggaaggcggagaaaacaggcaggagaaactgaaagggtctcagctggcgggacaggaagtgtgggcccaggggcttggcccgggaggagacaaggggaccaagggcttggcaatggggatgagatcagagagctgcagcttccaccccgggtgccttcctcgccctgcccagagcggcggccacactgctctttctyggaagccctgtaactttgygtgccctgctccatccagttcgctcccaggaccccgggcagcggcgggtgctggaccgggctgcccggcagcgtcgcatcaaccggcagctggaggccctggagaatgacaacttccaggatgacccccacgcgggactccctcagctcggcaagagactgcctcagtttgatgaygatgcggacactggtgaggcggatggaggaggaagcgggggatgggactgagaggagggcgggagagtccgcccaactcaggctgtgggaggacccaggagctcctggtgcctctgccagtgactggctcccatggctgtgagcaaccacaccccctttctgtgcctcagtttcctctcgtgtatgtgaaataaacaagagagactggataagctctgacacgaagccttaggcttgggggcatggaggtgactgtcagctgggattggagaattggggtggagggcagaggctggtagcgaggggccgacttagagccaggagggcagggccaggtgtggtggctcacgcctgtaatcccagcatttgggaggctgaggtgggcggatcacttgaggtcaggagttcaagaccagcctggccaacatggtgaaaccccatctctactaaaaatacaaaaacaaaattagccaggcatggtggtggacacctgtaatcccagctactcaggaggccaaggcaagaaaatcacttgaacccaggagatggaggttgcagtgagtcaagatcgcaccactgcactccagcctgggtgacagagtgagactgtctcaaaaagaaccaggagggcacatgggcatggggagtgatgaaccagagaaagctgctgtctttctgggcaagtgccaagcaacggatcacccttgacccctaggaaagaaaaagaagaaaacccgaggtgatcattttaaacttcgcttccgaaaaaactttcaggccctgttggaggagcaggtgagaggagggtcggcctgggaggaccccacagggaaggggtgagcctggcccgggcaggtgttcgctgcgtgggtgggcggaggagttctagagccggccccttgtctctgcagaacttgagtgtggccgagggccctaactacctgacggcctgtgcgggacccccatcgcggccccagcgccccttytgtgctgtctgtggcttcccatccccctacacctgtgtcagctgcggtgcccggtactgcactgtgcgctgtctggggacccaccaggagaccaggtgagcatgagacctgctgtccactcccactccctccttcccacagcctccccagacctctctcccctcatcctggcttcccctctgtctgcaggtgtctgaagtggactgtgtgagcctgggcattcccagagaggaagggccgctgtgcactgcccggccttcagaaagrcagaatttcatcacccaatgcagggggagctcttcctggaccaagggaggagccgctcattcacccaacaaaactgtgtyttatytgccaggaaagaccagcctcactcctgggaactgtytggcaggtaggctgggccccccagtgctgttagaataaaaagcctcgtgccggaagccttcctgtttggtcgtggtgtgtttgaggtgatggtaatgggtcacccgtctctcctgctcacggctctgtctctcttcctcctgcctcccactcacccctgccaccgtccgcccctctgtgtccctgatcgcgagagattctgtcccattttcctgccacccccgagcccctgccctccttggctgcttctttaagtctttttggttattgatttagttgtttaaactattttatttatttattagagacagggtctcgcactgtaacccaggctggagtgcagtggtgcggtctcagctcactgcaacctctgcctcccaggttcaagggattctcctgcctcagcctcccaagtaactgggattacaggtggccaccaccacgcccaactaatttttttatatttttagtagagttggggttttgatgtgttggccaggctggtcttgagctcccaacctcaggtaatccacccgcctcggcctaccaaagtgctgggattataggcgtgggccactgcgcccggccatgtttttcctttttatttctccagttgctatattttcaaagtacagctaggttccagggatgggtgacagggaggtggcgggaggactgtggaacatgtgcagaatggtaccgcggagggaccttggcctgtcttcctctcaaggtacttaggcaaaggggagtggtccttgtccttggtgctgccagactgagggagcagttgtccttaggaagcccctgttaccaggggctgcagtgtgtgaagttattagcagtacggaaaacccagaagtttctgggaaacatgggggaattcatggtatagagcaaatttgtccaacctgcagcctgcatgtggcccaggatgactttgaatgcagcccaacacaaattcataaactttcttaaaacattatgagattcttttgcgatttttttttcttttagctcatcagctatcgttaatgttagtgaattttatatgtctcctaagacaattcttcttccaatgtggcccagagaagccaaaagagtggacacccctggattagaggcccctggtctgggtggccctgggtgctgtgactcatgtgaacttcttatacccataccttgtctaaatgaattgcaagctgtaatctcgtaaggtccttttggttgctgtattaaggcccagaaccctgttaacctcatagcaaagcaagtgcttagtaagtatccattgaacagatggcctcattaagatattagagagatccagcaaagtcaacgttaggcaccattttttttttttctgagatgcagtctcgctctgttgcccaggctggagtgcagtggcgccatctcagctcactgcaacctccacctcccaggttcaagtgaccctcatgcctcagccttctgagtagctgggattacaggcgcctaccactatgcccagctaatttttgtattttttgtagagatggggtttcaccttgttggccaggctggtttcgaacttctgacctcagatgatccacccgcctcggcctccaaagtggtgggattacaggtgagagccaccgtgcctggccagtcaccatgttaggccttcacttttgggtactttcctgggggttggctcaagtattccccagggttttcttgaggaactgcctccctttctctgaagacttgcagctgggcaggcagtactggttttggtgtcagcttcatgttggggggctgatgtcaggattcagagacaatccaggtgaggtggtttttcaagatggctcaaaaatctttgtcctcccattaaaaagtggagtgttacggccaggcaaggtggctcacgcctgtaatcccagcactttgggaggctgaggtgggcagatcacttgaggtcaggagtttgagaccagcctggccaacatggtgaaaccctgtctctactaaaaatacaaaaattagctgggcatggtggcgtgtgcgtgtagtcccagctactctggaggctgaggcagcagaatcgcttgaacctgggaggcggaggttgcagtgagccgagatcacgtcattgcactccagcttgggcaacagaatgagaccccggctaagaaaaaaaaaaaggccgggtgcagtggctcacgcctgtaatcctaacactttgggaggccaaggcaggtggatcacctgaggtcgggagtttgagaccagcctggccaacatggtgaaaccccatctctattgaaagtacaaaaattagccgggcgtggtggtgggcacctgtaatcccagctacctgggaggctgaggcaagagaatcgcttgaacccgggaggtggaggttgcagtgagctgagatctcaccattgcactccagcctgggcaacagagtaagactccatctcaaaaaaaaaaaacaaaaaaaacaaaattagccaggcatggtggcatgtgcctgtaatcccagctactcaggaggctgaggcaggagaatcgcttgaacccgggaggcagaggttgcagtgagctgagatcgcgccattgcattccagcctgggcaacagagtgagactccgtctccaaaaagaaaagaaaagactatttcggggctgaacaacaccatctgtgcttctccgtggcatcctaggctgggattcccgtccagcttgcactgtcagcacaatctctttggattctttcctaacttagctgactgtttcatattttgtggttataaaaagaggcacactggttctgttcaatgtaagatttctctccccagtgacgtactccgccttccaaaatgaccttgagaggacagggctggaccctgaaggcctctggttgctctctgatgccatccatgacattctctaggaagctgagtccagggactttggacccccattgaaaaaccataattcggccaggcaggtggctcacgcctgtaatcccaacactttgggagcccgaagcaggcggatcacttgaggtcaggagttcgagaccagcctggccaacatggtgaaacccagtctatactaaaattacaaaaatcagctaggtgtggtggcacacgcctgtaatcccagctatttgggaggctgaggcaggagaattgctggaacccaggaggcagaggttgcagtgagctgagatcacgccattgcactccagcctgggtgacagagcaagactcagtctcaaaaaaaaaaagaaaaaagaaagaaaaccataattccccaaggacagcctgaaacaattttgccagcttccttcatgctagggagattttttcctaccttgggagacacctggtctttgggaaatgtatactctgctctaaggttctagaaggtaaacctagtgtcatgtgataagggcagcacccccctttcctgggagcacagaggaggaagaggttggtgccagggtttggaagtgtggacacgggtggttactcctaaaaacttcaatgaggctgggtgctgtggctcaggcctgtaatcccaacgctttgggaggctgaggcaggagggtctcttgatcctagtagtttgagaccagcttgggcaacacagggagaccccatctctacaaaaaatttaaaaattggccgggcacggtgactcatgcctgtaatctcagcactttgggaggccgaggcaggcagatcacgaggtcaggagatcgagaccatcctggctaacacggtgaaactccgtctctactaaaaatacaaaaaattagccggcctggtggcgggcacctgtagtcccagctactcgggaggctgaggcaggagaatggcgtgaacccgggaggcggagcttgcagtgagccgagattgcgccactgcactccagcctgtgcgacagatcaagactccgtctcaaaaaaaaaaaaaaaaaaaaaattaaaaattagccaggtatggtggcgcacacctttagtcccagctactcagggaaggatggcttgggcctgggaggttgaggctgtggtgggcagcaatcactttactgcagtccaacctgggcaacagagcaagaccctgtctcaaaacaaaacaaaaaaaagatcttgattttaattgatgtgagttaggagagccaagaattctgggaagcagggcaattgtgtcttcagtcttggagaaatcctggtctgagtactaactagtggtgtagctcggacaggtcacttcacctctctgatgctgttggagccatgctgcagctattgcaagaattcaatacacctagcccgagacctgacttctagtgagtacgcagcaaatgagagcgcttgatgatactgccaagacctaaagcatgttgttgagtttttcacagccagctccctggggactaaacccagcacctggcccaattgtcaggtagccagcagtttgcatttacatttctttttttgagacagagtgtcactctgtcgctcaggctggagtgcagtggcatgatcttggctcactgcaacctccacctcccaggttcaagtgattctcgtgcctcagcctcctgagtagttagaattacaggtgcccaccaccatgccccgctagtttttggatgttttttattttttcttttaatttttttgagacagggtctcactctgtcacccaagctggagtgcagtggcacgatctcagctcactgcaacctctgcctccctggttgttcaagcgattctcctgctgcagcctcctaagtagctgggataacaggcacccgccacctcgcctggctaataattttgtatttttattagagatggagtttcattatgttggccaggctggtctcgaactcctgacctcaggtgatccgccaaccccggcctcccaaagtgctgggattacaggtgtgagcctctgcgcccggccagtggtttacatttgtgtttgctcctaggctgtgggttctttgagggcacaggcccactccagcttctagcagggaagcagctcagtatgtgttctgaaaaagggcaaatgtctccataaccctttgtagtcacatgtccacccgggaagaaatcaaaactcaacctggtgaccatattaaggcacacacttaaatgccgagttgtaaaactgggcacaggttgtttttcctgaagggggaagaagtgagaagaggcaggctggtgttgggaaaaggaggtagacatgtgggggtggcacactgaagacttttggaagtgcctggaggtgtcagcagttgtaattgacttttgtcttccttcactatagggagcactctcatggcctttcaggattgtaagacactttttgtttgtttttcaagacggagtctcgctctgtcgcccaggctggagtgcagtggcacaatctcagctcactgcaatatccatttcccaagttcaagcaattttcctgcctcagcctcctgagtagctgggattataggtgtgtgccaccactcctggctaatttttgtatttttagtagagttggggttttgccatgttggccaggctgctcttgaactcctgacctcaggtgatccgcccaccttagtctcccaaagtgctgggattacaggtgtgagccactgctcctggccctaatttttatttttttagtagagatggggtctcgctacgttgcccaggttggtcttgaattcctgggcttaagggattctcctgccttggcctcccaaagtgctgggattatggccatgatccactgagcctggcctgtaaaagacacttctactgagcctggcctgtaaaagacagaagacggtgtggaaggagaggattgcagttggtcacagacttgttggccacaggaccctttatgtagggagcagctcaaaaggcaccagggcatctggccaggcgcagcggctcacacttgtaattccagcactttgggaggctgaggcaggcggattacctgaggtcaggagtttgagaccagcctggccaacatggtgaaaccctgtctc

SEQ ID NO: 93694 - DNA, 12967 bp, Homo sapiens
aaaaattatttggtaaactaaggtccactctatccctaacactgtcaacaaatggctacccccaccactgtcaacacacagcacccacaattttttttaaagaaggcaaacatcttttaggcctttttggggtctggaggcaacatattcctcagttacaaattttacttaagccttttatactgttgctgacaaatcagcaaaccttgattgtagcatcctacactgaaatgctccaaaatccatctaaattgcaagrcaacaggcatttccattaaggcctattagagactctttcactctagaggctctattaacatccagttttctggggtctttggaccacccaaaatacccacaaattgtccatgaacttctaccataagaaattgacctctttgtgtaagaaattgtcctctttggctataccatacatacccttacagtggccattactgactgcattctgggctttcctgaaaacagaggctctcacaggccctgaacccatgactctacatatctaattgtgcttatatcttcaatgtaaaagaagtaccccacttttccaggcatggtggctcaagcttgtgatcctagcgtttgggaaggccaaggtgggaggattgcttgatcccaggagttcaagaccagcctggaccacactgtaagacatcctctctaccccccaaccaaaaaaaaaaaaaaatccatgcacggtggtgagcgcctgtagtcctagttactcaggatgccaagtggggaggattgcatgaacccaggaagttgaggctgcagtgagccatgatcataccttcagcctaggtgacagagcaaagccttattaaaaaaaagatagtaccccacaagttccgtgcaaccacagaggcttcctcctagaagacagaataaaatgtgagtgctctggcatatctcatcagaggaataggaccccttccatccccatcccccaaatctttgtagatgttatggttccacaggaatatcccttggccataatggagtgaatagaaaaggaatttggatactttatggacatcagcaacatcgtcacatgtgataaggatttctgaagggtgattactcttcatccctttatcaggatgtccctgacaccataggatccaaaggtcagcacaactatctctactttagggaagtcatcttagcattggataacctgtccaacaattggccccctctgcacatttttaaatattattggtcattgccagtggattggctattatttttaaatattattgttcattgcaggtggattggctattatttttaaatattattgttcattgcaggtggattggctatctcatctagcaatggcaacaacaaacattgcatatcccaaccgcctcttttggtttaaagagctctgatgacgtcctgcttcacaaatatacccaaaaaattaaaaatcaaacatgtcctgcacatgctaaaaccacaatacaaggcctcctgaagatattgcatactcccttcagagtttcagacactattgatagtgaccaaggcattcatttcacttccaaagctatacaatactggactcttgaatgatacattcaaaaaaacattcacctcccataccagcctcaaacaagaggcctacagaacatggtgatggtttatttaagcaagttsaaattcagttaactgaaacattgcacactttagctactagtgaaatatcagaggtgaattgcagcagggtcagattccatttttaatatttgactgctggcagctttcaagcctgaggacttccctttcccctctgctctgtgtctgggcaagctgataagaaagcccgatgctctatccttggcgctggtgggaattttaaaccataaaggtcccagcataagcaaaggaaccctcaccctctcctcatcccctatcaactataaaaaccctaaagccagtctttgttctctgttttatcaagaaattcagggacctgcttgagagctcattctgttttcctcagaaatacttatgtgagtaataaacctttcaataccctcttggtgagtgtgacatcatcaatcttgatatccaaacaaaattttgagttggggggggggttcatctcacttctgtggggtgaccacaacaaaatgcacttcagttattttggcatacgatatctgtaagtagggtctctagacattataatgcagtttgattgtattaccattaccaaaaagccttaaatcttttctgaaagcctatcttgtcatatgcgatctccaaactacaaaattctaactaaaacccctcagagcaaacttttcttgcaactaacatatggtctttctgatatgcctggataagtgtttcaaaatgaaaaaaaaatacattgtcccttgttttgcaattcttttctgcatgtgttatacaaaatttaaatccccaagcatttaaaaatgtccatcttagtcaaagcagcaatgtcctaattggttttgcatttagttttgaaaaaaagaaacttcagtggtttattttccaaggttcaattgccaatccacattacatttagtatgtattctatagaaaatgtattcttccaaaagtatttatacttaactaacccaaatatacttctgaaaaatcatctggtagtcattttttttttaatttgctttccacttttttcttgtaaacctttgtaatctttgttgaggaataaattctattttcctagcatttgtaaacagtggcacttgtgaagagtgtctagacttcacccacgtagccaagatgggtagtagttcacctctaagggtgatatcctggttgtgaaagtttcagaatctgggcagtatattaaatcacactaccttaagggagattagcatttatataaaaatcttgttgagagaaggtagggttatttttcagaaataagtttcagacatcaacaaagaaatttaggttaaggagaaataaaatgggagaaagaggatcaggattagtagctgatatcatcaaatgcagaaaagaattgagctctatgtccagaaaactgccactgagaagtagcattgtgacaactaagtgtgtggtgaaggttctcactcatatgatgcccaggggctgtgccttcacagtactggcgacacttgagacatgccttgtttcgacattgaagatgggcagagcgagcagcaaacctcccagctaagtcaatctccttggtttcctgagaaacacttctagatttaaactccttttatttttgaaaaaagactttattttattttttactgtaaaagagtttgctctttctaaagtcattttttattttctctttaaccatgtcccgacttttctcaacagagccagatgctttgtatggctttcaattctggaaacaaatgcgcacgcctgggcacacacacacttcattaatataatccccataaaagtttattactccctttgcctcatagcctcttttgaggtaagagatcagatcatagtcatctttagagtctttacttatgacgtagtattcaatacacaaatatatttctgtgtggtggtgttatctcattcaaaaggtaaacagacttatatgagatggtagaaaggttataaacaagacactcacttgtaacccacaccagaaatttagtctttatggcactgtcttattgtaactaaatacttacagcttctcatttgtcacattttaccatatataatatgatatcataattaatcattgaataacaagctcttctttttgtgggcaagattgcatcagattcatgtttgtattccacacagtgtattgtgcagagatgcattcattaaatgctcagtttgatgtttcttcaaaacatatttttgaatactattaatttcctagtgactatggtcgataaaatgactatctctgtttgcttaaggaatgcaacacaattccttgcacataataaccagtgatcaagtgtttgctgaatgaaagaataaatacattggttgacctggcaaagcacggaaatacaatttaaagtagagcaagtataaccatgagaacaaaacatcatgacacttttcaatagaataagtgagaattttatatatggctggagaaaaacaaaaacgcttgaatgagtaagtaacatttaacatattactatatccacatataggtttcaagggataaaggtagaaaagggtattcagggaaaagtcagtggtggggttttcctagagttatgatgtatgcatgagagtaatggggaaagctgctattagaaaatcaggatggaaaaaaaaatttaggaaaaaaatagttaataaatattagacacctaaattttttttttttttttttttttttgagacgtagtttcactcttgttgcccaggctggagtgcaatggtgcaatctcggctcaatgcaacctccacctcccgggttgaagcgattctcctgcctcagcctcctgagtagctgggattacaggcgcccgccaccgtgccaactcatttttgtatttttagaagagacggggtctcaccatgttggccaggctggtcttgagctcctgacctcaggtgatgcatccatctccgtctcccaaagtgctgggattacaggcgtgagccaccgcgcccggcctgaacaccttatttttattttttgatatttgctatatgatgatacagagtaaacttaattgttaatattccttaaaattatgttactagtctgtaaaaatcgaagaacaaacgcaactactttctgattgtagcgattttgttgaaaagcctctggattacatatggtacaagcaaaaaataaaataaaatgttacgtttctccaccgcattccatttgactcctttttaaataactatttgaatacctttcatccagtccaatgtaactagaacctcaaagatcccctcccctggtccaacccacaggctttattctttaaaggtcccttcaggaatccaggcagtcttctgtagggaggagacagggctggttctttcaaacaggattagttcataggtaaattcgcaaacccttgtcccaccagcaggggaagctcagcttactccaatgcagacttaacccttgtgcagccagaaagtatcagttccaggcacagctcccctggcatcaagactcttttcttggcaagagtcacatgttagcttctcaagctctagagaaaatatgtaaagttttttgaagagcggccttagcaccccctttccctttacctggaggcggagggaaaacacctcctccccttcatgcccctgatgctccaggagaatcctcagcctccgctttgctgtccaatctcatcctgtaagtgaagcagctctaatgcagcccattagaatgccctgcaaaggtgacctagcatctcattctgaattacttgtcctattttttggcatttggggatgtctatgaaactggaaatttaaggaaatgcaagccagaaccagtgctatgaaacccacttgtgtaaggctttatagcatcagtggcttttctctttgcctgttcctgccagcccattgataatctctttgttttcacctctataatataatataaataacataatataatataatctctttattttcactataaacgctgatgcgggccttgcaattaactaaagaaggcttgccttttagatgtgccaggtagctttagggcagacaatcaataccaggtatgcatagcatttacataattctgaagtcagtctggcaagtctttcctttccacaaaaatcaaagtgtttcctgatgggggttaataatctctctcattatagatctgaatattaagttttatgagcaaagctctgttctcctccctgttcaacagatagccacatcttctcatacagtgccaactgcatccctgagaaacgatagtgacagtgaaggccagggtaaatgaatttagtggtgttgatgtccggtcaccagggttgcttttaactccagtaamgtggatattgtcaccattaatgacactttcattgacctcagttacatgatttccacgttcctgtgtgatttcacccacggcaagtttcagggcattgtcaaggctgagaacaggaagttggtcatcaacaagaatcccacctccatcttccaggagtgagattccaccaaaatcaaatggataatgctggtgctgactatgttgttgaatacactggtgtctttactatcttggagaaggcttgggctcacttagaaggtagaactaaaagggtcattatctctgaccctttcrccaattctcctacgtttgtgatgtgtgaaccataattggtatgaaaacaaccatatgattttcagctgtgcctctggcatcaccaactgcttagtccccttgccaaggtcatctatgacaactctggcctcatggagagactcataaccacattccatgccatcactgttacccagaaaatgctggatggcccctctgggagacaggggtgatgaccgtggggctctccagaacattatccctgcacctactggcactgccaaggctatggacaaggtcatctctgtgttgaatgagaagctcattaacatggccttttgtatccactgccagtgtgtcagttgtggaactggcatgctatctgaagagagttgccaaatatgataacatcaaaaagttggtgaagcaggcattggggcacttcctcaggtgcatcctggcctacactgaacaccaggttttcccctccgattttaacagtgacacccacccttcyrgctttgatgttagagctggcattgctctcaaagaccactttgtcaagctcattacctggtaatggcaatgaagttkgttgtagcaacagggtattggacctgacgggccacatggccaccaaggaatgaaagctccctgctctaccagccttagagagagcatgagagggagagaggggtactcagttgctggagtctctgcccctactcagtcgcctgtcacattgagactctgtccttcgtgatgcatttttcaacccagaacccctgaagaatgggagtcttacattttaccaagtactatcaataaagttccctgcaataaagctccctgcaaaaacaaacaaacaaaaaacacccaatatttaatgagttaaaactatgatgcaaggggcaagcagatgggaactcctattgcaatgcgcttgagatcttttatatttcgtaaatacaaatgagcgtcagcaagctctttcattcaagcttaggccggaggtgttcgggtcacgatgagatagcaaaaaaagacagaaaaggaagcatagagttacctaagatggctcccagaaatgtgtgaatagtcaagaaagaacagagttaatgcaacaacaacaaaaaaacttagtcattgttaagctccagtgtaagccacagtaatacttctatccagatatcagctaagcaacactgctctttgatatttaaataaaattagcttaagctcttacctcaagtcctgtgggaagtcctgctgccaattcttgcagggattaaaattctcatggtcatttttgatggacatttctacttctgtgaaactcagatagcttctctcataagactttgtttttgaagcagtagtcactgaaaatttaggaagatcaagatagtttttatctcagcgaggcataccatttaaaattgatcttagatatttctgttacagcctctggctgctactccatctaggatttttccaatgattactttctgtgctaccttcagcttcctgataaaagttctctcttatccccctgtgaaggcttaaaaatcacaacccccctgccccccaagaagatatctacatcttaattcccaattcccagaacctgtaaatgttacctcatgatggcaaaaaaaaaaaaacccaaaataccaaaaaaaaaaaaatgattaaattaaggctcttgaagcaggaagattatcctgtctggatgggccttaaatccaatcatctgcatttttataacagggagtctaggggagatcttacaggcagtcacacaggaaagaagaggatgtgcagacagagcagagagaggtttgaaagtgctggccttgaagattggtgtgatgtcaccacaagcaaagcatgttggaagccaccagaaactggaggaggcaagaaatagattcttctagaccctcaaaaggaatgcagctctgtcaaccaccttgattttagacttctagcctcaataatcctgaaataatttattcccattgctttatgccaaaagccttgtgggaatttgtcacaacagccacggaaactaatacactctcacatctctcttacctctcccatacttctgttctccctattctctttcacccctagtttctctttgtttactgtgtgaagttaactgtctctttgtgcatatcttggttttcagaatgttcacctttgcacttcatctgaagtgcagaatgatctacccactgagaactgtgtaaaatgtgttcaacccttccaacagccattttctgaaatttagactagattgcatttctaggttatagtttccctacataagcaacccctgcccccaccttgagttcttggtaagatggtagtagagtgagtctgagggaaaaaaaatttttactcttttagttacaacacatatgaagattggaaatctggataaaacttccttacaaatataacaaattgacttttaaaaatacttcaaaataacaggtaatacaaccacatatgggataatgagaataaaaggttaaaaagcccagcagactacacatatttaccacatttaatagagacacagctaattgtgcaaactttcagaaacccttcatgagaggagggattgaatcaagtctacgttcatatcaaactgcagcttgagattaattgtaatggtcagcaactgactgaaacatttatgtattttggtaatacttaacatattgtgggtttatcagagtgtgatttgcaaaaacaccaaagacactggttaaacattcagattgattcaacctggacctcagtcagacacactgacacagagaaccaacaatttatatttccaacaaactaaatttcagaatcactagtcttcagagtgtgactcaaatattccattttgttacacatctctgtttaaggctcctaacttccaccttaggcaacaccttaattggaatggactgctgttactctctacatgaaatagatacccagtttgagatgggttaactcttatttaatctacttaaattgctacccatgtgacaaagaaaaagaagtctgagatgatttttaaaccatcataaaagacatccacaaatcactcatatagagcagaatagcataagctgctgagcataccaatagagtcacacctaaaagaagcctaagggaggatattccaaactgcctctgctcttgatttttttttttttttcctttcaaaaggctcaractgaaraccactgctgttagctctctggatgatttttgaaagtcctgaggtgcagcataagaaaggcaataatctcccaggtaactagatctgcaacctcacagggggccaagaaacacagctttttacttctgagttgatgggttactttggagaccaaaattatataacataacctgatactgccagctaagagggaacatgggtatttttaatcattcattacagtaacactttttctaagatttacggaagttaagaaatgtaaattttggttcatttcattttctgatatggcatttgctttaaatagaatatgttaaagactggtgaagaggaagtacacagggttgattttcaagctcatcatattacaatagatccatttttattttttaagtgataactttattacatggtatatgtatttggaattttactgttcactggttttcacagctatctgtaacaatgcacaaggaaataatatttatcaatggtaagctctatttcttcaatagtcaagcaagttttgcaagctacactatgtggagaggagcggacttccatatcaccagaatcatcataaattctgtttatttgtcactgcttacatgaagtaaaaattagtgcaaattaggagactcattaactttcaaaatataagctagtcgaggcgcagtggctcacgcctggaatcccagcactttgggaggccgtggtgggcggatcaccaggtcaggagatggagaccatcgtggccaacagggtgaaaccccgcctctactaaaaatacaaaaatgagctgggcgtggaggcttgcacctgtagtcccagctactcaggaggctgaggaaggagaagattgtgccactgcatttcagcctggtgacagagtgaaactccatcaaaaataaataaaaaataaataaataaataaataaataaataaatactagttgcctttttcttttcctcttggtaggaggacataaattgtttataaaagcttaagagtttctttacctgagaactaagcatcctgtttcactgacgtttttattacattggggaataaatcatgcaccaaccgcatgtttttatggcaaccttcttgtcagagaagccttgttttgcttatcatgagatgttcaggaaattagcactctgctgctctgaaagggccctcagacagcccagattgaagaacagattgcctcggcaattcctccgttcctttgtcgcaccttaataattatgcacattaagcaccaaaatgcctcccattgtgcactgctctggatcacggtaccacagaggaagccaatgtgaacacaatggatcaggagtattaaccagatcccatcttttatcagatcatgtgtagcagccaatgaattgaaattaaagagcagtacttgaaaagagcacttgaaaaaatgttcccaacttcattactgtaaagaaaaaaaaggagatgaattaaaattggagacattatatgcatttttattgtataagcctaaacaaatgacctatactagcctctaagttgaaaaagtgtacagaattttttttgctttaaaaataataataataaagaattttaaaaataactttcttggatcaaaatggaaagataaagaaatattaaaaatcaaaggtagcaagttgatacttcaataaattgttcctgtgaattaaattagtgtgcagttgtcaagaaattataaaataattatttggcttaagatattagattcctgtttttatataatttttgattaattttataaaataaaagcagacaatctgatatggtattaactttttttgataatatttactgaagcagcatttttacttaccttctatagtatttgtgcacaaatttgggagtcatttcttgctagttatactttggagaccagcagtaactattgtttagaatagtaggtatattattgtatttcttgctgtcatagtaataggtaacacaaaactacacattgctgagataattattcagaataattggtatgccaagttcccctttaaaaaattaaaatcattttcagtttgacaatgtattcgtttagcacttttttttttttttttactttaaatgaattcagtgcctcagaaaagtgctggattgacagacttttggagaggaggcttttgtttatccctcaaacgaggacagcatgggcagcagcaggggaagcttccacttttaggcaggtggaactctcaaaaaagaaaattcacactcctgtcaataccatttaaagttctcacttacaccagtttcacatgaaataaagcattttgtggttgtgactcacatctcactcttcttcccatgctaaactaaagttttccggccaattctggaattaatataaatctctcagggtgagagcctgcaaaactaataccaccatttctaaactccaataatgtgtcatcttttatctgtgaaattcatcctcagtctgactggaaacagattaaaataaactagagagaggaggtggtcaatgggaatctggttcatttcatgtgtatggacataacagatatttatttaatccaacaacagtatttatttttctcttcctagatgtgactgcttcaaaaaaatcttcacgcagattattttccagtttctgaaaggaaaattgttcttaggagaaattctgtaaaaacgtccactacctactaacccccattactaaaattttcagctgtctgctctctgaatttcttattttacattttttttctgctcccaggctcctggagatgagctctacccacacatcaatgagatgatttctttctttatttcagtgatatccatatactgcttgaatgtttcccaatttaaaccctgctaagtttagctgttttctttgtatagttcttaagagcttaattgagatataattcacatattatacaaataatgcatttaaattgtacagttcaatgtgttttagtgtacttacagagttggttaatcatcatcacaacttaattgtagaatattttcattactttaaaaggaaacctagtacacattaacagtcactcacaatccgtactcccttctctacccctagccacaggcacctctaaaaccatttatctattctttgtctctagaggtttattttcctattctagacattccatttaaatagcattatatcatataagattatttttgactgatgtattccagctagcaaaacatttttaagattcatcaacattgcagcatatatcagtattcaatttctttttattgccatgtgatattctgttatggatacattacattttatttattcattcagcagttaatgggcatttgcattttaaccttt

SEQ ID NO: 93695 - DNA, 22711 bp, Homo sapiens
ctcctcctggctggcagagagtctcttctggctgtgtcctctgtggcctttcctctttgcacctgcacctctgggatctctctgcctccaaatatcaacttttttttttttttgagacagagttttgctcttgctgtccaggctggagtgcagtggcacaatctcagctcactgctacctctgccttccgagttcaagcgattctcctgcctcagcctccccagtagttgggactacaggcatgcgccaccacgcccggctaattttgtagttttagtagagacggggtttctccatgttgctcaggctggtcttgaacttgtgagctcaggtgatccaccctcctcggcctcccaaagtgctgggattacaggtatgagccattgtatccaggctttttttttttttttttttttgagaggaggtttcactctgttgcccaggctgaagtgcagcggtagaatcactgctcactgcaacctctgcctcctaggttcaagcaattctcctgcctcatcctcctgagtagctgggattacaggtgcccagaaccactctactaatttttgtgttttttagtagagatggggtttcaccgtgttggccaggctggtctcgaattcctgactgcccacctcggcctcccaaagtgctgggattaaaggcatgagccagggcacttggccacccttctccttgatggacccccgccaagcgaatttgtgcccacactagaggtctcgtttaaagtaatcatctcggccgcgcgtggtggttcacgcctgtaatcctagcactttgagaggctgaggccagcagatcacttgaggtcaggagttggaaacaagcctggtcaacatggtgaaaccccgtctctactaaaaatataaaaaaattatccgggcgtggtagtggacgcctgtaatctcagctactccggaggctgaggcaggcgaatcgctggaacccgggaggcagaggttgcagtgagctgagatcgtgccattgcactccagcctggaagacagagtgacgctgcatctcaaaaagtaaataaataaaaaataaaaagaaattaattatccgttggctgggtgcggtggctcacgcctgcaatcccagcactttgggaggccaaggcgggtggatcacctgaggtcaggaattcaagaccagcctggccaacacggcaaaaccccatctctactaaaaatacaaaaattagccgggcgtggtggcaggtgcctgtaatcccagctactcgggaggctgaggcttgaatcgcttgaaccagggaggcagaggttgcagtgagccgagatggtgccactgcactccagcttgggcaacggagtgagactccgtctctaaaaatattaattaatgaattaattaatcatctgttgaaaaggacctgtctccaaatacaaccacacattgaggtagaggggttagggcttcaatatattgatttttgggagaaacagggcaacatggcaacaagccacagtcactgtgggcgggcctgagtggggagtgcaggggttcctgtcctatgtgtctgtctcccaggggagtcccgacctgaccctcacagcccctccactcagaccttcctgcgtgctccacccacctcattcctcctacacccaacagcacccagccctcctgcctcctcatgcccctcccttctgaaatccctcccagcagtgcagctctgggctaggacacagcctagggaacgtgactgagaaagagccaagaaaacactcagtgatgaagttggtgtttaagtaagattttcagtgaaaagtagaattgggtactacatggaggcttgagatgttcagagctttttgagaaagcagaacagaaagtagaagggcaaccaggaaccagaggggccagasaaccggaagagcgggccctccgaggagacagggagtgggcacctggatcttgggcctgtcaacgaagagtcaaactcagtaaaatatttgaagagatgtattctcagccaaatacgagtgaccacggcctgtgacacagccctcaggaggtcctgagaacatgtgcccaaggtggtgggggtgcagcttggttttatacattttagaggggcatgggccatcaatcaaatacatttaagaaatacaggagctgggcgcggtggctcacacctgtaatcccagcactttgggaggctgaggcaggtggatcacgcgttcaggaattcaagaccacccttgccaacatagtgaaaccccgtctctactaaaaatacaaaaaattacccgggtgtggtggtgtgcacctgtaatcccagctactcgggagattgaggcagaagaattgcatgaacccaggaggcagaggttgcagtgagccaagaccacaccactgcactccagcctgtgggacagagcaagactctgttccaaaaaaaaaaaaaaaaaaagaaaagaaaaggccaggcgtggtgtctcatgcctgtaatcccagcactttgggaggccaaggcgggcggatcacgaggtcaggagatggagcccagtctggccaacatagtgaaaccgcgtctctactaaaaatacacaaaaagttagccgggcgtggtggtgtgcacctgtaaactcagctagtcagggggctgaggcaggagaatcgcgtgaacccgggaggcagaggttgcagtgagccaagattgccccactgcactccagcctgggcgacagagcaagacacaatctcaaaaaaaaaaaaaaaaagaaaagaaaagaaaaagaaaaagaaaaaagaaaaaaagaaacaaaaaaagtaaagaaaagaaatacattggtttagtcctgaaaggtcagacgactcaaagtgagggaagcggggttggggggcttccaggctacaggtaaatttaaacattttctggttgaggatgggttgagtttgtctagagacctggcatccatagaaaggaaatgttcaagttaagataaaagactgtggagaccaaggttattttgaagtctcataatggctgcctttagagataatagatgacaaatgtttgctattcaggtctttaaaaggtccaattagttaatctgtttaggactgggaaggcctagaagaaaaagatccagctatgttaatagaggttctttacagatgcaaattttcccccaccagggacaactttgcagggccatttcagatatggcaaagaaacatgttttggggtaaaatattttatctttcttctttgtcacataatgttgtgtctgagtcagattggaaagtaactcacaatatatagggttaaataaaacccatttgtgccaggcgcagtggctcatgtctgtaatcccagcactttgggaggccgaggcgggtggatcatctgcagtcgggagttcgagaccagcctggccaacatggtgaaaccccatctctactaaaaatacaaaaattagccaggcatggtggcggggacctataatcccagctacttgggaggctgagacaggagaatcgcttgaacccgagaggcggaggttgcagtgagccgagaccgcaccattgcagtccagtccgggcaagaagagtgaaactcggcctccattaaaatacaataagataaaaaaataaaaaatagaacccctctgatgaggatgtatgggttgtaaggcatgactccccagaccccttagataggattttgggcaagattaaataaaacaaatcagagcttagtccaaaggcctatgaactaaaaataaagtctttagcccccaccgatcccccccaactttggcccccagtggccaggggtatctcagaaaaaccttaaaactgagttcccagccatgatgggaggggaggtcaggcacgcctcattatcaccccacccttttgcagtttagacacaactgaccagcagtaatgttaaaacagaatcataagacgggcagaaccagaacagactcttcatggcaatcagataccaaatcacaaccaggacctcaggccgtgccaggcaagggtgagatcacacaccccacacttaaacagtcaactctgttctgcctgccacaagatttttcttttgctctagcagctaaacaagcactgcctccagataaagatgaaaacaatcccacctcacccagcgcccggacacggagtaacagagcccctgctccacagccctaattcctactttccctgagcaagagactgatttctgtaactttctccagatcagaagaccacagaccatggactagttctgaatggtttacagacctggcaaattttggtgccttcatgtcctgaaaggaccttttgacatacaggcttaattgtggtacatttaaatgttgtctccaccgcaatgtgaggacggataatacagctgcttttttttttttttttttttaatagattgttgtttgtttgttttttgttttgagatggagtctcactctgtctcccaggctggagggcagtggtgcgatctcggcccagtgcaacctctgcctcccgggttcaactgattctcctgcctcagcctcccaagtagctgggatttcaggcacatggcaccacgtccggccaactttggtagttttagtagagacgaggtctcaccatgttggccaggttggtctcgaactcctgactgtcatacatgtccatatagaagaccacctaaacaggctttgtgtaagcaataatgccatttattcacttgggtgcaactgggctgagtctgaaaagagagtcagcgaagggagataggagaggggcagctttataggacttgggtaggcggtggaaagttacagtcaaaggcggtcatctgttgtcagcaggggagggggtcacaaggtgcatggtgggagaccatgagacccattgtccagaagaagaatgtcataaggtcgattgatcagttagggtagggcaggaacaagtcctaatggtggaatgtcttaaggttggttaatcagttaagggagaaactggctgtttcacttcttttgtgtttttttggctgttccagacttcttggctgctgcaggccatctggatgtatatgtgcagttcacaggggtcacaatggcttagctctggctcagcggcctgacactgacctcagatgatccacctgcctcggcctcccaaaatgctgggattacaggtgtgagccactgtgcccgcctgggatcatatgttacacgcatgtttgttcaataagcatggagtgcagccacccacatgaatattcatagctcctcctgtagcctgttcaatatgtatgtttagctaaccccttcagcataaagctcctgccccaacccctcctgcttctaaatgtctgtctctggtgttaaccagaggctgctcttcccaggctgctggatggctaccttgcaggctgtcacccttaacaagaaataaagtgtcatttgcaaatgcatcccttgtgtaatttgtaggtcaccgcgccatgggaacacgctaccaggggaagggagctgtgagacgcgcagggaggctccagacaggctggcctgggacaccagccgctgcccttccataacatggggacaagagagggcaaaagttcagcccaccacggaggatctccgggcaggagatggggaagaaggagaagcaggaaggaaagagctcagtgtgggggcgcgcatggcatcccggtgggacatctgaggcccacacccacctgctgtccctccctcccacggtggcctccgagggtgacggcctggggggaggcagacgcctggccatttactctccctccctgtccccatggccgctgggtgggggccgtctctgggatgatccccgagggcaggatccgggagtccctgcggaggcatcagcctgtctgtcttgatggtggagaggaggctccagctgggcgggaccaccaggggaggggcttgtgctctgctggctcagcctggtgtggacccacctcscgggcgctggctgcaatgactttctctttccctttgcaattgccttgggtcctgccgcacagagcggcctgtctttatcagaggtccctctgccagggggagggccccagagaaaaccagaaagagggtgagagactgaggaagataaagcgtcccagggcctcctacaccagcgcctgagcaggaagcgggaggggccatgactacgaggccctgggaggtcactttagggagggctgtcctaaaaccagaagcttggagcagaaagtgaaaccctggtgctccagacaaagatcttagtcgggactagccggccaaggatgaagcctcacttcaggtaccgctgcccgctctacccactgggcccctctgctgccccttcttgcctggtggctctgctgggcgtcagccctggccttcccctgccccagccccagccctgggctccctcccctctgactcccctgcaccccctactcccagccaggctccttgccctgctgtgttgtcgccccactgctgcttctgaatgggccgcctcccccatctgtcccagcccaggtcccctgctgagactctcccctgaaagtcatggctggggtggtgctcccggccctgggagggtgctccctctgtgtgcttcccgccattcctgaactctggaactgggagaattgaaccaaaggatgagtagagcaaggtggaattttgttcacagggctttgatggattttctgtaagatttactttgcttaaataccaagtcttaggagagggtgtggggagggaatggtctctgaagcacaggataaatcatgtcttccaaggatgtctccactgtgggcagaggaggatgcagatgaccccaaacacacgctcctcctccactatcagcattcactgtttataaatgacaccagtaacatggaatatagtggccgggtgyggtggctcacacctgtcatcccagcactttgggaggctgaggtgggcggatcgcctgcggtcaggagttcaagaccagcctgaccagcatggataaaccctgtctctactaaaaatgcaaaattagctgggtgtggtggcgggcgcctgtaatcgcagctacttgggagtctgagacaggagaatccattgaacccaggaggcggagtttgcagtgagctgaggtcgccccattgcactccagcctgggcaacaagagcaaaacttcgtcttgaaagaaaaaaaaacaaaaacaaaagaaaaaacatggaatatatgggaaaaaaactcaatgatcaggaggaatgttgttattttaaaatttagtaagaagagagcccggtccccaatggctgcctcctgcagggccagtgatacagagactggacagggctggcctggaaaggggcccccactccatttgtccccagctctgtggcctgggcaggttaccccgcctctctgcgcgtctggcccctcctctgtaagacgggaatggcccctgccagcctagggcagcctcacatgagctcacccccgcgcagcacttagaagactggcctgggcctcagaattcggttctaccatgatttaacaataataatatacagaggtgaaatgtcaggaaggaactgagctgaaaggttaaaagctgttattttggggtgaagagttttattctgtctctctctctctttttttttgagacggaatttcgctcttgtcgcccaggctggagtgtagtggcgcgatcttggctcactacagtctccgccgaaattctcaggggaggggagggatgggggaggcctagagccgtccagggggctgtgtttagtggacatcagcccggagggcccccaggagtgctctctacattggctggtttctctcttgtgtcttcagaaacacagtggagcgaatgtatcgagacacattctcctacaacttttataatagacccatcctttctcgtcggaataccgtctggctgtgctacgaagtgaaaacaaagggtccctcaaggccccctttggacgcaaagatctttcgaggccaggtaccacccggactccaatcactttgcaggcaggagctaagccagctgggaaagcaaaccacgcactgataagtgaagtgcccggcggcgggctatccagtgtgtccttctctcccacactttccaagtccgtggccctgaccttcctgctggaccgtcctgggatcggatcgtggagggggtttgcctctgcacaaaaggccttgtgtttccgtttttcttttcttttcttttttcttttttttttttgagacagagtttcactcttgttgctcaggctggagtgcaatgacgcgatctcggctcacagcaacctctgcctcctgggttcaagcgatgctgtcgcctcagactcgcaagtagctgcgattacaggtgcccaccaccacgcccagctgattttttttttgtatttttagtacagatggggtttcaccatattcaccaggctggtctcgaacttctgacctcaggtgatccacctgcctcggcctcccaaagtgttgggattacaggtgtgagccacagcgccggcctaattttaatatttaattaatccaatgtggctaacatattacttcaacattaattaacataaaattcttgacaagataatgaagtttctttttcttgtcacaccgagtctttgaaatgagctgcgtgggtcacgtacagtgggtggctcgcacctctaatcccagcactttgggaggccaaggcgggcagatcacctgaagttagatattcaaaaccggcctgggcaacatggtgaaatcccatctctactaaaaatacaaaaaaaaaaaaaattagccaggcatggtggcagtcacctgtaatcccagctactcgggaggctgaggcaggagaaccgcttgatcccatgaggcagaggttgtagtgagccaagattgcatccttgcattccagcctgggcaacaagagcgaaactccatctcaaaaaaaaaaaaagaaatgagtggtgtatttttcaggtgcccaggtctctaatcagagccccatttcaagtactcagtagtcccttggccatgtcaccccccccgacatggacagtgcaggtccagtgggctccccactgactgcaggcagggaacaaggcagaccctagagggccaggccacagtaggggctgaggatgtctggtgaatggatgcctgggagaatggatgctagaattcacacacgaggccatgaacagggctgggaaaacttccaaactcagggaagcacgtgtcttggtgcaccttgtgatgcttcaacagcaggactgagatggggacatttacaatgaacagaaatgtatgggctcgagttctggactctgggaagtcccctgtcaatgcaccagcaactttccagggcctgcgagctgcacagtcacgtgggggtgaaggttgttgccagaagctcaggggatgctccagacagagtggcctgggatgtcgagtcactgctgctccgtgacatgggggcaagaggaagcagtttagtctgacatactgcccccccagctagagggcaagagacagaaagaggggctgaagtcgcccttgaataaccacagcagtggcacccacaaaggtgcagttcccacagcctcatagctgcttgtaggtgccacctcttaaggccattaccatagcaattaatactgaacatgagctttggagcagacaaacactcaaaccgaacagggggatggaggaaaggagcttcaatggcaagatctcctggactcctgtcctggcccctcctccccctgccccacccctgctctcctcctgctccccctctcagagcttgccctgaccctgctcctctcccaggtgtattccgaacttaagtaccacccagagatgagattcttccactggttcagcaagtggaggaagctgcatcgtgaccaggagtatgaggtcacctggtacatatcctggagcccctgcacaaagtgtacaagggatatggccacgttcctggccgaggacccgaaggttaccctgaccatctttgttgcccgcctctactacttctgggacccagattaccaggaggcgcttcgcagcctgtgtcagaaaagagacggtccgcgtgccaccatgaagatcatgaattatgacggtgagaagtgggaggttcaggggtgtgggagagactgcttaagtgtctgtgatgggtccttcccacacatacctgtgggtctgctctgatgcctgcaaaggccaagtgtcccaggggagcctgtggggttgggtctggcgctgactgtaactagtatcyagaatatgtctgggaggggagggtcccgaggtcacagaagagaggccagctgggcttgactgcgttctctcttctttttcttagaatttcagcactgttggagcaagttcgtgtacagccaaagagagctatttgagccttggaataatctgcctaaatattatatattactgcrcatcatgctgggggagattctcaggtgagggtctccctccaggctcatcgcctcgctcctctcacctcctgctcatcctcttgaggcctccyctctgttccagaccaggtcctctcctggccaggccctcctgccttccctcctgccccctgcctgccctcgtggttacactccctcacccacactcctcgtgctccctccacctccctgcctcccacctgctttcctgggcccttcctgtgagtgagaggccccttctgcctccagagcaacctccatccacccccacagcctgggagccccaacctggccccttccatctccctggcataaccgaatttgtcgtaaaactggacgtagtaagtgggcatgaatagtcacaagcccggcagtcagaagctttgakcaacatccttaaaggccaacctgagcccctgagaaggagctgcctccatggaaacagagcttcaggcttcggctgccatagaagatggccgggctgggtgcccacagggcaggcatttattttctcacacatctggaggctgcaagtccaaggtggaggggtgggcggggttgtgtcttctgcagtcgctcctcctggctggcagggggtcccttccggccctgtcctctctggcctttcctctgtgcacctgcactcgtggggtctctctgcctccaaatgtcctcctcgtttatggaccccagtcatgtgaatttgggcccacactgaaggtctcatttaagttaatcatctgatgaaaggacctgtctccaggccaggtgcagaggctcatgcctgtaatcccagcactttgggagtccaaggcgggtggatcacctgaggtcaggagttcgacaccagcctggccaacatgttaaaaccccatctctaccaaaaatacaaaaattagccgggagtggtggtgggcgcctataattctagctactcggaaggctgaggcaggagaatcgcttgaacccgggaggcggaggttgcggtgagcccagactgcgccgctgcactccagcctgggcaaaaaagcgaaacttcttctcaaacaaacaaacaagaaagaaaggacctgtttccaaatacagccaccctttgagggagcgggggttaaggcttcaatacattgattttggggagaaacagtgaaggccacggcaagaagctgcagtcattgtgggcgggcctgggtggggagtgcaggggttcctgtcctgtgtgtctgtttcccaggggagtcctgacctgactctcacagcccctccacccagatgttcctgtgtgcttcacccaccccattccttctgcacccaacactcctgagcccctccttagctcccccgacaggctcccctgctcccccactcccgggctgctcctcttctcagcctctctctgggcctctctggggtccggacatgacccctcagctgatgcctgtggcttccccagccagaatcttcccagttccaggctgggctctgcagagtcctatcaaaggtggcatcctcccctctgtccactccagggtgaagatctggtgtttctggtttggaaatgcctctgcactgggtgctaataattcacttttacctttataattgtggttttgtaaggacaggtatttttggcaacagaagaaatcctgtgagttatttaaaaaaaaacaaaaaaactccctggcaggctcttctccccgctggtccygctcaggagtgtctctgccctgatgctgggtgtggcaagagttaaccctgtaggcaggaggggrgccccagtgggtccacctccagcaaggactgagagcragcagagccaggactggggtctatggtgaggccagggaagaagacccagctgtaccccagggagagggcctgagcacactgagctgaccctggggagaccctgacaaggcttagacaggccccagggctgccgtgatctcccagtgagccccagaaggggtcagagggggaggtttggaggctstagcaagtgagtgggagccccttctgacaggtgctaagggatgtggggagccgggggaaggaaggagggtggggtgcaagggaggaagcgtggagagggagggggaggtgggacagaccaggagggctcttactcctctgggcttttcccccactttccagacactcgatggatccacccacattcactttcaactttaacaatgaaccttgggtcagaggacggcatgagacttacctgtgttatgaggtggagcgcatgcacaatgacacctgggtcctgctgaaccagcgcaggggctttctatgcaaccaggtgaccaacccagccacccgcatccaggcagggccctcccaacccagggacacccatgggcagaaggttctgggtggtacctgtggtgtcctgcagagtgtctgtcacctgtgcttcctgtagctgctgctgcttggccctggggttgggggagacttcggcttcagtgactctccaggattggtggcttccagccccacacgcctaaccagccacatgtctcaggggctaacaccactagtccagagtcacccccaggtccaggtctcagccgtccccactcctgctgtgctctgagagggtcagggcagaggaaaagggtctgcaccagggccaagtgggatcaaagaaaaagygcttccggccgggcacggtggctcatgcctgtaatcccagcactttgggaggccgaggctggcgatcacaaggtcaggagatcaagaccatcctggctaacacggtgaaaccccatctctattaaaaatacaaaaaattagccaggtgtggtggcaggcgcctgtagtcccagctattcaggagactgaggcaggagaatggcatgaacctgggaggcagagcttgcagtgagccaagatcgtgccactgcactccacctgggcaacagagcgagactccgtctcaagaaaaaaaaaaaaagtgcttcctgaggaccctcccaggatcccctcacagacacagctcccaccaggaatgattcagaactgtgggatttgaggatcagggcctacctgacctcacaaggccaggattccycagtgcctgctcctgggcttcatcctgcgggaaragagactgaggcaggagaggccgaccagggattctgtcctgaccaggatggagcccacagcaaggccagaacaggccccaagtcaggatgcagggatggccagcatttgaagaagagctgggccaggccaggccgaggggccctgagcccgagggacgttcttccctcgcccttgcccagcacagcccctggctggagaggccaaattctgcttggctctggtgctggaaacggggttcctctgggctctatgagcttaatatgggccctgctgggcccacacacactgcttggaagctactttcaaaggcaccggtccccatcactgtctaaccagtgggatgggactcccccaggaatgacccacagccccttctcagcacaaatcgtgtcatccattctaccccgagtcctctctgcactggactcctgggcttgactagttcccagtcgaaatttggacaaaacaccatcattccttgggctcaayaaggacaatcaccccatgactggggcccttcccaatgtggggttagtcctgctgggggcccctcatccccacttctccctgcaaagggagccctctggcctcagtctatgtcactcgtgggcttaatacagggtaaagcacaatgtggaagcttctagaattataggtcacagaaggggtggggcaaggggaattgacgggtagasaggtcagcctccccatgagggaagcacacgcagctcagtggcatctgtcctccctcccccagctctacagcccctccctgcaggcctggggcggagtgagggtcctgaaggcactgacctcatgtgcagaatgagaggatgctccaaatactcagtatcagagaaatctcatcgtaatggaaaattaaattatttaatagattattgtaaaaatccggtcaggtgtggtggctcatgcctgtagtctcagcactttgggaggctgaggcgggcagatcacttgaggtcaggagttcaagacaagcctggccaatatggtgaaaccccgtctctactgaaaatacaaagattagccaggcgtggtggtgcatgcctgcagtcccagttactggggaggctgagacaccagaatcgcttgaacccgggaggtggaggttgcagtgagccaagatggcgccactgcactccagcctgagtgacagaaccagactctgtctcaaaraaaagaaaggaaaagaaaagaaaagtcatcttgataactggggtttggtgcccccgtctaattttgtgctggaggctgccccgcacccaccctgatccaggctgtccctcctgactcactaaaaattmcctcggccgggcgctgtggctcatgcctgtaatcccagcactttgggaggctgaggagggcagatcacctgaggttgggagtttgagaccagcctgaaccacatggagaaaccccttttctactagaaatacaaaattagcctggtgtggtggtgcatgcctgtaatcctagctacttgtacactccagcctgggcaacaagagtgaaactctgtctcaaaaaaaaaaaagattacctcatggyttgctttcttttctaggctccacataaacacggtttccttgaaggccgccatgcagagctgtgcttcctggacgtgattcccttttggaagctggacctggacsaggactacagggttacctgcttcacctcctggagcccctgcttcagctgtgcccaggaaatggctaaattcatttcaaaaaacaaacacgtgagcctgtgcatcttcactgcccgcatctatgatgatcaaggaagatgtcaggaggggctgcgcaccctggccgaggctggggccaaaatttcaataatgacatacagtggtgagaatggaagcctggagtaggatggggtcagccagggcaggagagggccccvggaagttactagaaagtggggagggtcggcatccctgtgggaaaggccttgatcctctgcctgcagaggcgatggctgcactctggacctgactttggggtcgacgggaagagagaggccaggccaggagatgtggacctggggagggcggggagggtggctggaagtggaagcagaacttggggcttccagaaaaaatgagaactgggctggcccagattccaataggaaagaagtgcctgatgaaggagctaagtccctaggggagggagagggaaaggagggactgaaaccaggatgtgggaagtctgtcttgagagtcatgggcctttggtgccaccacgatcccacagcgggagtgtgacttatctcccctgtcccttttcagaatttaagcactgctgggacacctttgtggaccaccagggatgtcccttccagccctgggatggactagatgagcacagccaagacytgagtgggaggctgcgggccattctccaggtgagggcttcttccctctgcccagtgccccatcggcctccccctcctcccctctcccctgcgccgtgccttcccctctgctcagagcctcctctgggttccctgctcccccagggcacctgtctctgtccctccctttccttctcacagcctccctttctctcccacctcccacatccctccctcctctccgatcattgtcactgtccccaggcctccaccatatgcctactttccactcgctcaccctttgctccattcaacctccctgctcttccagaatcaggaaaactgaaggatgggcctcagtctctaaggaaggcagagacctgggttgagcctcagaataaaagatcttcttccaagaaatgcaaacaggctgttcaccaccatctccagctgatcacagacaccagcaaagcaatgcactcctgaccaagtagattcttttaaaaattagagtgcattactttgaatcaaaaatttatttatatttcaagaataaagtactaagattgtrctcaatacacagaaaagtttcaaacctactaatccagcgacaatttgaatcggttttgtaggtagaggaataaaatgaaatactaaatctttctgtatatgtttccctgtgtgattgtatcatgaattgcaagtgtttccataaacactagcaaatgtgtagatgtctttccttgtgtagcggacctgtagccgggaaaggtcacacgacatccctctggagccagaaaactcagctaaacctcacaggagaggaacctaaatgcagaccccaccctcactcacagagccccgcccactctcactcacagagccctgggcgctgattggaagggacaggcccagcagtaagaggacagccagcagccagtctccctgttggaaaggaaccacacacgtgcagtcaggggccctcgggagcagccctgtgtccaccccttcctgagtccacctcctagagagggagcccagggaaggccatggctgagacccaggacaggcccagtcaggggaaggagcccagggagsgggcaggtgtccaggctgggcccagagagagggctgggaagaggagcagcccaggaggcagagcccagccacagaggggaggggagctgagtcccagggacaggaggctccagaggcagagacggagcccagggctagggcggcaggtgtcagggctgtggcttcagcttggtgtctgtcccgggtgttctgcattggttcccgactctgggatgtgttatttatgtgcctgattacagcaggtggctcccacctcacgatttctggaaagtcctcagaagctgcgtataagaccaagaaggggcctcacacgcagctgctcctgggcagaaacgactcactgtttccctggcctagacacacacaacacgcacacacaatactcgcactacacacaacacacacacaacacacacaatactcacacgacacacaatacacacatacaagacacacaaaaacacacatgcacgtacacaacacacacaacacacgtgcacacacacacacacacacacagtgacagagacttgacaataagaaacctcctccaggtgccccagagctctcctgggatgggaactggacacagccccatgacactgctgagacctgggctgggaactgagagcctgtggtccctctgggctgtagggaggcgggcccccacagtggtggcagagccgggaccccggacacagcagcatggactccaaacccaagcggaacctccattctggtcccaggctgcacagcccagcacctgcccagggtccctctgccctgccttctccctcaatagtctggaccccagctgcgtgcctgccttgtcccccccttacaggggaccagggtgaatctcaggtgaagcctgcacctgtgaaggaggccattctccctgctcccatccctgccacccacatggggaaccagctccttcttgtccccggggacttttcctgggctctggtggaaactccagcgggatatggggtcttacattttccctcaatgttgcagaggctgaaatgggggcggggctgtcactccccaggagctgacccctgtcacctgtgcttagaagtgtctccgggaggcacagtgttttatcagtgttatctacaagcattttacagtgtagtttgttttttttgttgttgtttgtttttgttttttttgagacagagtctcgctgtgtcacccaggctggagtgcagtggcgcgatctcagctcactgaaacctcygcctcgcaagttccaggattctcctgcctccacctctcgagtagctaggattataggtgtgcaccaccacacccagctaatttttgtagttttagtaaagatggggtttcaccactttggtccaggatggtctcaaattcctgacctcaagcgatctgcccgcctgacgtcccaaagtgcttggattacaggcgttagccaccgtgcccagccgtgagtgctagttttagatcggatcccaggccccaggctgtgtctgtcatgggcaatcatgatgaacttttgttgcgctgtgctctgggaaaagctggacattttgccacccactccactccactccacgtagcaaacaaaacaaacccatcaggatcccagcatggagggccatgcagtctaatgatggttggacagactggcagaggcagccccgagctgttcctgggtaagaccaagggaataagaccatgattccggtcagttcttggtgaatgtcatccccctaccccaccctcagaacaaatacagattttcaaaatctaccacttttttctttcaaattttctacccatggaagaatgaatgaccatccggagacagcagggaaggttattgcttaatcaagatgctggtgtgtttcagggagctggccagggtggagtaggcttgtggccacgttccctgggtgggaagactgagatggaggtgggcgtggtccagggactgtcaggagcagggctgggggagacgacctggcacagggccgtgcctgcacacagagcaacaacgcccaccatcaggtctgccctgtgccaatcagaaaattctggacagagactgtgaccctctgtgtcactctggggcagggggtaatggttccacacacttctatggggacctggagagtggagaccagagcactggtgggcaggcaggcgagcctgggtctaagagcccactgtgcctgccactgtcccgtacctcggcacgtcacctcccctgaaacctctctttactcatctgtaaagtgggggcaattatacctccctctcaactgtgcacttggagggcagtgagggctggatttgggacagacctggtacgcaccaggcgttgggcaagtctgagtctcctcctctccctgagtcaagctgcctgacgtgatggcagtcttcctgcccacaagttctggtccagcccctccacccaggaagccctcggggaggtgatgccaccggcagcgctgtggttttggcacccacaggcataggatgggctgccgtggaaggtgcctgctgtccctcagggtctgtacctcagccaccctccagggtggggccctatcctcctcccactgccttctccggccctcaccaccccgggcaggcactgcttcccagagagccacccgggtcaggagtaaagtggcctctgtggtcaaagtctgaaaaagttgcccccacacctgcctaacggtgcacagggctttctgggggggtagggaggaggcaggcaagactctggcaccttttctgagtcacatcccttctaccggggccctgagcctgcaggacggaaggatgtggccttgcctgtcagagggttctgagaacacggaaggctcctgagtcctcgaagggcatcctcagtgggagagtggccctgagcagagaggagcgtaaggggcaaggcacaccccttgagaggtcggtgtcagcagcaagcccgtttgcctgtagacatctgtctccactctttatttatacatattttttgagtaagggtctcaccctgtcacccaggctggagtgcagtggcaagatcacagcttgctgcagcctcaatctcccgggcttaaccaatcctcccacttcagcctcccaagtagctgagacttcaggcgtgcgtcaccacacccagctaatttccgtgtgtgtgtgtgtgtgtgtgtgtgtgtgtgtttgtgtttagtagggatggggtttttccatgttgccccagctggtcttgaacttctaggctcaggcaatcctcctgcctcagcctcccgaggtgctgggatcacaggtgtgagccgccactggcaggcatctcctcaacttgacattgcagtgagaaagggcaaaagtagccggtctcacagagcagacatgtgcttcccgtcctgacctgcaacgcgctgcctccttacaagtgctaccagatcacctggttcatatcccggagccccagcccggaccatgtggtgaaagtggccgagtacaacaaagtgaagctgagcatcttcattgcccgcctctaccacgactgtgacccgggattccagcacgggcttcgcagactgcaggacacagaggcacgcgtgcacatcatgtcttctaagggtgagaggttggggcctgaggggtgtgtgtgggggagggacagcatgaggggcaggggagtctgggatgccattgggacgatgtcccaggagagcctgcagggactgagccagcactgacagccaggagatcacacctaggaggggcaggcccagggtcaggggagagaggtctgccgggcctgacttctttctcccctcttttatctcagaatttgaacactgttgagaagactgtgtacaagagagatgtgccatgtcagccttgcaagggacagcgtgaaaactacccatctccggtcaccaagttgcagggtagcctcacagctgatgccctcgctcctctcggctcctgctcagcctcctgatgccttccctctgtcctggatcagattcacccctgcctgggccttctgagctgctcctgccctgagtaccacccctcagtgccccccacctcactgcctcttccccactttcctgaccctgcctgtgagaggctgctttctgcctccatagcaacctctatccaccccccagtctccttcctcccatcctgggggcccctagcctggctccttccatctcctcatcatacctaaatcttgtcattgaactgatataaataggtagtagaaatatacataagtgtgaaagttaagttttgagaaacaccttttgtaaaaaaccgatggtaagtattgggtcattcttgtcacacccaactcaaacagaggccaggagccaggaggggaaaccgctcagtttgcaaaacgtcgcttccacaagcctgatggctgaaactgctcactgtaccctgaaaccagctttacctacagcttctgagataaactgctgcaactctgggacccacgatgcctatcacagtggctcatcaatggaacctgccggctcccaacccttcctagggcccatgaactctctgaaaagaggaacagaaatatttctcctttttgtaaaatctttaaccttccctttgttcttcatgtacacgctgaactgcaattcttcttcccaaataaaacattaaatttagaaatttctctccatagttttattttgacttcaacatacgtggggtcagaagtgggatccaattctcacttccctccaggggaatcagcagcccacagaacgatggtgggaggtacccacgctggtaacctcttctgccccctggcagatctttcttggacaaaactccagaattgggtttgcattctgtttcatttgggataaggctggggaggggtctttccccttcctgtttgggagattttctgttaggagggttgttttcctcccgttgatctgggctgtgaggtttggacctcgacaagtttggaagaggtgattccccctcatttggagaaagctatcatccttcctggtaaacacctactttatttcccatcagtgcttgcatttattgtgcttttgtgtatttgatgtcaaactaaattacctagataaactgagcaacaggcagggcgcggtggctcacgcctataatcccagcactgtgggaggctaaagcaggtggatcacctgaggtcaggagtttgagaccagcctggccaacatggtgaaactctgtctctactaaaaatacaaaaattagctgggcgtggtggcgggcgcttgtagtcccagctactcggtaggctgaggcaagagaattgctggagcccaggaggcagaggctgcagtgaaccaagatcatgccactgcactccagcctggatgacagagtgagactctgtctcaaaaaaaaaaaaaaaaaaaaaaaaaaaaaactggattacaaatgaaatcaaagttcaaaggcatgccaagatattttctgggactcccgcctgtaacgtcttcaaacattatagggattattcaatctattgttctttttgttttgagatggagttgt

SEQ ID NO: 93696 - DNA, 22459 bp, Homo sapiens
cctttaagaaaggaagttaacgtgttctttaattcacagatggaattttcaaatatttgcaacccaaattattcctattttaaattataagtgcaccagtaaaatgctttttttaaaaaaaaggtttttggctgggcgtggtggctcaagcctgtaatcccagcactttgggagcctgaggcgggcagatcacgaggtcaggggatcgagaccatcctggctaacacggtgaaaccccatctctactaaaaatacaaaaaatcagctgggcatggtggtgggtgcctgtagtcccagctactcaggaggctgaggcaggggaatggggtgaacccgggaggcggagcttgcagtgagccgagattgcgccactgcactccagcctgggagacagagcaaaactctacttcaaaaaaaaaaaaagtttaggctgggtgcggtgactggtgcctataatcgcagcactttgggatgacaaggcaggcagatcacttgaggccaggagttcaagaccagcctggtcaacatggtgaaacccagtctctactaaaactacaaaaattagatgggcttggtggcatatgccagtactcccagctactcgggaggctgaggcaggagaatcgcttgaacccaagaggtggagttgcagtgagccaggatctcaccattgcactccagcctggctgacagagcgagactctgtatcaaaaaaaaaaaaaaaaaattacacacttaataacagaccatcaaaatatatgaagcaaaaattaacagaattgaaggagaattagagttctacaataattggagacttcaatacccaatgctcaataatggacagaacaaccagatagaaaaaaaaggaaggaaatagagaactcaacacaataagccaactagatctaacagacatatatggaacacttcacccaataacagcagacagccgctgtggaaaacagcatggcagttcctcaaaaaattaagaatagaatggccagatgatccagcaattccactgccaggtgtacactcaaaaaaattgaaagcagagtctcaaggaggtatttgtacacccatggaggtaacccaaattttcatcaacacatgaatggagaggccaaatgtggtctacacatgcaatggaatattactcagccttgaaaaggaaggaaattctgactcacgctacaacatggatgaaccttgaggatattatgctgagtaaaataagccaatcacataaagagaaatactgaatgattccatttatatgacgcacttagaatattcccaatggccagtctggcgcagtggctcaagcctgtaatcccagcacttcgggaggcccaggtgagcggatcacctgaggtcaggagttttttgtttttgtttttgtttttgttttgagacaggctgtgtcatccaggcaggagtgcagtggcatgatcttggttcactgcagccttcacctcctgggctgaagcaattctcctgcctcagtagcccgagttgctggtattacgggggggcccaccaccatgctcggctaattttgttttgtttttttttttttttgagacagagtcttgctctgttgcccaggctggagtgcagtggcgtgatctcggctcattgcaacctccacctcctgggttccagtgattcttctgcttcagcctcctgagtagctaagactacaagcacacgccaccacccccggctactttttttggtgtttttagtagagacggggtttcagcatgttggccaggatggtctcaatctcctgaccctgtgattcgcccaccttggcctcccaaagtgctggcattacaggtgtgagccaccattcctggccaatttttgtatttttaatagagacaaggtttcaccatgttggccaggctggtctcgaactcctgacctcgtgatccttccgcctcggcttcccaaagtgctgagattacatgcgtgagccacctcacctggcaggttcaggacttcaagatcggcctggccaacatgccgaaaccacgtctctattgaaaatacaaaaattagctgggcatggtaggatatacctgtaattccagctacttgggaggctaaggcacgaagaatcgcttgaacctgggaggcagaggttgcagtgagccaaaatcgtgccactgcactccagcctgggtgacagagcaaggctccatctcaaaacaaacaaacaaacaaacaaacaaacaaacagagaatattcaaaatgttaaagacagaaagtagcatggtggttgccaggggctggcagaggagagaatggggaggagggaatgaagattttgcattaaacgggtacagagtttcagtcttacaagatgaaaagagccggccgggtgcagcggctcacatctgtaatcccagcactttgggggggccgaggcaggtggatcttttgaggtcaggagttcaagaccatcctggccaacaaggtgtaaccccgtctctactaaaaatacaaaaattagctgggtgtggtggtgcgcacctgtaataccagctactcgggaggctgagggaggagaattgcttgaacctgggaggcggaagttgtggtgagctgtgattgtgccactgcactccagcctgggcaacagagtgagactctgtctcaaaaaaaaaaaagaaaaagaaaaagaaaagagccatggagaaggatggtggtggtggttgcacaacattacaaatatgattaatatgtttaataccactaaactctgtacttaaaaatggtcaagatggtagattttatgttatgtataatttaacacaacatttttttctttttttttattattattatactttaagttttagggtacatgtgcacaacgtgcaggtttgttacatatgtatacatgtgccatgttcacaacatttttaaaattggaaaaaaagaaaaccagcagcaaggattttaccagagcaataagtagatgacagtcacatgaaaaagacattcgacatcattagccattagggaagtgaacattaaaatcacaatattactacagacctatcagaatgttaccacagacttatcaatgggtaaaataaaacttagtggcagtgccaaatgctggagaaactgggtcatttatacattgctggtgagaatataaaatagtacagctattctccaatttagtttagtagtttctttctttctttctttctttcttttttgagatagtttctcactctgtcacccaggctgcagtgcagtgggacgatctcagctcactgcaacctctgcctcccgggttcaagtgattctcctgcctcagcttcctaagtagctgggactacaggtgtgcaccaccatgtccagctaatttttgtatttttaggagagacggggtttcatcatgttggccaggatggtctcgatctcttgacctcatgatccacccgcctcagcctcccaaagtgctggatttttattatttttattattttattttatgttattttgagatggtgtttcattcttgttgcccaggcttgagtgcaatggtgcaatctcggctcactgcaacgtctgtctcccagtttcaagtgattctcctgcctcagcctcccaagtagctgggattacaggcatgcaccaccacacctggctaattttgtattcttttttagtagagatggggtttctccatgttggtcaggatggtctcgaactcccgaccttaggagatccccctgactcggcctcccaaagtgttgggattacaggcatgagacaccacgcctggactatttttttattttttgagatggagtctcactctgtcgcccaggctggaggatactggtgagatctcagctcactgcaatgtccacttcctgggttgcatctattctcctgcctcagcctcccaggtagctgggactacaggtgcgtgccaccatgcctggctaatttttgtaatttttttttttttttagtcgtgacagggtttctccatgttggtcaggctggtctcaatctcctgacctcaggtgatccacccgcctcagcctcccaaagtgctggtattacaggtataagccactgcactcagccatatataaccttcttcaaataaaattacacaggtggaaaatttttttctttctttttttttttttgagacagggtctcactctgtcgcccaggctagtgtgcggtgatgatgtaatcatggcttaagtgatcctccccgcctcaacctccctagtagctggaattacaggtgcacaccaccacatctgactaatttttttgtttttgtttttgtagacacggggtttcagcaagttgcccaggctggtttcgaactcctgacctcaagtcatccgtccacctcggcctcccacagtgctgggattactggtatgagctaccacaccttgcccgaaaacgttttcaaaataataaaatgggctgggcaagtggctcacgcctgcaattagaggcctggagacattaagtaaaccacccaaggtcacacagtaaggaaggggcagatctcagagtcgcctggctgcaaagctggtgtcccttccccactgtgccttaactgccgccttacagctgggttggaggatgcctccctggtctagggtcattattacattttcttttacaaagtatgtttctgataaacggaactgtttattttccaccgatggtcttatcctttgtccatctctttctgacggcaacagaaaacttcaccttccagaggagcgcctctgcctggctgtcccaccgtctgggaagtaaggagcgcctctgcccagcccccgcaccgtctgggaagtgaggagcgcctctggacggcccccgcaccgtctgggaagtgaggagcgcttctggacggctcccagcaaccccccaggtgtgaagtgacagccctgtgtgtgatctttctgccctccccaagtttgcattttcgacaataaaatttacttttaaattaaaagatttatactggggaagatttaaaaaaaaaaaaagaaagaaaagaaaactcaccttccaaaaacaaccactgggagtccgctttgtgcagaggttggacaagcttctgtgcaggtaggggcgctgctgctccccctaccacccacgcatcctcctccctgtctgcattcccgtcgtcgtagccagaggagttcagagcctctacagagagcacaacttctccagctggaacaaactccccttaaaggaatctatttaggaagattatttcaatgtacattcattcctccaaaatatgcttagatggacttaaataatcagaaagctgtgtgtgtatgtgtttcccgttttcttggcccacaaagaaccccttgagaggtccctgggcagtgagcctgtttatagacacccttctcccttccttggtgtcgcagacatcgcagtccctctgaggggctgacctgccccccaccttctggaagctgggaggttggaagaggggacgcatgccatggacccagcacacagctgggaactcgaggcacacctaagccttcccttgtgctgtgcggagtccacacttccttccccactggagtctcaaaacctcccctcactcaacagggtggtgctgctcaaagctctgggcacacattagggctggggagggggtggtggagagggggctccagcctgcccaaccaccaggcaacggggcacctgcccctctctcagctgggtctggacccgcctcccaggckcaggctgcaatgcctttctctttctctttgcaattccgttgggtcctgcccaggacagataaagacagagcagcctgtctttattggaggttcctctgccagcgggaagggtccggggaaaaccagagccagagccagagccagagaaacatgaagcaccccggggcctcccacaccaatgcctgagcaggaatggggaggggccatgactcataaggccctgggaggtcactttaaggagggctgtccaactgcaaggacgctgtaagcaggaagtgaaaccacagagcttcaaaaaaagagcgggacagggacaagcgtatctaagaggctgaacatgaatccacagatcaggtaccgctgcccactctgcctgctgggcccctcctgccccttcctgcctggtggtcctgctgggcctcaaccctggcctccccccgcccctgccccagccctgggctccctcccctctggctcccctgccacacgaatcccagtcaggctctttgtcctgctgtgtggtcaccccactgctgcttctgaatgggctgcctcccctacctgcaccagcccaggccccgtgctgagactctcccttaaagtcatgcccggactggtgctccccgccctgggagggtgctccctctgtgtgcttcctgccactcctgagctcagaaactgggagaattgaaccaaagggtaattggagcaatcaggcatttttgttctcagtgttttgatgaaatttctgtaagaattactttgcttaaatacaaagtcttaggagagggtgcgggggtaggaatggtctctgaagcacatgataaatcgtgtcatccaaggatgactccatggtgagcagatgtccccagacaggttccactccaaggtcactcttcatcttttagaacatgaccagtggttgagcgtggtggctcacacytgtaatcccaacactttgggaggccaaggcgggcggatcatgaggtcgggagtttgagaccaacctggcccatatggtgaaaccccgtctctactaaaaaacatacaaaaattagccaggcatggtggcgcatctctagtcccagatactcaggaggtttaggcaggagaattgcttgaacctgggaggtggaggtygcagtgagctgagatcatgccactgcactccagcctgggcgacagagtgagacttcatcaaaaaaaaaaagaaagaacatgatcagtaacatggaatgtgagaatgtgggaaaaaagtgcaatgatgaggagaaatgctctgattttaaaatttagtgaaaagagagcccagtccccaacagctttctcctacaggatccgtgatgcagaggctggacagggctggcctggaaaggggcccctgctccatccgtccccagctctgtggcctcggcaggttaccccgcctctctgtgcctctggcatctcctctgtaagatgggaatggcccctgcaggcctagggtagcctcacgtgagctcacacccgctcagcacttagaagagtggcctgggcctcagaattcagttctaccatgattttaaaataatgttaacacgcagagtgaaacatcaggaaggaattgagctgaaaggttaaaagctattttttaggggtgaagggttttattctcttttgcattctcctaatgggttggggagtgggttggcagaaatactaggagggtggggaatgtacccctggaaaggccagagttggacccgagctgggagagatcaccccagcccgcctrccagcatcccctcctcttcctctcccctcagtcttcctgcctgggaaggcagcagaaattctcagggctgtggaggggtcggggaggcccagggccrtccygggagctgtgttcagtggacatgagccccgaggactcccgggagggctccctgcatgggccggtttctctcttgtgccttcagaaatccgatggagcggatgtatcgagacacattctacgacaactttgaaaaygaacccatcctctatggtcggagctacacttggctgtgctatgaagtgaaaataaagaggggccgctcaaatctcctttgggacacaggggtctttcgaggccaggtaccacccaaacttcaatcgaatcacaggcagtgttgcaggaattagaggactggagagactgatatgggtgagacaggaggatttatttaggtgcactggttcagcagactcacatccaaaaaggctgagcccttaacaaagacagactgaggtatttataagcaaacttacagaagcagaacaaaggcgattaatcaaacagtgacaggtcacataatctatagcataacagatgacttagcataacttggggccttctatagctggtggccttgcagctacatcaaaaggaaaacaggaactggctaaatacagacatttgtaaaatatagttataatggttctggaaaggagagacagtaaaggaatttgtcttttttttaaaaaatttttttaaaattttcttcaaccttgccctggaggggtgtgggggtggtgtctggagcccattcctttggccttgacttttcaggcagtgttataactgtcgttggagtgagctggctaggcagaggaaaacttgttcttcttttctttttaacccttgctacagtaggacctaagcagctggaaatgcagaaaacacaacaataagtaaaatgcccagcactgggctctcaattgtgtatttttcccacatttcttttttctctttttttcctttttttttttttttttttttccgagatggagtctcgctctggcacccaggttggagtgcaattgcacaatcttggctcactacaacctccacctctcaggttcaagtgattcttcggccttagcctcccgaatagctgggattacagaaggctgccaccacgcccagttaattttttctatttttagttgagactgggtttcaccatgttggccaggctggggaattcctgacctcaggtgagtcacctgccttggcctcccaaagtgctggggttacaagcatgagtcaccgcacctggccacttcccacagttctgtttttttgttttgttttgttttggtttttttttaagactgagtttcactctttgttgcctgggctggagtgcaatgactcactctcaacttccacctgccaggttcaagtgattctcctgcctcagcctgtgagctgaacagtcacatgagggtgaaggttgttgccacaagctcaggggatgctccagacagagtggcctgggatgtcgagtcacagctgctccatgccacggggacaagaggaagcaggagtttagtctgacacactgcccttccagatagagggcaagagacagaaagaggggctgaagtcacccttgaataaccacagcagtggcacccacaaaggtgcagtccccacagcctcatagcctcttctaggtgccacctcttaaggccattacaatagccattaacactgaacgtgagctttggagcagacaatcactcaaactaaacaggggggatggaggaaaggagcttcaatggcaagatcccctgggctcctgtcctggcccctcctctccctgccccacccctgcactcctcctgctccccctctcagagcatcccctgccccctgctcctctcccaggtgtatttcragcctcagtaccacgcagaaatgtgcttcctctcttggttctgtggcaaccagctgcctgcttacaagtgtttccagatcacctggtttgtatcctggaccccctgcccggactgtgtggcgaagctggccgaattcctgtctgagcaccccaatgtcaccctgaccatctcygccgcccgcctctactactactgggaaagagattaccgaagggcgctctgcaggctgagtcaggcaggagcccgcgtgamgatcatggactatgaaggtgagaggtggaggggtcaggggagcgtgagcgggaggaacagcatgaaagatggatggatctgcaatgccatggctgggggtgtcccagggcagcctgcaggggtgggactggcactgactgcaactgacagccaggagaccaggcctgggaggacaggccagggtcaggggagagcctgactgcttcccgcttcttcatctcagaatttgcatactgctgggaaaactttgtgtacaatgaaggtcagcaattcatgccttggtacaaattcgatgaaaattatgcattcctgcaccgcacgctaaaggagattctcaggtgagggtctccctctggcctcatcatctctctcctctcacctgctcatcctcctgaggcctccgttggcctggccctcccgccctccctcttgacccactgcctgccctcatggtcacaccaccttcccttaactcctggtgctccctccacactgcctcctccctgctttcctgggcccttcctgtgagtaagaggccccttctgcctctaaggcacctgggtcttggactagaggaacaaacagcaagacagggtggcctgggacaccagccgctgcccttctgtgacatggggacaagaggaggcaagagctcagccttccagggaacaactctgggcaggagatgtggaaggaaggagctcagtgtgggggcacccatggcatcctgkggggacatctgagggccacccccmcccgctattcctccctccaatggtggcctctgagtgtgaaggcatgggggaaggcagacacctgcccctgactctccctcactaccacatagctgctgggtggctggggacggggggggtccctgggatgattcctgagggcaggatccaggggtccctccagatgtcctcccatccaggtgagaaagcagcataaagtgaggcttgcactcagatgggcctgggaggtcactcacagcgcaggtgtctcctggaacaagggccctggaagatagaaatagaatccaaacccaggactaacatcagggccaagacaagcctgccagggaggctgcacatgaagccccagatcagggaccactgcccgctctgcccatggggcctctgctgccctttcctgcctggtggtcctgctgggcctcagccctggcctccccctgtcccagccccagccctgggctctctcccctcctgttcctctgccacccccactcccagccaggctctttgccctgttgtgtggtcgccccactgctgcttctgaatgggccacctcccccacctgccccaggccagaccccctgctgagactcttccctgaaagtcaccgctgggctggtgctccctgccctgggagggtgctccctgtmtatgcttcccaccattcctgagctctggaactgggagaattgaaccaaaggatgattggagcaatcaggcrttttgttcttagcattttgatggaatttctgtaagatttactttgtttcaacacaaagtcttaggagagggtgtgggggaggaaatggtctctgtaccagaaaataagtcatttcttccaaagacgcctccgctgtgagcagaggaggatgcacacgaccccagacacaggctcctcctccgtgagcaccattcaccttttagaatgacacctgcaacatggagtgtaggaaaacatatgatcaggagaaatgctcttattttaggcagggcacrgtggyttatgcctataatcctagctctttgggaggctgaggtgggtggatcacttgaggtcaggagttggagatctgcctggccagcrtggcaaaacctcctctctactgaaaatacaaaaaatgagccaggcatggtagcgggagccggtaatcccagctacttgggaggctgaagcaggagaatcgcttgaacccgggagggacagcagtgctggtcacggaaacacccaggactcaggactgaagcacaagtgtttccagtccccacacactaaaaaggagacaagaactcctcttcgagcttttctgatgagcactcacctctcaccctcaaacccctggggcctctcttttcctcctgaccctctctctggacctggcctcttgctctaggttcccagttttggtcccagtgctggtctctcctccaatggtaccaattccaggtctccttccacctcctggggcagatgcacagggagcctgaaaatcccagtggataatgatgctgtgccccagccagtgaagacagttggagaggggattctcttcacttgtctttaaatgagcatctactatttcttgcaaatgttccatgtctctggacttggcctaagccatttttatgttcagtgtcatctcgttctccctaatatttagaaaagggtgttgcttgtaggaccactttgctatgaagaagccttgtttccttttcttgagaacacaaagcaagtgagtggtagagcccagattcatacccaggtctactagaaattgtggcaaacagagattccttccttcctcccttccttccttccttccttccttgcttcctctctctttctctctttctctctttctttctttctttctttctttctttctttctttctttctttctttctttctttctttctttctttcttcctttcttctctctcgtctttcttcttttgctgctgcctccaaacagagatttttctaattctggttttgtcaggatgtctacagaggggccgggagaggccttcaaggtggggctggtgtttccagcccaggagtcctgagctgccccatctggcctgagaagcacgtttgggagacctcatggcatccaaagggacgtggaaaatgctatgaattatccaaaaagatgtccctggcaggctcctctccccaatgatccccctcaggagtgtccctgccccaatgctgggtgtggtaggagttaaccctgcaggcaggaggaagccccagcaggtccatctccagcaggggctgtgggtgagcagagccaggacaggggtgcatggtgaggccagggaaggagacccagctctaccccagggagaggggcagggtcctccccggagggcctgagcacactgagctgaccctggggagaccctgacaaggcctaaacaggccccggggctgtgttgacttcctgataatccaccagaaggggtcagagagagaggatcagtggcccccacaaagggagtggaagcgcctcctctgacaggtgcctcagtatatggggagcagggaaggagtggggggtgcaggagaggagcgagaggtagtcccaggaggagtcttagggcttttggtttcccctgtctttgtccacagayacctgatggatccagacacattcactttcaactttaataatgacccyttggtccttcgacggcgccagacctacttgtgctatgaggtggagcgcctggacaatggcacctgggtcctgatggaccagcacatgggctttctatgcaacgaggtgaccgacccagccacctgcatccaggcagggccctcccaatccagrgacactcatagatagaaggttctgggtggtgcctgtggtttcctgcagtgtttgtcacttgtgcttcctgcagctgctgctgcttggccctggagttggggggagactttggcttcagtgactctccatggccaggtggggttgastctgcccaatggcaaagtgcttcctgaggaccctcccaggatcccctcacagacacagctctcaccaggaatgattcggaactgtgggatttgaggactcagggcctacctgactcacaaggccaggatgtccctgtgccctctcttgggcttcatcctgcggagagacagactggggcaggagaggctgatcaggggttttgtcctgcccagggtggagcccacagcaaggccagaacaggtcccatgtcaggatgcaaagatggccagcagttggggaagaactgggccaggaaaggctgagggggccaggctaggctggccaggagccctgagcccaagggactttcttccctggcccctacccagcacagcctctgtctggagaggccaagttctgcttggctctgttgctggaaactgggggcttctctgggctctatgagctcaatgtgggcctcgctggatccacacacactgcttggaacatcctttcaagggtgccagtctccatcaccgcctaagcagtgggactcccccaggaatgacccacagccccttctcagcacaaaccatgtcatccactycaccctgcatcccctctgatggaatccctccctgtctttgtccccatcacaatcacagtccttgctgccctgctgtccccaacttgaccgattcctagtcttagtggaaaatccttttctctgaagtttggagtaaataccatatttctataagtcaaaataatgacaattataccatgtcacagggaccttcccacattggagtgagtcctgctggtcttctcttccccactacttttggtggaattcattttggcctaagtctatatcacatttgggctcagcacaggttgtggcacagaatagaagcttctagaattatgggccacagatgggatgggagtaggggagttgatgagtagagcaggtcaatctccccttgaaggaagcacactcactcagggccatcaggccaatgaccttggggctccgccggcccctcctccctgcccccatctctgtagcccctccctgcagggctgggtctggggtgagggtcctgaaggctctgaccttgggtacaaaattgatgggggctccaaatgctcagtaattagagaaaacacattttaatttaataattaatgcaatattttaaaacgcaaatttaatacaaatagatcatgatgaataaaagcaaagattttaataaagcctggcaggagagtgctgtcctgtgtatagtggagctggggcaaaataaaacctcattgctcctgatctgtttgtatttaaatgggcaacattttgcttatcttgggatttttgcataacatctgatatttttaatattgcatagaaaatcatgcatcctaataaccggggttttggcgacccctctaatttcgtgctggaggcccccgcctccccagccccacctggtccaggcgctccctccctgttcaccacacatcacctcacactctgtttccttttctaggctaagaatcttctctgtggcttttacggccgccatgcggagctgcgcttcttggacctggttccttctttgcagttggacccggcccagatctacagggtcacttggttcatctcctggagcccctgcttctcctggggctgtgccggggaagtgcgtgcgttccttcaggagaacacacacgtgagactgcgcatcttcgctgcccgcatctatgattacgaccccctatataaggaggcgctgcaaatgctgcgggatgctggggcccaagtctccatcatgacctacgatggtaagaatggaaggttcaggtggkgtggggtgggtgggggcaggagaggttcctgggaagaaaaggagaaaggccttggtctgctgcctgcagaaacgatggctggactctgggacctgactttggggtcgatgggaagagagaggccaggccaggagatatgggcccggggagggtggctggaagtggaagcagaacttggggatttccgaaagaaagagaactgggctggcccagattccaatgggaaggaagtacctgatgaaggagctaagtccctaggggagggagagggaaaggagggactgaaaccaggatgtgggaagtctgtcctgagagtcatgggcccttggtgctgccccctccccacaacaggagcgtgacttatctcccctgtcccttttcagagtttgagtactgctgggacacctttgtgtaccgccagggatgtcccttccagccctgggatggactagaggagcacagccaagccctgagtgggaggctgcgggccattctccaggtgagggcttcctccctctgcctggtgccccatcggcctccccctcctccccrctcccctgkgccttgccttcccctctgctcagagcctcctctgggttccctgctccccacagggcgcccagctccgtccctccctttccttctcacagcctccttctctttcccacctcccgcatccctccctcctctcccgtcattgtcactgtccccaggccacctccctgtgccctctttccactctctcacctcctgctccattcaacccccctgctcttccagaatcagggaaactgaaggatgggcctcagtctctaaggaaggcagagacctgggttgagcagcagaataaaagatcttcttccaagaaatgcaaacagaccgttcaccaccatctccagctgctcacagacaccagcaaagcaatgtgctcctgatcaagtagattttttaaaaatcagagtcaattaattttaattgaaaatttctcttatgttccaagtgtacaagagtaagattatgctcaatattcccagaatagttttcaatgtaytaatgaagtgattaattggctccatatttagactaataaaacattaagaatcttccataattgtttccacaaacactagcaaatgtgtagatgtctttccttgtgtagcggacctgtagcygggaaaggtcacacaacatccctctggatccagaaaactcagctaaaccacacaggagaggaacctaaatgcagaccccaccctcactcacagagccccgcccaccctcactyacagagccccgggcgctgattggaagggacaggcccagcagtaagaggacagccagcagccagtctccctgttggaaaggaaccacaaacgtgcagtcaggggccctcgggagccgccctctgtccaccccttcctgattccacccccctagagagggagcccaggggaggccatggctgagacccaggacagacccagtcgggggaaggagcccagggagggggcaggtgtctaggctgggcccagagagagggctggggagaggagcagcccaggaggcagagcccagccacagaggggaggggagctgagtcccggggacaggargctccagaggcagagacggagcccagggctagggcggcaggtgtcagggctgtggcttcagcttggcgtctgtcctgggccttctgcgctggttcccaactctgggatgtgttatttatgtgcctgattacagtggcggctcccacctcacgatttctggaaagtcctcagaagccacgtataagaccaagaaggggcctcacatgcagctgctcctgggcagaaacgactcactgtttccctggcctagacacacacaacacactaacacacacaagacacacatacacacaacacacacaacacatacacacacaacacatgcacaaaacacatacacacacgcacccacacacagtgacagagacttcacaaaaagaaacctcctccaggtkccccagagcacctgtccccggacggggactcccttgcatgagacagctggccaaggagaggactcccttctcccctgccagctttgtcaccttctacttgtttttttgtttttgttttgtttttgagatgaagttttgctcttgttgccaggctggagtgcaatggtgtgatatcggcacaccgcaacctccagctcccgggttcaagcgattctcctgcctcggcctctggagtagctgggattacaggcatgtgccaccatggccaactaattttgtatttttcatggagacagggtttctccatgttggtcaggctggtctcgaactcccgacctcaggtgatccgcctgcctcggcctcccaaagtgctgggattacaggcgtgagccaccaagcccagctcctctacttgttttctatgctgtctggctggtgtctcttctagtccaggtcacccagccctctctcgcctcagaccacggcacctgccattccctctctggacaaagcttccctcggctcttcccattgctatcccttctcttcctcaggattcagttcccaagtcacctcccctggcctcttgaagtgagctgcccacacagttcccttctgcctcatctccatgtctatttcctgcactgtccttgttacaaactggatttatcttccctgtgtgtagattctcatttcttgaccatctgcctccacttcccggaaacgcactgaggttggagtctaccgcttgctgcctgtgccttgactgcccagccttgccccctgggtaggaatccatttacaattgttgaaagaaaaaaaatgaatgattaaaaacagtatagacctagggcagtggctcacgcctgtaatcttagcactaggaggcaggggcaggtggatcatctgaggtcaggagtttgagaccagcctggccaacatggtgaaaccccgtctctactaaaaatacaaaaattagctgggcgtggtggtgcatacctgtaatcccaggaggatgaggcaggcttgaacacaggaggtggaggttgcagtgagcctagatcatgccactgcactccagcctgggtgacagagcaagactcaactcaaaaaaaaaaaaaattaattaaattttaaatatagaatttttgtttttttgttttgttttgtttttgacatggaatctcactctattgcctaggctggagtgcaatggtgcaatcttggctcactgcaacctccaccttctgagttctagcaattctcctgcctcagctttctgagtagctgggattacaggcatgtgccaccctacccggctaatttttgtatttttaggagacacggggtttcactatgttggccagcctggtctcaaactcctgacctcaggtgatccacctgcttcagcctcccatagtgctgggattacaggcatgagccactgcgcccagcctatagaattttttttaattcttaagatttaaatacgacaatatgcgaacaccaaagtgtgtactccccaacttaagaaataggcacaacacaactcctagccacccccctccccattcatctgcaaagtgagtctagggaggttcttgtgattctttggcccaatttttttcctgtccaatacttttatagcagagatgatagaatgtaacagttaaaagcatgggctgtggatgcagaattcctggattcaactcccggctcttcctcctcctacctgtgtgaccccctattgagtgactcaccctctctgtgccttggcttggagctcattaaggcaggtaaagtattcaatggatggacccagccacagccatggccaacaggtaataaatagtgctatgctggaaactatcttgtgcccagaagttggagtcctgcgtctttccttatagtatagttacaaacatttccccacatcttaggaaaaggcttcaaaaggctgcataatatacgtgtgatagccaggtgtagtggcgcctgcctgtaatcccagctactcgggaggctgaggcaggagaatcacttgaacccgagaggcggaggttgcagtgagccgagactgcgccattgcactccagcctgggcaacaagagcgaaacttcatctcaaaaaaatccatgcctggaaagcccctgatctacaagttctcaccaacccccagtggagcacagttaggtagttttcaaatttccagtattgtccatgaagctgcgatgtggggtttcataattgcttaggcattttggacagatggtcgtagaacatttcctaagaactgaacaaagcttttgatgcacttagccaaacccgcctatgaaaatcttcttggagttcactgtccccacggaagggtgtgaggacctgcctcctcacccatctcgcagctcctctgcatctgggcatccccagtgaaactgtggcactagttggggaagaacagagccaacccaggggccagcaggagtccagccccaaaccaggacccggccactgttttggaaccaactccttcagtgttaccctacaacaccctcgccccatgaaggctccacctccagccctgggctcgccggagttacccagtcagacgatgccatttctgctccctcctgaargaggaagtgtccaggatgagaacttcaggcaaagaggtgcctgtggatgggcagtgggagaagacttggagacagagcatctgtggctaaggacagggagatttggggtggtcatcacaaagaggagggcctgagggagggaaggcaccgttcctggggctgagaagtgaccccatccctgactctacacaaggaaaaatgagatgtggcctcgtggactaggctggattcggggcagaaggtcctggagaccaccagcaaagaaagcaaaaagctttccaggctcatcccaggtggtcggggcctcagagatgaacaagtgcctgccagggctgcagggcacccgtctgtgtcttcctttcatctcccctctgacctctggatgccagatgtctccaaaggacttcaacttttttttgtttgtttgtttttgttttttgagagagtctcactctgtcacccccgctggagtgcaatggcaccatctcagctcactgcaacctctgcctcccgagttcgagcgattctcctgcctcagcctcctgagtagctgggattacaggtacgaaccaccatgcccggctaatttttgtattttagtagatggggtttcaccgtgttggccaggcaggtctcgaactcctggcctcaggtgatctgcccgcctcagcctcccaaagtgctgggattacaagtgtgagccaccgcgcctgacctggacttcaactttaactatgaaaacctacagctggccaaagggcgaggggagacttgcctatcctaccatgtagagtgatcagatggtgacaccctgtcctgctggacaccagtgtccttcacaaccaggtgttagctggggatggacacaggaatcccagattggtagggaaaggggagccccccacaagaccagctttcttcctcccatcaggctcagaccaaacacattgcacaacgcagttgcatggaagccacaaagatggaaacccagggcctggggccctctgggagggacctacacacgatcatagcccccccgacaatgcctcgtgtgcccaacaccagcccaccaggtagctagagccattccctctggtcactggagcagagcagccaccacagcctcctgcaacacaccctcccatgctgcgcccacccgcctgggctctcccacctccctttgacctaccttgttcctgggcacagccccctgtcctggctgcagatctcagggtaacagacctccacacagctgctgatgcagaagtccaggctgcagtgcccacaagtggatagaggagggggtacgtgggatggaggggctcactatgggtcctcgttgatttccctacactgtgatctcctggagggaggaccatgtgccatccatccttgcatcccaggttcctgcctgagccgtggccctgagtgggtgctcttgggttactgttgaaggaatgaaggaactagtatatgaatgaaccagttgtccttccttgcctccccccttccctccctccctccctcccttccttccctcccttcattgacccttccttccctccctctctccctccctccttcccttccttcctttcttccttccttccctccctcccttcattgacccttccttccttccctccctcccttcattgactcttccttccttccctccctctctccctcccaccttccctccctccctccctccttccttccttccctccctatctccctccctccctcccttccttccttcacccttccctccttccctccctatcaggggacctggtccgataatcatgtaggttcttttctattttcttaagtgtcggctggcttgagaaataaagggacagagtacaaaagagagaaattttaaagctgggcttccgggggagacatcacatgttggtaggatccgtgatgcctcacaagccgcaaaaaccagcaagtttttattagggattttcaaaaggggagggagtgtgtgaataggtgtgggtcacagacatcaagtacttaacagggtaatagaatatcacaaggcaagtggaggcagggcgagatcacaggacctcaggactgaggcaaaattaaaattgctaatgaagtttcgggcaccattgtcattgataacatcttatcaggagacagggttttaagagcaacccgtctgaccaaaatttagtaggcgggaatttcctcttcctaataagcctgggagcgctatgggagactggagtctatctcacctctgtaatctcgaccataagagacaggtacgccctgggggggccagttcagagacctacccctaggtgcgcattctctttctcagggatgttccttgctgagaaaaagaattcagcgatatttctcccatttgcttttgaaagaagagaaatatggctctgttctgcccggctcaccggtggtcagagtttaaggttatctctcttattccctgaacaattgctgttatcctg

SEQ ID NO: 93697 - DNA, 12667 bp, Homo sapiens
tgaccactttttaatgggattgttttttctttccacttctataaattttataattagaaaacttagaaaggccagaaaaatgaaaatttaatatacattaactagagaaaatcagtagcatacgtgtgtgctagcaacaactcattggaaaatagaagtttttttttaatatatagttccaaaccctatatataaataggatataaataggatttggaacttctccgagtactcttttttttttttttttttttctgagacagagtctagctctgttgccaggctgcagtgcagtggcgcgatctcggctcactgcaacctccacctcccgggttcaagcgggcctcagaaataataccacaaagtatatatacttttgaggcctctgttctgttccattggtgtatatatctgttttggtaccagtaccatgctgttttggttactgtagccttgtagtatagtttgaagtcaggtagggtgatgcctccagctttgttttttttttttttttttttgcttaggattgtcttggtcgagctctttcttggttctatataaatttaaagtagttttttctaattctgtaaggaaagtcaatgttagcttgatagggatagcattgaatctataaattactttgggcagtatggccattttcaccatattgattcttcctattcatgagcatggaatgttttttcttttgtttgtgtcctctcttatttccttgagcaatggtttgtagttctccttgaagaggtccttcacatcccttgtaagttgtattcctaggcattttattctaaaaaagaaaaatcctctaagaaaaagacaaacaactaaatagaaaaatgcacagaacagttgaacagatatggcataaaagaggctatccaagtggctaatacagtaaaagatgctcagcttcattagttattagggaaatgcaaaccagagccataattaaatacctctaaatatccaccagaatgtctatagagaaaaagtactggtgacgatgtggagtaactgcaatcctcatacattgctggtaggagtggtacaaacaaaattgtttggtaatatccagtaaaggtgaacatatccacactttatgacccagaaataccacttccaaatgtaatccaatagaaatgtgttcatacgttcaccaaaagacatggacaacaatgtgtatagcagcacaatgcataattgcctcaaacttggagactatccaagtgtccataaaaaacagaatggggctgggcacagtggctcacacctgtaatcctagcaccttcggaggccacggtgggaggattgcttgagcccaggagtttgagaccagcctgggaaacatggagaaatctcatctgtacaaaaaatacaaaaattagctaattgcagtaatgtgcacctgtagtcacggctgcttgggaggctgaggtggaaggatcgtgaggcagaggttgtagtgagctgacattgtcccactgtactgcagcctgggtgacagagcaagaccctgtctcaaaaaacaaatcaaaccaaaaaaaaaaaaaaaaaaacaaaaatagatgaataaattgtggtattttcataagatatagaaaactctacaacaatgagaataaataatttacagctacttgcaataaatcaatggatctcacaaaagtgatgttgagtgaaagaagtatgtactgtataattccattgatatttagacatttcagctgagcctagtggctcacactttaaacctagcaatttgggaggctgagacaggaggatcacttgagcccaggagttcgaggttatggtgagctatgattgcgccactgcactccagcctgggtgacagagcaagaccctgtctcttaaagaaaaaaaaaattaaagacaatccatcgatattgagtacatagtgtataattccattagtaatttgagatgtatataaaattgatttatatgttgtgctttacagtgttctaatgggctttctaaacaactgtatgtttaaatttagatggcttatatgtctataacaccagcagctaagtaagcatcaaatttgtcattgtatttccctccttaaacaaacctgcggtaagcagaataatggtcccccaaagacatccatgtcctaattactagaacctgtgaatatgttactctgtagggaaagggacttttcagatgtgattaaattaagggccttgagaaggggaaattatgctgggatatcggggtgagtcctatccaaaatcatatgcatccttaaaattggagaacctctcctaatgtggtaggagggagatgtgactatggaagaatagttagagaaatgccacattgctggctttgaagatggaagagagaataatgagccatggaatgagggcagcctttgaagttagagaaggcaaagaaacagattctcccctagatcctcctaaaaggaacgcaatcctgccaacgccttgatttaagcccagtggaaaacatatgggatgtctgatttacagaactgtaagataatgaatttgtatttttttgggcagtggggagggcagggtctcactctgtcacccaggctgaagtacagtggcaagatcatggcagcctcaaccttctgtgcttaggcaatcctcctgcctcagtatcccaagtagctggaaccacaggtacgtgccacaatgcttggctaatttttttaattattatttgtacagatggggtctccctatgttgcccaggctggtcttgaactcctaggctcaagtgatcctcccaccttggcctcctagagtgttgggatttcaggtgtcagctagcacacccagacaatttgtattgtttttgaaataccaagttggtggtaattcgttgtagcagcaatagaacactgatataactttcttctcctgatttttagttggaaaggcaacattttaaaaaaatctcatgctttcatctctcatgagttcccactgtcagtagcagcagcaatgatcctataatgcaggaagtttggcaagattgagagttatgaactgtatagaataaatcagatatgcaaggagaaaaggacacaaagggcttgtcttcagttcaaccccagttcaactgtcactgggggttctgttatgaaaacaagcgctgtttctgcaaggtgcagacagggcaatactcctatataaatctgctcttgatttaacaacaaaaataccttcataaataaggaaatcgttccagtaagtatttggcatgccaatgatactaaaaatccattaatgcatctgagaagtgattatacctccctgaattggggccaacaagatgattctttgaggtctccaacaagagaataatataaccaagcagagaacttggctgtttaattagcaagcctgaaaaataatgacttgtgagtgtgccaaccaatgctgacctactctctccacccacattctctgatagagactttgatgtttttcctccaagagttttttaaagtgttatgaaaacacagcttcaatacaagtttcctaacctacacctacaccctatacaggaattctggaaccatcacttgaactatcatttcacacagagcattgacgcgtcattaattgtgaatacttgccaattttcgttgtaaattgtttggcattattttgtaaaggagaacatatgcatatccatattcctatggctgctgtaacaaaacaccatggatttgaaacaagagatatttattctctcacagttctggagtccagaaatcctaagtcagtttcactgggctgaaattaatgtgctggcagggcactttgttttctgctcttctgtttggagtcaaatctccctctgcctcccacttataaggacacttgtgattgtaattagggaccacccagataatccaggataatcttcctatcccaggacccttcacttgatcacatcttcaaagactcttttcccatataacagtcataggtttgagaattggaatgtggacaaggctaatatgcatgtgcttctttttttttttttcgagtcggagtctcgcttcgtcgccaggctggagtgcagtggcgcaatcttggctcactgcaacctctgccttccgggttcaagcaattctcctgcctcagcctcccgaggagctgggattacaggcatctgccaccacacttggctaatttttttttgtatttttagtagagatgtgtttcaccatattggccaggctggtctcgaactcctgacctcaggtgatccacctgcctgggcctcccaaagtggtgggattacaggaatgagccaccacacctggccataccttcaaacttctaaataaagaccaaaatacttctaatattaaacaatgaaataaatgtgagctatgcatacatttaagaaagattcataaaaatgagattaatgatttacccaatttttgttgtttttcagacggggtctcactctgtccctcaggctggagtgcagtggtgcaagcatagctcactgcagccttgacctctctgggctcaggtgatcctctcacctcagactccccagtagctgggactacaggtgcacaccaccacacccagctaattttttgtatttttttgtagagacaatgttttgccatgttgccgaggctggtctaaaactcctgggctgaagcgatctgcctgccttggcctcccaaagtctctggattacaggtataagccactgcacccagcctacccaatttttggggaatcaatgagtgaaggttgttgtagtagtgttgggttaaattaaggaagaaatgtttgcaaaatgaaaaacgtaagcaacagctcttaccaccatgcagttaaaacacacacacacacacacacacaccacacacaaatacaatgggtcggctgagcgctttcagatcatctactgttgtgtatttgtatgattatcatagactcatcagtttttagtttataataatttgtatttatttatttcgattttccagcccatttattccagttcagggttagtgcctatcttgtcagttcagggtgcaaggcaggaagcagccctagacaggatgccatcccatcacagggcacattcatacgcacacccaaactcactcagaccaggaccacgtagagacatgctccttcacctcatgcggacatttttgggatatgggaggaaactggagccccagagaaaacccaggcatatatggggagaacgtgcaaactccacacaggcagtggccccagctgggtgtcaatttttttttttctcatcaacattataatggaatgaggttcttcaaggatctgctgtatgagactaacccagagtcatttttcaaattactagatttaatgaatcagaatttctaagaaatatgctggataatctacatacttaacaagcatcccaggtgatttttctcattagggagatttgggaaatttctagatgagtgcttctctagagttaatgtgcataggaattacctgggatcttgtttaaaatgcagttttagggctgggcgcggtggctcacacctgtaatcccagcactttgggaggccgaggcgggcggatcacctgaggtcaggatttcgagaccagcctggccaacatggtgaaacccagtctctactaaaaatacaaaaattagctgggcatggtggcgcatgcctgtaatcccagctactagggaggctgaagcaggaaaatcgcttgaacccaggaggcagaggttgcagtgagccgagatcgcgctattgcactccagcctggacaacagaagcaaaactctgtctcaaacaaacaaacaaacgaacaaacaaaaaacagcaaaagcggagggtgctagaagtagggggcctagaaacaaaattcccggggctccctccggggccgcggtctgggctgcgcatttggctgccgcgctcctcgcgaaggcagtggcttccaaactcctgcgcgcggtcatcctcagacccccctgctcgggcaagggcaccgagtgccagagcatcgcccagaactttggcttccaggatttctccagtgggcacttcttgtgggagaacatcaaggccaaaaccgaagttggtgagatggcaaaacagtatataragaaaagtcttttgcttccagaccatgtgatcacacgcctaatgatgtctgagttggagaatagccgtggccagcactggctcctcgatggttttcctaggacattacgacaagccgaagccctggacaaaaatctgtgaactggatttagtaattagtttgaagattccatttgaaacacttaaagatcgtctcggctgctgttggattcaccctcctagcggaagggtatataacatggacttcaatccacctcatgtacatgggattgatgacgtcactggtgaaccattagtccagcaggaggatgataaacctgaagcagttgctgccaggctgagacagtacaaggatatggcaaagccagtcaytgaattatactagagccgaggagttctccaattttctgggacagagacgaacaaaatctggccctatgtttacacacttttctcgaacatgatcacatctattcagtccaaagaagcatattaaccctgcccaatggaagaaccaggaagatgtggtcattcagtcaattgtgtgtgtagtattggtgctgtgtccaaattagaagctagctgaggtagcacttgcagcctcttttctagttgaaatggtgaactgataggaaaacagatgagtagaaagagttcccgaagaggccctcctctgcctttcaaaagaaggtcacctacacatgtttaacgtgtctctgcacgtctcaagcccttcacaggagaacaagtacagtgtggatttcaaacggggcgtaacctcagttccagctgatttttgacaactatgttgttgctgtggtatcctttttttacacgtgatgatggtggtttctggttccccccatccccacaaaggctgttgtaccacagcacctggaagcctgagtccgttaagggctctagcccagatttgtcccaggctttctgctgtgtgcctccctggtgacaatgaaattaaggctacttactctcagtggttgtttctctgctcttgagtgactgtgtccacagttcatttttttttccagtaggaataactccttttctgcatccatgctccatagagtccctccctttcagacatctgggatgaaagaatttggcttctatttctttttagactgcatttttttttgacatctattttcactcttaggccattaaacaaaacaggtagttatcgcttttatccctctgaaattcttctaagaactgagtgaggggactgtattgaatctctgtatgcactgggaactgagctatgaagaggatcttctttctgaagaggatcttactaaactgctggtctgacactcatggattgacactgttcctttcttttattgtgaaaaaaattaaacccctaaaaatcgtttgggaactccctaaagtattttgggaatcctcaaaaaacatgggaggtataagtatttagctacataaatgttgtaagatcacatcttatgtgtagaagtgataagatcatttggaattactggactagttgaatagttaaggtttctattcaggacaataaaatgtattttgaaagtgctgctaactattgatgctgacagtgtttcactcctatcagtgactcaaatatattatagataggtggtaaagggaacggagcctgtggggttaagtagaatgttgtgctagctgtgcctggactgagtataacagctttacgattatgggaaaacaaaatctttattattttttttccattccaaagattcatcctacagggtggccataaagtctagaattagatacaaatattttgtcattcattataacataatatcaataaaccatttgttaaaagatttgcctggtttccagagttggtggccaccttgaataattcttgctgtggtctgggaaggacaatgaaatttattcctgctgccttaaaaatatgtatcccttcttcatgcatcataactgtccccagtgagtgtcctttactattcctgagagtgactcctgtctaacttttcatactggtgagaagaaaaggagcctattttaacacttcagtggtgttgaaacacattacttactttctgaagatgtctcagtgaatcctcagtatgataatgaatgcgtcttccttctaagtactgcccaagcacttgccagctcctctcgcattgtcccttcatgtgaatattttttggttactttagtggaaatatagacaagtgtcctccccatcctctcaaacataatgagattgtttagtttgtaggtttatataatgaaaatgcccagtcagatctatgaatcgtcggtacattatattgcctctgagcactttagaatgtagagttgcaattgaatggccatttgtggagatggggtgcatatcatatgtagataaagctcaggtctcctggggaaccagttatagagaaaaataagtctgatacgaggaaaattgcacgatttagagtatttctgccatagagaaaatttccacaaactaggaaacgtagagagttaaagttattctaaagaatacccaaaagaggaaagtctgtgcttttttggaaaaaggaaaatctccaaacttctttcttcacttccctctgtgtttaactgaccctccaatgtgatcattgcctttggagttttggagaagtacaggaagtggcctgatccctgcttccatacttcactcctctatctatccttccctccctctttccttccagctaaatagacaattctagccaacattgagtcactcagtaagtctccagtgtgtgtgtttgctgagattgtctagcagttgagggtctgtgctggtttaggtgagaccaaatagagataaatatctttccatggtctttgaaacataatgtttattttgtggtcaatggccttaaaaaaatctatttctggttttcttcaacaaactcactagtttttcccttaaatgattttgtaaaaattaaaattatcttgaaaatgttttgacaaaagtaaaattaaagggacatcttttcttggttttccttctactgccacacaactgttctttcacctttaaccaaagagggtggtttagatggtttccaagattctaacccgacctcgcattctgtcattctacccagctcttaattcagtttgcttccattatcctaacaggcttcttacttacttagaccttggaaatgctgctgtgtttaataccctccaatactaacacagacttaagataggtactgtttattgaaagcctactgagtgaaatgtgcagttttaggacctttataaacatctcaatctttctagcatcctatgaaataggcatgatttcatgctgataaaaaagaagacaggggtcccagggatgtgaagcatcttgctcaggcttcggctgctggtgaccagtgtagctgggactgcagcccaggttttcctaactcagaagactgagcttgttcctggatgttattaatatctacttgtgtccaagcaaccaagggtcttgagtctgcttgattctgcttgtggtctcacatcaagagtaacagagctagtctaggcatggtggagctagtccatgcctgtagtcccagtgctttgggaggccatgatgggaagattgccagaggccagaagttcaagaccagcctgggcaacatcacaagactccatctctacagaaaaataaaaaattagccaagcatgctggtgtacacttgtggtcctagttgctcaggagactgaggcaggaggattgcttgatcctaggagttcgaggctgcagtgagctatgattgcacctctgtaccccagcctgggtgacacagcgagaccctgtctcttaaaagaaaagaaaagaaaatagcagactcactaaagtgatgttcacctttttatgacgttccttttttttttttttcgtttgcttaagcaaaggaagctgctagaggagagtcttgtcttggtcttcctgcctaagaactcctttatgaaaggaataaaagactgtcaaagtaggctgggcttgcgtccaggctaatctgtgaaggaggctagctcatgttccttacctaccctttgggtgtccactgggtcgtgcccctggagcggcctttacccttgagccatggtgctcacacataggcttttgagctccttggagytatccagaccctgctcacttttctttccagagatcagaacaaatcactccctcactcctactccaaacaaggtcttgttgataaactagtccttttcaaagtgctggtaggtaaaccagcgatgatggagcatcaaacacaagttaactcctgacttttgtaccattgtctctctattccattacatattaacatgactctgaataccttcgcccaccatctgcttgttgtgcaacagttgaggcagtaaccaggggagattcacttcctgtcttgtccatctccagggatcactcccctgctgctctccagcagccaagctcaggtgagctccatttttacccaagatgtgaccctctctttggttgggaaggagaaaggtaagaatagccatgaatgagtaaggattcttaaagggaggtgctgctatggtttttttctgctatttaagatgttgagacaggataactttagaaagatgcatgcacaaacccataaatagtgcttttataaaatttagttcactggaaactgagttcagtatttgacattagcttttctttcaaagtgtttaagactgctggaggtctttgctcaaataataaatactgcgtatttccaaatgtgttacggtataggcagtagttactatttgtctactccatgttaggcacattacatgtattggctaatcaaatcttcatcaattacctgtgtaataatctcaattaacttgcctccttgtattataaatggaaataatcctgtttatttaaacgtatttttatgtatcaatagggattaatcaggaaattcaaagggccttttttttgtatctttccctaatttgagctccctattctcattaacagataaaacaacacatttgcttcagcctggaatatttgcttttggtgcttagaggcagagacaagaaatgggcactcagggagtcacactggtagttgcacactgtatctacagagggcgtgtctcatctgtactctgctgggttacaggatgtcaggaggtatttgtgtccacctgagaattccgtttattaccttccatttaacagacaatgtctttcctttctgcagttgattttgctagagaggcaattcataaggtgaagtcctgttcatagtatgacttgttttctcactatccccttccatttttagtaactccttggtctatttggtgtctttaaaaaaaagaagttggtaatgaagacttctttaaatatggaaatgtgtgctcttttatggcatagatatgaaatcccttcctgtggtaataattaggttattcccagaagcacagggtcattctttttttttttttttgagatggagtctcgctgtgtcgcccaggctggagtgcagtggtgtgatctcagcccactgcaagctccacctcccgggttcacgccattctcctgccttagcctcccaagtagccgggactacaggagcccgccaccatgcctagctaattttttgtatttttttttttcagtagagacggggttttactgtgttagccaggatgatctcgatctcttgacctcgtgatccgcccacctcggcctcccaaagtactgggattacaagcatgagccaccgcgcccagccgcacagggtcattctttaaataaaagctttcctgtttaaagcttttcaaaggagcagaccaccttgaagattccccctagggttgataggtgtctaattccttttataaaattattattgttttcattttaaagctttggctataaagtcagaaatgtcctaaataacaaaatatttcatatttaatttaaagaaaagtaaagagaagaaaaatgaaaacccagtctttatgtaagctccaaggatattagggcttagagggcttttctagttttatgasaatttatactactgatttttatattatatattattggggttttgttgttgttgttttgttttgtttttttgagatggagtctcactctgtcacccaggctggagtgcagtgaygcgatctcagctcactgcaacctctgcctcctgggttcaagcgattctcctgcctcaacctgctgagtagctgggactacagatgcgcgccaccacacctggctaacttttgtatttttagtagagacaggatttcaccatgttgtccaggatggtcttgatctcctaacctcatgatccacctaccttggcctcccaaagtgctgggattacaggcatgagccactgcgcccagccctgtattcttgtttttgagatgagcagatctccgg

SEQ ID NO: 93698 - DNA, 32351 bp, Homo sapiens
  misc_feature (1)...(32351): n = A,T,C or G
tgaggcaggaggataacttgagcccaggagttctagtccatcccagacaacataagaccctgtttctttgtttcttttctttttctttgtttttttttttttttgagatggagtttcattcttgttgtccaggctggagtgcaatggtgcaatcttggctcactgcaacctctgcctcctgggttcaagtgattctcctgcctcagcctcccaagtagctgggattacaggtgcatgccaccacgccccgctaactgagtatttttagtagagatgggatttctccatgttggtcaggctggtcttgaaccccccacttcaggtgatccacctgcctcagcctcccaaaatgctgggattacaggtgtgagccaccgcacccagtggaccctgtttctttaaaaagaaaagtcggggagctctcagggagctcactgatgaattattttggtgatatcaacaattgctatcaaaacacaactataaaatccaaaattataggctgggcatggtggctcacacctgtaatcccagcactttgggaggctgaggcaggcggatcacgaggtcaggagatcgagaccatcttggctaacacggtgaaaccctgtctctactaaaaatacaaaaaaaaattagctgggcatgtggtgggcacctgtagtcccagctacttgggaggctgaggcaggagaatggcgtgaacccgggaggcggaacttgcagtgagccgagatcgcaccactgcactccagcctgggtgacagagcgagactccgtctcaaaaaaaacaaaacaaaaaaacaaaaaaacaaaaaaacccaaaatccaaaattatatctattgccagatctttctccttacttccagacttatttatccaactgtctccttcacctccacacctcaacttaaatgtcaacttgaaattaattaattaataaataatttaattatttattaataattaatgtctttgttcttagatcggctttcctctaacatctcaagatttgtctcaaattcttacttcatgatattagcaccaaatctgaagggctctagtacaggaactctctgagatcagaaacacatgtatttttgagaaaccacacaaaatgaaataattatcatagctgtaaaaagaaatatgcccataaacaaatcatagtaaaggattagaggctttcagtcacactagagagtgatgttaaataaaattattctgttaattcaacaaggaaatatataagcctaattctaacaaagtttttataaaataaaaaagaaccaattggagttgagagtaaaaagtgaagtttagaaagaggcgaggccaactacagaacgtgctcatcacatatcatcaaggctgccccaatcacaacccctgcttccccattccccttattctacttaattctttcccagaccttatatcttcttacagagtaaatatcccctacttactatacgtttccccagcagattgaatgctccagaatgcacggggcagggcactgtcttctgcactgcccggctccctccaccccgcacctgactcaaaggtgccaaatgactgcaggattatgaggttggaagtagtgaatatttcctgaatacttgcagtggttcccagcaatgacaaatctaagatttcctctctccctttcaggaaccttagagaaagcagcaacactgtcagaggtgtttgaacgagaacaactcgatcttaaatagaagctgggtaaaatgaggctgagacctactgagctgcgttcctagatggttaaggcattctaagtcacagggtgagagaggagatcagcacaagatacaggtcataaagaccttgttgataaaatgggttgcagtaaagaattcagccaaaacccaccgaaaccaagatggtgacatgagtgacctctggttgtcctcaatgctacactcccaccaacgccatgacagtttacaaatgccatggcaacatcaggaagttaccctatatggtctaaaaaggggaaccataaaaataatccactcctggccaggtgcggtggctcacacctgtaatctcagcattctgggatgccaaggtaagtggatcacctgaggtcaggagtttgagaccagcctggcaaggtggtaaaaccccgtctctactaaaaatacaaaaacaaattagttgggtgtggtggtatgcacctgtgatcccagctactagggaggctgaggcaggagaattgcttgaacccaggaggcggaggttgcagtgagccannnnnnnnnnnnnnnnnnnnaaaaaaaaagagtaagagaggctgggtgtggtggctcacaactgtaatcccagcacatgggaggctgaggtgggtggatcacctgaggtcaggaattcaagaccagcttggcccacaaggtgaaactacatctctactaaaaatacaaaaattagctgggcatggtggcaggtgccagtaatcccggctacttgggagactgaggcaggagaatcgcttgaatctgggaggcggaggttgcactgacccgagactgcgccactgcactccagcctgggtaacatgagcgaaactccgtctcaaaaacaaaacagtaagaaaaaactggagctgagtcctgctcattatatttactttcctaaaataaaacaacattataaaaaacattactcagtaatatacttgagttgaaagaggaaaaaagagacttaccaaatttttttgcagaaaagctgatccaccatctttcttcatttagtgattctggcataccattcttcctttactgtcgaaatcacaggaatacaagttttctcaatttaatgggtttaatagcttgggttattaaatattattattataaaataggcagtattattttttcttttcctgtgagtaaaattatttctaagatccagaatgtatttactactgaaacaatgctgacacacactgcacaaaaaaggaagaaccagacattcattaaagctgggaaaaagcagaactcactgtgctcaagaaccaccagcaggccgggtgcagtggctcacacctgtaatcccagcactttgggaggctgaggcgggcagatcacctgaggttgggagttcaagaacagcctggccaacatggtgacaccccagctctactacaaatacaaaaacaggcaggtgtggtggcaggtgcctgtaatcccagctacttgggagcctgaggcagggagaagtgcttgaacctgggaggtggagggtgcaatgaattgagatcacaccactgcactccagcaggggcaacaaagcaaaactccatctcaaacaaacaaacaaacagctagccacttaacagatgcctcaataaatcagagtctaatcttctttaaaaaaaaaaaaaaaagacgtaagagatatacagttgcaagttagaatgctaaagaacataaacatagaacaacttaatgtacatataaattcaatatatatccaatcattgtgactatgacacagtaaaatattaaaatactattttcaaaatgtatacaagcttaatgttctatttattcaaactatttatttaaaatacaaatcatcaacataatttgccactaaaatctcatgcagtcccttcacaggacacatgatccactgggagttaataaattagcagctggcaggcagtgacacacagcaaaaatgaaaaccaagaggtgaaacagttctgaaataaagaaggttttaaagctaagagaaattattgaattactaagtcattagcactaatttcgagccaactaattaatatgagatgatacaacgtcctatgctttggtaaattcaaactatgtttaaacactgtctgtaatgtgactttcaaaatgctcctggctttacaaagatgagattataatgtagtaatgctaaagcatttccccctgcagaacatgttctaactttcatcagtcacattgagagtccagaagatgaaggaaaaggtcgtggatttcgctgagaacttaccagagttgaactccctcatgttccgttccccagcattggcgggttccaggactggtggctgtggtggctcgttggtctttgttctcttagaaggtggagaataatcatcaccttgaaaaagaaaatggtgattattgaaggaaccatcttagagttacagccacctccgggtcaacaacattcaaaagctgaatggggctttaaagctattttgagtattaacaattatttctgtattgtgatcttcagcatacttttttctagtttcatttgaaattttattcttttgggatgtgctcaagtgaatactgctttttcctgtcttgcttcattattttttagtttgcttcatttgagtcatcattataaatctccccttctcctcaaataactttcaaattgatgccaagaactatattctattttcaggcttttgagaaaaaactttcaatgaagacagccacctaaagctatacaaatatagaagaaaggggataaaataaagcttagattggaaacaaatttaagattatacaaaattcaagcatacataaacaagggaagctggataattatatgttcaaatacttttaacacgtgcaaaatgtgtagacttaaagaaatagggctggccaggcgtggtggctcacgcctgtaattccaacactttgggaggccaaggcaggcggagcacttgaggtcaggaattcgagaccagcctggccaacatggtgaaaccccatctctactaaaaatacaaatattaggctgggcgcggtggcttatgcctgtgatcccagcactttgggaggccaagaagggtagatcacctgaggttgggagtttgagaccagcctgaccaaaatagaaaaaccccatctctactaaaaatacaacattagccaggcatggtggcgcatgcctgtaatcccagctactcaggaggctgaggcaggagaatcgcttgaaccctaaaggcaaatgttgcggtgagccgagatcgcaccattgcactccagcctgggcaacaagagtgacactctgtctcaaaaaaaaaaaaagaaaacaaaaattagccaggagtgctggcacatgtaatcccagctactcgggaggctgaggcaggagaatcgcttgaaccagggaggcagaagttgcggttagccgagatcaacaccactgcactcaagcctgggtaagagagcaagaccttgtcgaaagaaaaaggaaaggaaagaaaggaaagaaaagaaatagggttacattatttatgaaacagatactgttgactcagtcactagaaagtctgtgtataaatgagcagtgagatattcaagaacagcacacacacactactcaggacagctgttgtgagagttccatgctcatttccttgtggatacaccagcaactcactctgctatgatcctgcaatacatctcatgttagcattagagacatctgggccaggcgcgatggctcacacctgtaatcccaacactttgagaggccgaggcaggcacatcacctgaggtcaggagttccaggccagaccggccaacatggtgaaacgccgtctctaccaaaaatacaaaaattagccaagcatggtggcgcgtgcctgtaatcccagctactcaggagccagaggcaggagaattgcttgaacccaggaggtagaggttgcagtgagccgagatcgtgccactgcactccagcctgggcaacacagcaaggatccatctcaaaaaaacaaaaaagaaaaaaaaaagaaagaaagaaaaaagaattagagacatctggatcaaatcagctgccactgtcatcttccagtcctgcaaagagtcagataacgtcctattaagattgctgctcacacatcatctataaaatactgaaaatatcattttaagaaatctttttttaattttgagagggagtttcgctnnnnnnnnnnnnnnnnnnnnatgctgtgtgttttgatgttgacagcacggtcatcagtgaagaaggaatcggtgagctagccaaaatctgtggtgtagaggatgcggtgtcagaaatgtagggatagcatttattcactttatgaartgataaagaatttctttttttttttttttttttttttttgagacagagtctcactctattgcccagactggagtgcagtggcacaatcttggcttactgcaacctccacctcccaggttcaagcgattatcctgcctcagcctcctgagtagctgggattacaggcgtgtgcaaccacatccggctaatttttttatttttagtagagatggagtttcaccatgttggtcaggctggtctcaaactcctgacctcgtgatccacccacctcagcctcccaaagtgctgggattacaggcgtgagccaccatgcccggccatgaaatgataaagaatttctaaagagtggctgttttggatgaagtgctggaccctggctatggaacatgagcactaggctttttctctcaccccttagagttgaatttgatatattcattcatttatataaatatttatggcaaaaaaatatggataagacatgttcttagcttgattaggggaatgatgaccatcactaaccaaagaagatggcctagggggcagggctcaagtgtccagtggctttgtgtcatggttgaaagtgtggccttagtggttccctggaaaggttcagagtctcttggtggatcctgggtcagagcccctctctccctccctccctcctgccctcccacctcctgccctgcagctgggcaccaccctctgcagccccagtcccccagtcatgcaccatgtcattttcttttttttttttttnnnnnnnnnnnnnnnnnnnncccctgccttctctcacaccccatatccagtctgtcaggaaatcctgttgactgtcttcgacatgtactaaagatccccacccagcaactccctggcctcctcccctacttctcccctctgaccatctctcaacaccaccatggccctggtcaggacaaccatcatctcccgcctggatgttgccaaagcttggcccccatgcttctacccacatcttcccatagtcttttctcaactcagcagccagagaacgcttttaaaatgggagacagatcatgtcgcctctctgctcagaaccttctcgcagttcccatctgagtcagactaaaagccaaagccccagcaataacctcccagggcttatgtgatctgtactgatccccacccagcaactccctggccccctccccgaattctctccctctctccgtctgctccatgggcctccttccagagcctcagacacacctcagacactttattctattgtttctgtctacgagcctcttccctcagcaccttggccagctccttcccctccttcaagtctttactcaattttcacttaggaggccacccctgaccattctatttaacattgccatctgtccccatgcccaccatgctcatttcttctttctttactttcttctttctttttttcaagatctcactgtcaccaaggctggagtgcagtggtgcaatcaaagctcactgcaacctcaaatttccaggctcaagcgatcctcccacctcagtctcccgagtagctgggactccaggttcacaccatcatgcttggctaaattctttagtattttattttattttattttattttgagacagagtttcactcttcttgcccaggctgtagtgtaatggtgcgatcccagctcactacaaactccacttcccagattcaagtgattctcctgcctcagccttccaagtggctgggattacaggtgcgtgccaccacgcccagctaatttttctatttttagtagagccggggtttcgcaatgttggccaggctggtctcgaactcctgacctcaggtaatctgcccgcttcggcctcccaaagtgctggaattacaggcgtgagccatcatgcctggccagttttttcattttttgtagagacaaggtcttactatgttgcccagactggtcttaaactcctggcctcaagtgatcctcctgcctaaattcctaaagtgctgggattaccggcatgagccatcatgcctggcttcatgttcatttcttcttgctgctgcaacatagtttgcagtttcctacatttagtggcttaaaacaccacaaatctaccatcttacagttctaggcgccagaaacccaaactaggtccattaaggctaaagtcaaggtgccagcagggctgcattccttctggagactctaaagtgttcccttggcttttctagcttctaggagccacccccattctttggatcatggcccctgactccatcttcaaagccagaagtgaagcatcttcaaatctccctctcttacctctgctttcatcaccacatctcctgcttcaattctgaatctcctactctctttcttttataaagacccttgtgactgctgagcatggtggctcccacccagaagcccaacactttgggaggtcaaggcaggaggaacacttgaggcccgaagtttgaaactagcatgaacaacatagtgagacccccacctccagaaaaaaataaaaataaatattagcctgacatggtggtatgcgcctgtagtcccagctacttgagaggctgaggtgagacaatcgatttagcccaggaggttgagatcagcctggacgacataactaaatctcatctctacaaggatgaggtgggaggatcacttgagcccaggaatttgtggccagcctgggcaacaaaagaagaccccatctggccaacatggtgcaactccgactctacaaaaatgagctgggcatgggtgacatgcatgtgtagtcctagctacttgggaggttgagatgggaggatcgcttgatctcagaaggccaaagctatagtgagctatgatcacatcactgcactccagcctggatgacacagggagattctgtctcaaaaaaaagaaaagaaatatatatttcatctctgtccctggttcctggcacagagcttctaaagctcttacaaagacctcagtgatagatgtgacaggaacatcttttgttttaatattttgttgttgagatgacgtggtgactgcaagctcctagatttcttcaggaggagggctgattgccaatggaagcaaccacatgattagacgcttggaactttcagcctcatgcactgaactccaggaggaagaggggctggagactgccttaatcaccaacggccaaagattttatcaatcatgcttgcataataaagcctccataaacaccctgaacagggtttgcggagcttctggggttgctgaacacaggagatgctgggagggtggcatgttcaacagagggcatgggagctctgtgcccctcctaacttaccttgccctgggcatctttcttttttttgagatagggtctggctctttagtccaagctagagtggagtggcacaatctcagctcactgtaacctaagcctccccagtccccagctcaaggtgtcctctcacctcagcatccctagtagttggaactctaggtgcacaccaccacacccggnnnnnnnnnnnnnnnnnnnnnnnnnnnnnnnnnnnnnnnnnnnnnnnnnnnnnnnnnnnnnnnnnnnnnnnnnnnnnnnnnnnnnnnnnnnnnnnnnnnnnnnnnnnnnnnnnnnnnnnnnnnnnnnnnnnnnnnnnnnnnnnnnnnnnnnnnnnnnnnnnnnnnnnnnnnnnnnnnnnnnnnnnnnnnnnnnnnnnnnnnnnnnnnnnnnnnnnnnnnnnnnnnnnnnnnnnnnnnnnnnnnnnnnnnnnnnnnnnnnnnnnnnnnnnnnnnnnnnnnnnnnnnnnnnnnnnnnnnnnnnnnnnnnnnnnnnnnnnnnnnnnnnnnnnnnnnnnnnnnnnnnnnnnnnnnnnnnnnnnnnnnnnnnnnnnnnnnnnnnnnnnnnnnnnnnnnnnnnnnnnnnnnnnnnnnnnnnnnnnnnnnnnnnnnnnnnnnnnnnnnnnnnnnnnnnnnnnnnnnnnnnnnnnnnnnnnnnnnnnnnnnnnnnnnnnnnnnnnnnnnnnnnnnnnnnnnnnnnnnnnnnnnnnnnnnnnnnnnnnnnnnnnnnnnnnnnnnnnnnnnnnnnnnnnnnnnnnnnnnnnnnnnnnnnnnnnnnnnnnnnnnnnnnnnnnnnnnnnnnnnnnnnnnnnnnnnnnnnnnnnnnnnnnnnnnnnnnnnnnnnnnnnnnnnnnnnnnnnnnnnnnnnnnnnnnnnnnnnnnnnnnnnnnnnnnnnnnnnnnnnnnnnnnnnnnnnnnnnnnnnnnnnnnnnnnnnnnnnnnnnnnnnnnnnnnnnnnnnnnnnnnnnnnnnnnnnnnnnnnnnnnnnnnnnnnnnnnnnnnnnnnnnnnnnnnnnnnnnnnnnnnnnnnnnnnnnnnnnnnnnnnnnnnnnnnnnnnnnnnnnnnnnnnnnnnnnnnnnnnnnnnnnnnnnnnnnnnnnnnnnnnnnnnnnnnnnnnnnnnnnnnnnnnnnnnnnnnnnnnnnnnnnnnnnnnnnnnnnnnnnnnnnnnnnnnnnnnnnnnnnnnnnnnnnnnnnnnnnnnnnnnnnnnnnnnnnnnnnnnnnnnnnnnnnnnnnnnnnnnnnnnnnnnnnnnnnnnnnnnnnnnnnnnnnnnnnnnnnnnnnnnnnnnnnnnnnnnnnnnnnnnnnnnnnnnnnnnnnnnnnnnnnnnnnnnnnnnnnnnnnnnnnnnnnnnnnnnnnnnnnnnnnnnnnnnnnnnnnnnnnnnnnnnnnnnnnnnnnnnnnnnnnnnnnnnnnnnnnnnnnnnnnnnnnnnnnnnnnnnnnnnnnnnnnnnnnnnnnnnnnnnnnnnnnnnnnnnnnnnnnnnnnnnnnnnnnnnnnnnnnnnnnnnnnnnnnnnnnnnnnnnnnnnnnnnnnnnnnnnnnnnnnnnnnnnnnnnnnnnnnnnnnnnnnnnnnnnnnnnnnnnnnnnnnnnnnnnnnnnnnnnnnnnnnnnnnnnnnnnnnnnnnnnnnnnnnnnnnnnnnnnnnnnnnnnnnnnnnnnnnnnnnnnnnnnnnnnnnnnnnnnnnnnnnnnnnnnnnnnnnnnnnnnnnnnnnnnnnnnnnnnnnnnnnnnnnnnnnnnnnnnnnnnnnnnnnnnnnnnnnnnnnnnnnnnnnnnnnnnnnnnnnnnnnnnnnnnnnnnnnnnnnnnnnnnnnnnnnnnnnnnnnnnnnnnnnnnnnnnnnnnnnnnnnnnnnnnnnnnnnnnnnnnnnnnnnnnnnnnnnnnnnnnnnnnnnnnnnnnnnnnnnnnnnnnnnnnnnnnnnnnnnnnnnnnnnnnnnnnnnnnnnnnnnnnnnnnnnnnnnnnnnnnnnnnnnnnnnnnnnnnnnnnnnnnnnnnnnnnnnnnnnnnnnnnnnnnnnnnnnnnnnnnnnnnnnnnnnnnnnnnnnnnnnnnnnnnnnnnnnnnnnnnnnnnnnnnnnnnnnnnnnnnnnnnnnnnnnnnnnnnnnnnnnnnnnnnnnnnnnnnnnnnnnnnnnnnnnnnnnnnnnnnnnnnnnnnnnnnnnnnnnnnnnnnnnnnnnnnnnnnnnnnnnnnnnnnnnnnnnnnnnnnnnnnnnnnnnnnnnnnnnnnnnnnnnnnnnnnnnnnnnnnnnnnnnnnnnnnnnnnnnnnnnnnnnnnnnnnnnnnnnnnnnnnnnnnnnnnnnnnnnnnnnnnnnnnnnnnnnnnnnnnnnnnnnnnnnnnnnnnnnnnnnnnnnnnnnnnnnnnnnnnnnnnnnnnnnnnnnnnnnnnnnnnnnnnnnnnnnnnnnnnnnnnnnnnnnnnnnnnnnnnnnnnnnnnnnnnnnnnnnnnnnnnnnnnnnnnnnnnnnnnnnnnnnnnnnnnnnnnnnnnnnnnnnnnnnnnnnnnnnnnnnnnnnnnnnnnnnnnnnnnnnnnnnnnnnnnnnnnnnnnnnnnnnnnnnnnnnnnnnnnnnnnnnnnnnnnnnnnnnnnnnnnnnnnnnnnnnnnnnnnnnnnnnnnnnnnnnnnnnnnnnnnnnnnnnnnnnnnnnnnnnnnnnnnnnnnnnnnnnnnnnnnnnnnnnnnnnnnnnnnnnnnnnnnnnnnnnnnnnnnnnnnnnnnnnnnnnnnnnnnnnnnnnnnnnnnnnnnnnnnnnnnnnnnnnnnnnnnnnnnnnnnnnnnnnnnnnnnnnnnnnnnnnnnnnnnnnnnnnnnnnnnnnnnnnnnnnnnnnnnnnnnnnnnnnnnnnnnnnnnnnnnnnnnnnnnnnnnnnnnnnnnnnnnnnnnnnnnnnnnnnnnnnnnnnnnnnnnnnnnnnnnnnnnnnnnnnnnnnnnnnnnnnnnnnnnnnnnnnnnnnnnnnnnnnnnnnnnnnnnnnnnnnnnnnnnnnnnnnnnnnnnnnnnnnnnnnnnnnnnnnnnnnnnnnnnnnnnnnnnnnnnnnnnnnnnnnnnnnnnnnnnnnnnnnnnnnnnnnnnnnnnnnnnnnnnnnnnnnnnnnnnnnnnnnnnnnnnnnnnnnnnnnnnnnnnnnnnnnnnnnnnnnnnnnnnnnnnnnnnnnnnnnnnnnnnnnnnnnnnnnnnnnnnnnnnnnnnnnnnnnnnnnnnnnnnnnnnnnnnnnnnnnnnnnnnnnnnnnnnnnnnnnnnnnnnnnnnnnnnnnnnnnnnnnnnnnnnnnnnnnnnnnnnnnnnnnnnnnnnnnnnnnnnnnnnnnnnnnnnnnnnnnnnnnnnnnnnnnnnnnnnnnnnnnnnnnnnnnnnnnnnnnnnnnnnnnnnnnnnnnnnnnnnnnnnnnnnnnnnnnnnnnnnnnnnnnnnnnnnnnnnnnnnnnnnnnnnnnnnnnnnnnnnnnnnnnnnnnnnnnnnnnnnnnnnnnnnnnnnnnnnnnnnnnnnnnnnnnnnnnnnnnnnnnnnnnnnnnnnnnnnnnnnnnnnnnnnnnnnnnnnnnnnnnnnnnnnnnnnnnnnnnnnnnnnnnnnnnnnnnnnnnnnnnnnnnnnnnnnnnnnnnnnnnnnnnnnnnnnnnnnnnnnnnnnnnnnnnnnnnnnnnnnnnnnnnnnnnnnnnnnnnnnnnnnnnnnnnnnnnnnnnnnnnnnnnnnnnnnnnnnnnnnnnnnnnnnnnnnnnnnnnnnnnnnnnnnnnnnnnnnnnnnnnnnnnnnnnnnnnnnnnnnnnnnnnnnnnnnnnnnnnnnnnnnnnnnnnnnnnnnnnnnnnnnnnnnnnnnnnnnnnnnnnnnnnnnnnnnnnnnnnnnnnnnnnnnnnnnnnnnnnnnnnnnnnnnnnnnnnnnnnnnnnnnnnnnnnnnnnnnnnnnnnnnnnnnnnnnnnnnnnnnnnnnnnnnnnnnnnnnnnnnnnnnnnnnnnnnnnnnnnnnnnnnnnnnnnnnnnnnnnnnnnnnnnnnnnnnnnnnnnnnnnnnnnnnnnnnnnnnnnnnnnnnnnnnnnnnnnnnnnnnnnnnnnnnnnnnnnnnnnnnnnnnnnnnnnnnnnnnnnnnnnnnnnnnnnnnnnnnnnnnnnnnnnnnnnnnnnnnnnnnnnnnnnnnnnnnnnnnnnnnnnnnnnnnnnnnnnnnnnnnnnnnnnnnnnnnnnnnnnnnnnnnnnnnnnnnnnnnnnnnnnnnnnnnnnnnnnnnnnnnnnnnnnnnnnnnnnnnnnnnnnnnnnnnnnnnnnnnnnnnnnnnnnnnnnnnnnnnnnnnnnnnnnnnnnnnnnnnnnnnnnnnnnnnnnnnnnnnnnnnnnnnnnnnncaatggtgcaatctcggctcactgcaacctccgcctcctgggttcaagcaattctcctgcctccacctcctgagtagctgaaactacaggcacgcaccaccacacccggcttatttttgtatttttagtagagatggtgtttcaccatgttggccagcctggtcttgaactcctgacctcgtgatctgccggcctcggcctcccaaagtgctgggattacaggcatgagccaccacactcggccaccattttattttcaactccctttcatggaagaacgtttagcctttggtctctttcttgatttatgacagctcgcggctttcaagaaaactacctatgaataggctgtgtaacttttatttatttatttattttttgagatggagtctctgtcttctaggctggggtgcagtggcatgatctcggctcactgcaacctccccctcccaggttccagcaattctcctgcctcagcttcccaagtagctgggattacaggcatgcaccaccacacctggctaatttttgcattttttttttattagagatggggttttgtcatgttggccaggctggtctygaactcctggcttcagatgagctgcccacctcagcttcccaaagttttggcattataggcatgagtcactgcacccagcttgttaatgttattttcaagcacaccttcaaaagtttattccaaggccttgctctcatagcagcaaagcctgtctgttgcatagtggggctcttgttagcatcttccttttggtggatgttgtgtagacccggggcagtaaggcatgttaacctcgaggacattggacctggctggcctgactgttgggtctccctcctaggacatggcgagccatgggtggggcagtgtctttcaaagctgctctcacggagcacttagccccaatccagccctccagggagcaggtgcagagactcatagcagagcaccccccacacctgacccccagcataagtaagaggagccgctgctccaggtgtatttcagcaccagtgttggggrgcatgtcctcctgagagcatctaacgattgctttagagagccctctgggtggtttatttattttcatttttattttttaattttattattttaaaaatatttatttatttatttatttatttatttatttatttatttattgaggcagagtctcgctctgtcgcccagactggagtgcaatggtacgatmtcggctcactgcaacttctgcctcccgggttcaagtgattctcctgcctcagcctcctgagtagttgggatttcaggcacccaccatgccaggctagtttttgtatttttagtagagacaggatttcaccatgttgtttaggctggtctcgaactcctgacctcaggtggtctgcccgcctcagactcccaaagtgctgggatcacaggcgtgagccactgcgcctggcaaaattttatttatttattttttttgagacaaagtctcactctgtcgcccaggctggagtgcagtggtgcaatctcaactcactgcaacttttgcctcccaggttcacacgattctcctgcctcagcctcaggagtagctgggattacaggcgcctgtcaccacacctggctaatttttgtatttttagtagagatgggtttcgccatgttggccaggctggtctcgaactcttcatctcaagtgatccacctgcctcggcctcccaacgtgctgagattacaggtgtgagtcaccrcacctggcttattatttttttttttagattcagagtctcattctgttgcccaggttggagtacagtggtataatcatggcccactgcagcctcgaactcctggggtcaagtagccctcccaccttagcctccttagtagtagggactgcaggtgaatgccaccgtgcccagctaattaaagaatttttttttttttctgaaagtcttgctttgtcacccaggctggagtgcagtggcatgaacacagctcactgcagcatcaatcttctgggctcaagggatcctcctgcctctgcttcctaagtagctgggactacagacataggccaccatgccaatttttttttttttttttgagacggagtctcgctctgttgcccaggctggagtgcagtggcgccatcttggctcactgcaagctccacctcctgggttcacgccattctcttccctcagcctcccgagtagctgggactacaggcgcctgccaccacacctgactaattttttgtatttttaatagagacggggtttcaccatgttagccaggatggtctcaatctcctgaccttgtgatccacctgcctcagcctctcaaagtgctgggattacaggcrtgagtcaccgcgcctggcccaccatgcctaattttaaaaaaaaaawtttttttatagacatagcatctcactacrttgcccaggctggtcttgaacttgtgggcttaagtgaccaattttcacaactcagcctcccaaagtgttggaattataggtttragacactatacccagcctttaagaatcttcttgtagagatggaatcttgctgtgttgcccaggctgttctcaagctccttgcctcaagtgattttctaccttggcctcccaaagtgctggaattaaaggcatggactgtgtggttcttctggcacttacacgtggtcttgtctggccggttgtctggtcctgtctgtttctgcctttcctctttctccagggaaaacctaagctttcctttttgtcctcatcttgtgtttttctgggtccatgggcagagtagagttctagaatggtttcctaaagcagccaagccctacccattgatttctaagtacatttagaaaaacacatataaggctgggcatggtggctcacgcctgtaatcccagcactttgggaggccgaagtggatggatcaccaggtcaggagttcgagaccaggctaaccaacatgatgaaaccctgtctctactaaaaatacaaaaattaagccgggcacggtagctcacgtctgtaatcccagcactttgggaggccaagatgggtgtatcacctgaggtcaggagttcgagaccagcctggccaacatggtgaaacccagtctctactaaaaatacaaaaaaagtagctgggcgtggtgataggcgcctgtaatcccagctacccaggaggctgagggaggaaaatcactggaacccgggaggcagaggttgctgtgagccgagatcatgccagtgcactccagctagggcaacagagcaagattccatctcaaaaaaaaaaaaaaaaaaaaattagccgggcattgtggcaygggcctataatactcaggaggctgaggcaggagaagcrcttgaacccgggaggtagaggttgcagtgagccaagattgcagccttgcactccagcctgggtgacaagagtgaaactctgtctcaaaaaataaagagaaaaacatatagaaaacattaacaccccaggcagtataccttgtcaaacatacctcaggcaaatgcattcaggagaagaaaatacatcttatttccctcttcatgtttcgttttttttttttgttttcttttgtattactcagtgttgggtattttgtatttyattttgcagggagctggtaagtcgcctacaggagcgaaatgttcaggttttcctaatatctggtggctttaggagtattatagagcatgttgcttcaaagctcaatatcccagcaaccaatgtatttgccagtaggctgaaattctaccttaatggtaagatgttaacggtaacatgttccctttcttagcagttccattattcagtattctgggtaatgtcttttggaatgcaacttgaacagtcacatcagagttaaatattgagatgaatggttctctttttttttttttttttttttttgagacggagtctcgctctgtcgcccaggctggagtgcagtggcgcgatctcggctcactgcaagctccgcctcccgggttcacgccattctcctgcctcagcctcccgagtagctgggactacaggcgcccgctaccaygcccggctaattttttgtatttttagtagagacggggtttcaccgtgttagccaggatggtctcgatctcctgacctcgtgatccgcccgcctcggcctcccaaagtgctgggattacaggcgtgagccaccgcgcccggccgagatgaatggttctcttaattgatgtcttttgccctttggtaccctttgctcagcaaaacagacttagatcatcacctgtcttagctttattatctataacatcacctgtctgtacataaatgtctgcatttcgtgaaacattaattcctacatagcccctatgacttaytttgctatgtgttgtatttcaattttatgggagcttctatgcatttgaagcaatttagactcaagaaggagacttttggctgggcacggtggctcacgcctgtaatcccagcactttgggagcctaaggcaggaggatcacttgaggtcaggagttcgagaccaccctggccaamgtggtgaagccccaactctgctaaaaaaaaaaaaaaaaaaaaaataggaaaattagctgggcatggtggcacatgcctgtagtcccagctacttgggaggctgaggcaggagaatcacttgaagctgggaggcggaggttgcagtgcgccgagatcgcgccactgcacttaacagcctgggtgacagagcgatactctgtctttaaaaaaaaaagacagagactttagaagggagacttttgttaacagattactgaactacagctgcccttggggaagcctcctatcccctctgtggtccatagcggtgccacagctgttatattatctcagatctccagttatatcaaggagtgactgagagtgatattctttttttttttttttttttttgagacagggtctcactctgttgctcctgctggagtgcagtggcttgatctcggctcactgcaacctctgccgcctgggttcaagtgattctcctgcctcagcctcccaagtagctgcgattacaggtgcccatcaccacgcctggctaatttttgtacagtgcccaaccgtacttttgttttagacagctggtttgtcctataatcccagcactttggraggctgaggtaggaagatcgcttgagcacaggagtttgagaccagcctgggcaayatagtaagaccccatctctacaaaataaataaataaaataaaataaaaacagctgatttagaactatataagatttaaaacaggagttaaacaaaaacaactctcattacaagataaaaacgaaataataaaaacaaattcaatcttgttatgtcaactgactttgtgcaaacccaagaaaagttatgaataaggaactaaaaaccttttaaaacttttaacaatgccttatccctgtagcatgggcaccaccttttagcctaggtgtgtgctcaataagagttgatttcatttccccaaataataccatcaacaactcataaccgagattttaacatctttttatactttatatactagttcctcatatgttacctcatttaatcctcataacagccctgtgaagtcaaatattatgtttggttttggtttttttagaaagagtctcactctgtcacccaggccggagttcagttgtgcgatcgtagcttatcatagccctgaacttctgggctcaaacgatcctcccacctcagcctcctgggtagctgggattacaggtgtgtgccactgcatcccacaccaccacagcattttatttctctgaactaacgtcattttctgagactagcagaggttttatttacttttttattttattttatttttgagacggagtctcgctctgtcacccaggctggagtgcagtggcgtgatcttggctcactgcaccctccgcttcccgggttcaagcgattcttctgcctctgcctctcaagtagctaggactacaagtgcacaccacgacgcctggctaatttttgtatttttagtagagacggggtttcaccatattggccaggctggtctcgaactcctgaccttgtgatctgcccgccgtggcctcccaaagtgctgggattacaggcatgagccaccacgcccagccctggttttatttattttttgagacggagtctygctctgtcacccaggcyggagtgcagtggcgcggtctcagctcactgcagcctcgacctcccggactcaagcgatcttcccatctcagcctcctgagtagctgggactgctggcacatgccaccacacctatctaattttgtttattttttgtagagatgaggtctcactatgttgcccaggctaattttgaactcctggctcaagtgatcctcctacctttgcctgccagagtgctgggattataggtgtgagccaacatgcccagctggggattttatttctaagcattttaaaatcaatgcaggaaacaaatgctatatagcaggtgtcgtaatatcaaatgtgtccatttcacgtagggcttagcctttatcatgttattctaacataagaaaaactacgccaaaaatatagtgtagccaggtgcagtggctcacacctgtaatcccagcactttgagaggccaaggcgggcggatcacctgaggccaggagtttgagacctgcctgggcaacatggtgaaacctcatatctacaaaaaatacaaaaaaattagctggaagtggtgatgggtgcctatcattgcagctacttaggaggctgaggcatgagaatcagtcaaacccaggaggtggaggttgcagtgagtcaagatcacgtcactgtattccagcctgggtaacagaacaagactgcatctcaaaacatatatgaagtttttaccacctagtttcctgagatctaaaaatagggatwgtctaaaaaataaaaataaaaaaatgatagtctttgtgaatgatgaatgaaaaagagttaaaaggaacctttttggctggatgcgaaggtgactattgcctgtaatcccagcactttgggaggcagagacaggaggatcacctgtggtcaggagtttgagaccagcctggtcaaaaaggtttgagaacctatggtcaggagtttgagaccaaactggagtttgagatcagccccgtctctactgaaaatacaaaaattatccaggtgtggtagcaggtgcctgtaatcccagatacttgggaggctgaggcaggagaatcacttgaacccaggaggcaggaggttgcagtgagccgagatcacgccactgcactccagcctgggcatgatggagcaagactccatctcaaaaaagaaaaaggttctagccaggctggtctcaaactcccaacctcaggtaatctgcctgccttggcctcccaaagtgctggggttacaggcatgagccaccgtgcccagcttttgaatcttttctttttttgacagagtctcactctgtcacccaggctggagtgcaatggtgcaatctcagctcactgcaacctccgcctcccaggttcaagcaattctcttgcctcagcctcccaagtagctgggattacaggtgcccgccaccacgcccagctaattttttgtatttttagtagagatggggttttgccatgttggccaggctggtctcgaactcctgacctcaggtgatccacccacctcagcctcccaaagtgctaggattacaggcatgagccaccacactggctgcttttgaattgttagcttagataatttataaccagtgttggggttggctaagcaatgaacattggcctagcttaatgagaaatacataaaagtaaaatgaagagttttctcagagctcccaatctcattttcaagaaatgacaaaatcagccaggagcggtggctcacacctgtgatcccagcactttcggaggccgaggcgggaggattgcttaagcacagaggttcaagaccagctgagcaacgtagcaaaactctgtctctaaaaaattattcagggattgtggtgtgcacctgtcatcctggctactcaggaggctgaggcaggatgatcacttgagcccagaagttcaaggctgcagtgagccatgactgtgccactgcactccagcctgggtgacagggtgagaccctgtctcataaaaccaaaaaggaatgacaagattggttgggtgcagtgggacatacctgtaatcccagcacttcggaagctgaggcaggaggagtttgagagcaggctggcaacatagcaagaccctacaaaaaatttaaaaagtagccaggtgaggtggggcacacctgtagtctcagctactcgagaggctgaggcacgagaatcacttgaacccaggaggcagaggttgcagtgagctgagattgtgccactgcactccagcctgggtgacagagcgagactgtctttttctttctttcttttttttttttttttttttttgtctcgctctgatggagtcccgctctgtcacccagactggagtgcagtggggcaatctgtgttcactgcaagctctgcctcctgggttcacgccattctcctgcctcagcctcccgagtagctgggactacagatgcccaccaccacgcccggctaattttttgtatttttagtagagacggggtttcaccgtgttagtcaggatggtctcaatctcttgacctcgtgatccacccgccttggcctcccaaagtgctgggattacatgcgtgagccaccgcacctggccaagactgtcttaaaaaaaaaaaaaagtgaagggaaaagacaagtaacagaattttgtactttcaaatgagtatatgcagtattgtgtctatatcctgccagaaaaaaggaaatactattttaaaaaatcatgcacaaaaggagggtatcagttagtacaactaatgaaataataataactataaacaatttttatttatttatttttttcttgagacagggtcttactctgtcacccaggctagagggcagtggcacaatcacagctcactgcaacctcgaactcccaggctcaagtgatccttctgcctcagcgtcctgagtagctaggactataggcatgagccactacccccagatagtttttaattttttttatagagatggggtctcactatattgcccatgctggtctcaaactctggcctcaagccatcctccctcctcagcctcccaacgtgctgggattagaggaataagctactgcgcatggcctataaacaattttaactatgaaaaagtagagtgtttcaatcaatcacatgaatcaatcaatcaaaaaaaaaaaaaaggtgtagattgggggcagtggctcacacctgtaatcccagcactttgggaggccgaggtgggcagatcacctgagctcaggagttcagaccagtctagtcaacatagcgaaaccccatctctacaaaaaactacaagaattagctgggtacggtggcatatgcctgtagtcccagctacttgggaggctgaggtgggaggatggcttgagactaggaggtggaggttgcagtgagccgagattgcaccactgcactccagcctgggtgacagagccagaccctgtctcaaaaaaaaaaaaaaaaaaacktagagcactaccaacagttctccctcatcccagaatagaaaatcccccaccatttcttatgcacacactgcgactcttggcctcccaggcagggcggtgcctgttctggaccagatcccaggtccaaggggatttcctctacaccgcagacttctctttgatcttcccttctttgaaattacagggcagggatgcgatttccatccaggtagttttgtttgtttgtttgtttgtttgtttgtttgtttgatgcggtttcgctctgttgcccaggctggagtgcagtgacgcgatctatactcactgcaacctccacctcccaggttcaagcgattctcctgcctcagcctcccgagtagctgggactacaagtgcatgccactgcactcggctaattttttttgtatttttagtagagacagggtttcaccacgttagccaggatggtctcgatctcctaacctcgtgatctgcccgcctcggcctcccaaagtgctggaattacaggcatcagccaccatgcccagcctaatttttgtatttttagtagatacagggtttcaccatgttgcccaggctagtcttgaactcctgcgctcaggtgatttgcccacctcggcctcccaaagtactgggattacaggcatgagccaacatgcctggcctgccatatagtttatttcttatttattttattttttgagacagagtctcactctctcacccaggctggagtgcagtggcataatcactgttcactgcaacctccgcctcccggtacaagcagttctgctgcctcagcctcctgagtagctgggattacaggcacctgccaccacgcccagctattttttgtatttttagtagagacagggtttcaccatgttggccaggctggtctcgatctcttgacctcagatgatcctcccgcctcagcctcccaaagtactgggaatacaggtgtgagccaccatgctcagctcctgccatctagtttagaactcaaacatttacctactgatgtgatttttatttttgtaggcatttgtcttggttataagagggcagggaccacatcttactctccagaagccctgacattgtccagctgaatgggtccccagcagtggtgcatgtactgatgcaggagagtgcagtgagggataggaggaagccaggaggcgaagacgggaggatgtaaggaggaaggtgctgtgtactcagcaaaggcaccctgggggaggccaggcttacctctctttgcaggaatagtttatgtttgaaacacctggctgggtgcggtggctcacacctgtaatcccagcactttgggagcccgaggtgggcgaatcacctgaggtcaggagtttgagaccagcctggccaacatggtgaaaccccatctctactaaaaatacaaaaattggccgggcgcggtggctcacgcctgtaatcccagcactttgggaggccgaggcgggtggatcatgaggtcaggagatcgagaccatcctggctaacaaggtgaaaccccatctctactaaaaatacaaaaaattagccgggcgcggtggcgggcgcctgtagtcccagctactggggaggctgaggcaggagaatggcgtgaacccgggaagcggagcttgcagtgagccgagattgcgccactgcagtccgcagtccggcctgggcgacagagcgagactccgtctcaaaaaaataaaaaaaataaaaataaaaataaaaaaaataaaaatacaaaaattagccaggtgtggtggcaggcacctgtaatcccagctactcgggaggctgaggcaggagaatcatttgaacccaggaggcggaggttgcagtgggcagagatcacgccattgcactgcagcctgggcaacagagtgagactccgtctcaaaaaaaaaaaaaaaaaaagtttgaaacacttactgctctctattgctcctgcaacctttgttttctgattttctaaaaatcatttctcctccgggtgctgtggctcatacctataatcccagcaccttgggaggccraagtgggcraatcaccagaggtcaggagttcaagaccagcctggcccaayatagtgaaaccccatctctactaaaaacacaaaaattagccaggcgtggtggcaggtgcctgtaatcccagctacttgggaggctgaggcaggrgaacyacttgaacccgggaggcggaggttgcagagagcagagatcacaccactgcgctccagcctgggcaacagagcctccaaaaaaataaataaaaataaaaatcatttatctctcttttcttacttcttaggatgctttcattggmtttggaggaaatgtgatcaggcaacaagtcaaggataacgccaaatggtatatcactgattttgtagagctgctgggagaaccggaagaataacatccattgtcatacagctccaaacaacttcagatgaatttttacaagttacacagattgatactgtttgcttacaattgcctattacaacttgctatagaaagttggtacagatgatctgcactgtcaagtaaactacagttaggaatcctcaaagattggtttgtttgtttttaactgtagttccagtattatatgatcactatygatttcctggagagttttgtaatctgaattctttatgtatattcctagctatatttcatacaaagtgttttaagagtggagagtcaattaaacacctttactcttaggaatatagattcggcagccttcagtgaatattggtttttttccctttggtakgtcaataaaagtttatccatgtgtcagaacagatttgtggaatttgcagttctgcctcttggatattggaatatccaatatttcaggtactgtgttgaagcataaacatcccccaggcaagaaacaggcttaagactttgcttagtgctgggcacaatgtcctcaccccatgagcccactcccacttcctaaagccctgggacctggaaagtcctttttttacctcttgggatttgtcatatatgaaatgttacagagattggtttttttttttcgcctccaatataacaatagagtcttaaacaaaagtactgattgaaaaatggatattcgggctcacgcctgtaatctcagcactctgggaggacaaggtaagaggatcaacttgaggcctggagtttgagaccagcctgggcaacacagcaagaccctgtctctacaaaaaataaaaacattagctggatgtggtggcacccacctgtagtcccagctacttggtgggctgagatgggaggatcccttgaactcaggagttcaaggctgcagtgagctgtgactccaccattgtaatccagcctgggtgacagagtgagaccctgtctcttaaaaagaaaaaaggatatttgaaaatcacataaagtaaaagaaataaaaacaagtttaatcacaaaggccagcattttcccctaaatgaattaaatattaataactcctaacagcctatataaacacatttcttttttataaatgacktggaaatacttgaaagccaggtttgtgtttgttttgagcagagccaagcaagggaaatttcagaacacgctttgaacgtgtgagattctataccctccctggaggtatgggggaggggaaagccacggggttaggaagtggatactgttggataattcagtagaaaaagccataaggtttttaatattgagaattagttgaaaaacttacttaaccaaatttggctatataattaaataaataattattcagccacataagcaaatcaaattaatcaaatttccttccaaatcagtttctgaaggagagacatgaaataggtttggcaccatttaaatgagattccaaacaatgaggccgttgttcccaactgtgaatgcctcctggtcgctctcctagaaaccgttttgtggtgtttgcacttttcagtagtgccaagctctgggcaggaccaggcatgccaggaccttgaaaagtgctgcaaacggcatcagcctctatgctgcccggtgtgcatggcaggagcaggccattggtgggcgggtgggaggaccgatcccccactggttttcactgtctgaccgtcacagctgctactgccccactagttcttgcccgcggcacagatagagcccatttctcaagatgggaattgcaatagagagcttaattcgtgcagaaccggccaaacaggaggccggagctttattcttacatcaatctccccaaaaattcggaggctagacttcttcaaggatactttggcaggccaggggattcgcttctgggtggagccacagaattggccatggggtggggtcgggtgggggcgggggcggggttagttaggtccgggtggagccactgatggtcagaaacacaaaaacctgagccaggcacggtggctcacgcctgtaatcccagcatttgggaggccaagatgggcagatcacttgaagtcaggagttggagacccacctggccaacatgatgaaaccccatctctactaaaaatacaaaatgtggtggggcacgcctgtcatcccagctactcgggtggctgaggcaggagaattgcttgaatccaggaggcagaggttgcagtgagcagagattgtgccactgcactccagcctgggtgacagagtgaaactgcctcaaaacaaaacaaaaaaagaaaagaaaaaagaaatgcaaaaacctgaaaagacatctcaaaaggccaatcttaggttctacagtcgtgatgtaacctgcaggagtaacggggatttacaaatcttgtgcctgccctctagaataataactagaaacggtgtttatgtgtacaccttggcggaatttaggcttctctcatcctcctagcctggtggtctctcactagctttatgaaggtggttgagttttggggaagggctattattattttatttatttatttatttatttatttatttatttattgagatggagtctggctctgtcacccaggctggagtgcagtggcacgatcttggctcactgcaaccgccacttcccgggttcaagtgattctcctgcctcagcctcctgagtagctaggattacaggcgcacgccaccacgcccagctatttctttttttttttttttttttgtatttttagtagagatggggtttcaccatgttagtcaggctggtctcaaactcctgaccttgtgatcctcaagcctcagcctcccaaagtgctgggattacaggtgcccgctgccacgcctggctaatttttgtattttttgtagagactgggtttcactatgttgcccaggctggtctcgaactcctgacctcaggtgatcctcctgcctcgtcctcccaaagtgctgagattacaggtgtgagccacagtgcgtggccagctcactcactcttgacactgtttccacttctactccccgaccccccagttcctcagtgtggtggatccagaagtctgctttacacaactgctccctgtggccaccttcccatgggacagttccatgcagcctgttcagctggccccgctgaccctcacaccccacacagactacgcagatatgctgcagtgcattcagtcactgcaagacctcctggaacgcgtgactgcttgctttatattttgtttgtttttttgagacagggtctcactctgttgcccaggctggggtgcagtggtgcaatctcagcatactacaacctccatctcccaggctcaagcgattctcctgcctcagcctcctaagtagctgggactacaggcgcccacgaccacgcccagctaatttttgtatttttagtggagacgggtttcaccatgctggccaggctggtttcaagctcctgacctcaggtgatccacccacctcagcctcccaaagtgctggaattgcgggcatgagccacaacgggcatgtgtcacaacaggctggctaatttttgtatttttagtagacacaaggttttgccatattatcaggctggtctcgaactcccgacctcagttgatccacccacgttggcctcctaaagtgctgggatttcaggtgttagccacctgtaaaaagttgaattttttttttttttttttttgagagggagtctcactctgtcacccaggctggagtgcagtgcagcagtgcagtggcgcaatcttggctcactgcaacctccactcccgggattcaagtgattctcctgactcagcctcccgagtagctgggattacaggcacctgccaccgcacccggccagtttaactttttaataaataaaactgaaaaaatgtttgatctatttagggggtacaggtacaggatttctacgtgcatatgttgtggaatgctgaggtcttggctttgagtgtagccatgattcaaatagtgaacattgtactcaataggaaaattttcacccctcaccctcttcccatcctcccatcttttggagtctccaatatctgttgttccccatgtctacctattgtttaactcctatgcatgagaacattcagtatttgactttgtttctgaattatttcactgaggataatggcctccagttctatccacagtgctgcaaaagatatgatttcattctatttgtggctgagtcatgttccatggtgtacatgtaccacattttctttacccagtcatctgctgatggacacttaggttgattccatatctttgctaccatgaatagtgctgtgatacacatatgagtacaggtacttttttttttttaactttttgagatggagtttcgctcttgttgcccaggccagagtgcaatggcgcgatctcagctcactgcaacctccacctcccaggttcaagtggttctcctgtctcagcctcccgagtagctgggactacaggtgcacacctccacacccggctaatttttgtaatttctgtagagatggggtttcatcatattggtcaggcgagtttcatcatattggtcaggctggtcttgaactcctgacctcaggtgatctgcctgcctcagccccacaaagtgctgggattacaggtaagtacaggtactttttgatatatagatttctttccctttgggtaggtacctagtagtgagattgctggttgaacggcagttctatttttagttctttgataaatctccatactgttttctgtaagggttgtaataatttacattcccaccaacagtgtataagtgttcccttttctctgcatcatcaccaatatctgttgttttctgacttttaattttatacttatttttatagagatggggtctcatgttgtccaggctggtctcaaactcctgacctcaagtgatctgcccacctcggtctcccaaagtgtgggattacaggcataaaccaccacacctgactgttttctgactttttactaaatagcatgtgcttgggtgcggtggctcatgcctgtaatcccagcactttgggaggccaaggcgggaggataacttgagatcaggagtttgagaccagcctggccaacatggtgaaaccccacctccactaaaagtacaaaaattagctgggcgtggtggcaggtgcctgtaatcccagctactcgggaggctgaggcaggagaatctcttgaatctgggaggtggaagttgcagtgagtcgagattgaattactgctctccagcctgggtgacagagcaaggctccctcataataacaatagtagtagtaataataataataatggcatgtgtccttcttcagcatgaccttaacattgctcccatggtgaggtcgggtctgtgctcctcccccttgaattcaagaaggtctgtgactggcagaagtgattcaagctaggtcataaaaggtgacaccatttctccgtggtcttcccaggatgcttgctctttgaactcagccatcatgctgtgaggaagcccagatcacaaggagaggccacattttgatgttccagtcaacagtcccagcacaggtttcagatgacagccaacatcagttgccagacatgagactgaagaaggctttgtgaagactccagccccagccactacaacagcatgagagaccccaagtgaaaatcacctgcctgaacccatcaactcccagaaccatgaaaataaaaaacttttttttttccagatggagtttcactcttgttgcccaggctggagtgcaatggcataatctcagctcactgcaacctccacctcccaggttcaagcaattctcccgcctcagccccccgaatagctgcgattacaggtgtgcgccaccacacccggctaattttgtatttttaatagagacggggtttctccatgttggtcaggcttgtctcgaactcctaacctcaggtgatctgcccgccgtggcctcccaaattgctgggattacaggtgtgagccaacatgccccacaagattgttattttaagcacctaaagttttggggttatatattacacagtaagagtaagttaaatatcctcctgtccttctagcttttcaaatctcttactcacccaaacctagtctctctctgaacacctgctctgctttaatcaatgttttccccatagacccagcgagaggtaggttgggttatcttcctactcttcatggctgctgagagaccatttcttcttcttcttcttttcttctttcttcttcttcttctttccttctttctgcctcctcctccttcttctccttctttttctacctcttcctcttcctcctcctccttcttctt

SEQ ID NO: 93699 - DNA, 61652 bp, Homo sapiens
gttgtcttgttgcctgccctgtgctgtaaaatgagggtcccttactgcattatcaaggggaaggcaagactgggacatctagtccaccggaagacctgcaccactgtcgccttcacacaggtgaactcagaagacaaaggcactttggctaagctggcggcagctatcaggaccaattacaatgacagacatgatgagatccgctatcactggggctgcaatgtcctgccagatgttcaagttaagagatgtcaagggcgttgttttttgatatgtggcagaagacaatctgcatcttagaacaaagcccatatacaaacatgcagaaacaagaaatggagacagagcatgtcagcaaacagccatattggttctagtgattcctgaactcctcctaggaggggaaacctggccacttctttgaattggatacaacccctcaattgagtgaaaacctctggtattcctcaaatgattttttttaattccctatgtgaaatttggagttctgttacttggtatcaaaaaacttggccgggcgcagtggctcacgcctgtaatcccagcactttgggaggccgaggcgagtggatcacgaggtcaggagatcgagaccatcctggctaacacggtgaaaccccgtctctactaaacacacaaaaaaattagccgggcgtggtggcgggctcctgtagtcccagctactcgggaggctgtggcaggagaatggcgtaaacctgggaggtggagctcacagtgagccgagatcacgccactgcactccagccagggtgacagagcgagactccgtctcaaaataaaaaaacaaacaaaaaacaaactaaaccaaaacaacaacaaaacaaaacaaaatcatgcatctctttaaatgctgtaacaatgtacttcattgtcttaattttcttttctttttttgaggaaaattgagaccttttattttctgagaaacaatctatagattggggaggtgcagcctttggtacaagtgaaagtacactctctattttcttttcttttttatttttgagacagagtcttgctctgtcacccaggcttgagtgcagtggtgtgatctggactcactgtcacctccacctcccaggttcaagtgattctcctgcctcagcctccccagcagctggaaatacaggcgtgtgctaccacacctagctaatttttgtatttttagtagagacagggtttcaccatgttggccaggctggtctcgaactactgacctccggtgatccacctgcctcggcctttcaaagttctgggattacaggtgtgagccaccgcacccagcatattttattttcttgattactagtgagggtgaatatatttatttgtatttcctcttttctgaagtcttcacctgtgtattccgacttcagttttgttgtactgctgcataatataccaccccagagtttaaaaacaacaatctaatatgcttacaaattctgtgggtcaggaattttggcaggatatagcagtcatggctttgtctgctacattatttttactgctcaaatggctgggctgacttgaacatatggcagatggctaatccaggggctgctttactcacatttttgctgcctatgctgggatggctgaggtatgggctcaggtgtgaatgtcaatcacagagtctgcctgtgacctccccagcatggaggactctaggtagtgggacttcttacagggatcaggacttaaggggcaagtgttccagtgaaccaggtggaaacaacatggccttttataatctagcccagaagtcacggcccaccagttagactgtattctattggtcagcacagctgcgggcctatccagattcaacaggataatcataaactccacttctaaatgggaggagcctcaaagaatttcaggccaacacagatggggtgttcacttatgcttacacatttgttttgtcatatagttgtaagggtttttttgtttgtttgttttgagacagagtctcactctgttgcccaggctggagtgcagtggtgtgatctgggctcactgcaacctccgtccctggggttcaagtgattctcctgcctcagcctcccgagtagctgggattacagatgcctgccaccacgcccagctaatttttgtatttttagtagagacggggtttcaccatcttggccaggctggtcttgaactcctgacctcatgatccacccgcctcagcctctcaaagtgctgggattacaggcgtgagccaccatgcctggccgtaagttgttttttttttttttttttttttttttttgagatggagtcttgctctgtcgccaggctggagtgcagtggtgcgatctcaactcactgcaagctccccttcccgggttcacgccattctcctgcctcagcctcctgagtagctgggactacaggcgcccgctaccacgcccggctaatttttgtatttttagtagagatggggtttcaccgtgttagccaggatggtctcgatctcctgtcctcgcgatccgcccgcctcggcctcccaaagtgttgggattacaggcgtgagccacagcgcctggccaagtatttttttaatttatcatttgtctttaaaaaatttgtgacattttttaatagcaagatttttttttcttttttgagacagagtcgtggtatgttgcccaggctggacttgaacttctgggctcaagagatcctcccacctcaggctctcaagtagttaggactacaggctcctagatcctgccaccacgagcagacattcatttttattttattttatatatatttttagacaggctctcactctgtcacctaggctggagtgcagtggtgtgatcacaattcattgcagcctccatcttctaggttgaagatgatcttccacctcagcctccgaagtagctgaacggggactacaggtgcaggccgccctgctctacctttttttttttttttttttttttttttgagacaaagtctctctctgtcacccaggccaattgtgcagtggtgaaatcatggctcactgcagcctcaacatccagggctcaagcgatcctccaacatcagcttcccaaatagctgggactacaggcacacaccaccacatctggctaatttttgtttggtttttgtttttctttttgagacagggtatcactcagttgcccaggctggagtttattttttctgtaaagtagtgattacacctatgaccttatacagagttgtcatgaagattggacttcttggcatctagttcaaaagatcaagtttcaaatcccaagtctttaccaattaatatgtattgtatgtttagcgtctgagcctagaaactaattcagcaccaagatatttccccaaattgccgtaagaggtcagtaggcaagataagtatcatctgttttacagtcaagggtggaagtaagaagttacctgacttgcctgaagccacggagacataagtgaagcaaagactggaccaaagtatatgtgtagtgaatgaactgaatgtctgaattcatgccaataaaatgtataacaatttttattatcaatgattatatacttcaaaatcaaggtattgtttgacaacacaaagatgacatgcaaaagtactttttggtggtcagtgccattaatagacttaatagactacaatcagaaagttttttcctttttttttttttttttttttgagatagagttttgctctgtcacccaggctggagtgcaattgtgcgatcttggctcagtgcaacctctgcctctggggttcaagcgattctcctgcctcagccaccggagtagctgggattataggcatgcaacaccacacctagctaatttttgtacttttagtagagacggggtttcaccaggttgcccaggctggtctcaaactcctgagatcaagcaatctgccccccttggcctcccaaagtgctgggattacaggggtgagtaatttttgtattttttcgtagaggtggggttttgccatgttgcccaggctggtctcaaactcctgggctcaagtgatactcctgcctcggccttctaaagtgccaggattacagaagtgagccaccaggccctctgtttgttttcaaaatcagaggtagatgttgaattttatctcatgccgttttgagtctatggccacatgatcttagagctttttttcccttcttctgtcctataattttattaataggtgttctatttctagaataagctctaagatgaacaatgaacatttttcttgttattcatgtagtttctcattcgatccctgaaacctaagattatagtaatcttataatgattgttttatcttcatcttacagagaacactgacattttgttaatttacagaagctcacctaggtagcccatgtaatggtatatttttcctttaacataccgttttttaaattttttatttattttttttttgaggcagagtctcactctgtcgcctgggctggagtgcagtggtgcaatttagtggcacaatctcggctcattgcaaccttcgactcccaggttccagcaatttttctgcctcagcctcccaagtagctgggactacaggccgtgccaccacaccctgctaatttttgtatttttagtagagccagggtttcaccatgttggacaggctggtcttgaactcctgacttcaggtgatccaaccacctcggcctcccaaagtgctagggttacaggtgtgagccactgcgcctggcctaatatgcggttgaatccgattttattacgttttattcagtatttttgcatttatatttataaattagatcgtgccctgttttttcagttttatttttcttttttgttgctctctttgccaggttttggtatcagaattgtgtttgcttccaaaacgagttgagaaagagttggtgatttgctttcattattccaaaattttaataaattataacacccaattccaattccaagtgcatctgattactctaatggattcctgtggcttctgggtctctatgatgaagtcctccctggcataggctcgtatatgggagcttgtaggatgtctgcaagtatcagctcacagtgcggccgctgatggcttggaggaccctcacggtgccttaaaacttttgcctagacaagtgtcacgggagcctctcgcaatacatgcctcccttttctttttttggagacagtgtctcgtactgtcgccagggctggtgtgcagtggcgcgatctcggctcgctgcaacctccgcctcccgggttccagcgattctcctacctcagcctcccgagtagctgggactacaggcacgcgccaccaagcctggctaatttttttgtatttttagtagagacggggtttcatcatgttggccaggatggtctccatctcctgacctcgtgatccgcctgccttggcctcccaaagcgttgggattacaggcgtgagccacggcgcccggccttccttttcctttaagcagtattaaaaaaaaaaaaaaaaagtcctgaaggatggtttcggtctctttcaaggtagaccatacccttgtaactaagcttaaaaaattaaaatctaattttccctccctctccaaagcagcaagggaaaattggatccacggccacgtaggagcccctcacggcaccaaacccggtgtctccagggacgggcggagaccagcgggtgggcttgggcagtacgcgcttttctcttccgactttgggccaaagccttgtccggagatcacagtgtctcgctcggggacacgccctctctaggcccagacttggtccccactggagttcccagcccccctccccgctgcggcacgcacattcccaatgccgggcggggcagggcgcagcaggcccgccctcggcgcgcggccaggctgggctcctcccctggagctgcggccgggagggcgggcggccggggagacggggtggcggctgcagcccgggtagggccaggagacccggtccacgtttgcaaacgcagccgaacgcccaggccgacccgtgccgcccgagcgccgcgctgcgtccgcgccactcttctcgccgccccgatggcgttccggggctggaggcccccgccgccaccgctgctcctgctgctgctctgggtgaccgggcaggcagcgcccgtggcgggcctgggctccgacgcggagctgcagatcgagcggcgcttcgtgcccgacgagtgcccgcgcaccgtgcgcagcggcgacttcgtgcgctaccactacgtggggacgttccccgacggccagaagttcgactccaggtaccgcgcccttggcgcccggcgcggcctcagcggatgcgcgtccctctctccggacaggcctttccctcctgccggacctcccctagctccgccccgtgcagccgcgctcctcccttcttccgctgcccagatcctcccggaccccagaccctccgccgcgggtgagcctcccggccctcacgtgccctaggctgccagccggggactggacccttggaggaccttgagcagcggggttggggcagaccacgtcctccctttcctcccagcgcatggacacacgcaaaatcagtgtaaaataatcagtgtaagtggaggccacgttgcacaactggacccccaagagtggatgttcgtgcctgcctctcttcgccctttcctgttccttccctccgctcccttgggaatctagtcagatggtgcttctcacacagaacaatgatgaagaggctagcagccccaaacatacaatgagctgttaacaatgtgtaggtgtagttctaagtactttccatattgtagtgaactcatttaattgtacagcagtcttgtgaggtaggtactatcactaccctcattttatcagtaaggtaacaagcaactgcggctaagaaacgtgtttaaacaatggagtcagattgtttaatccaactccagagtctgtgtgcgcaactaccactgcccttcctttcctgccatacaaaaacctctcttggggctgggcgtggtggctcacgcctgtagtcccagcactttgagagaacgaggcgggaggatcgcttgagcccaggagtttggggctgctgtgagctatgatcgtgccattgcactgcagcctgggagacrgagagagatcccatcacaaaacaaaacacaacacgacacctctcgtgggcaggaggtagtccaggaccgtcactctgctttataccaggccctatatcaagcccagaactccttctctcagctctgcctcaggatcacagcactgctctcccgtttccctccagtttaggttcggggttaacaggcctctcttcgtccagcaccaggctactcctcgccaaggcttttgttacaaaccctggtctgtgccagcacttcccttcgcgaacactagatcaggcagagagagctatttgttgagcccctgctatgtgccccaaggcctagggtcattacgaatattttgtagactcttgacttttttgaagttccagacaatgaatatacaaaagctgttcagcatagtatgtggcactagcaagcgcttagaaatggtcattcttactaccattttagttactttaaaaaaaaaaaacaacaggccgggcgcggtggctcacgcctgtaatcccagcactttgggaggccgaggcgggcggatcacgaggtcaggagatcgagaccatcctggctaacacggtgaaacccggtctctactaaaaatacaaaaaattagccgggcgaggtggcgggcgcctgtaatcccaactacgcgggaggttgagacaggagaatggcgtgaacctgggaggcggagcctgcagtgagccgagacgtgccactgcactccaacctgggtgacagggagactccgtctcaaaaaacaaaacaaaacaaaaaacaaaaaacgaaacaaaaaaaacagctttattgagatataatgccatacaatttgcccatttggtgtgtacaattcagtgttttttagtatattcacagagtagtgcaaacatcacaactagctatttccagaacattttcatcacccccaaaaaagaaacgctggacccattatcagtcactccccaaccccagttagactgccctccagtccctttcagccacgaatccactttatgtctctatggatttgcctcttctggacattttgtataaatggaatcatataatttgaggtgctttgttatttatttataattggcttctttcatggttcatttacggtgtaaggtatatcagtacttcattcctttttgtggctgtatatgtaatattccattgtgtccattcatcagttgatggacatttggattgcttatactttttggctatcatgaatgatgttatgaacattcatgtgcaaggttttgtgtggatgtaccttttcctttttttggatatatacctaggagttggaattgctgcgtcctatggcacctatgttataaacgttttgaagaatagccaacctgtttccccacaatggctgcaccattttacattcccaccagcagtgtatgaaggttcatagttctccacggtctcaacaacacttgtacttgtctttttttttttttttttttttgagatggaattttgctcttgtcacccaggctggagtgcaatggtgcgatcacagctcactgcaacctccctgcctcccgggttcaagcaattctcttacctcagcctcctgagtagctgggattacaggtgcctgccaccacgcctggctaatttttgtatttttagtagagacgaggtttcaccatgttggccaggctggtcttgaactcctgacctcaggtgatctgcccacctcggcctcccaaagtgctgggattacaggcgggagccaccacgcctggcctgtgtctttgattataaccatttagtgggtgtgaaatgatatctcattgtggtttcgatctgcatttctctaatggctaacgatgttgagcatcatatgcgtattgaccatttgtgtatcttctttcatgtgcttctttcatagggaagaatttcttgcttgagttgatggtaattaattccagtagaacaagttgtcctactatctagaacatctctagggctggcagccactgtgaggtagtgtagggcagttgaaagagcatggaggatctaccatccattcatcaaacgtttttcagcgtctatccctcaagagagagactagtcctagtctagtatgcttcttccccatccctaccacttacagcctaggctattacaacatggtgtgataagtacagtaagacagtagcacacactctgtctctcatagagttcacacatagttcttaccatgtgccttcacatatgttaactcatttaatcttagaataatttgtttaacttctcaagacagtgaggtaggtacctcattacaaatgaataaactgaggctcagaaagttcaaatgatttgcccaaggaacataagtactaagtggttgagtggagatttgaacccaggtagttcatggccataatctatggtctgtagtccacccatgtatatgacagaagaaaggtaagtagctatgaaagcacagagaaggtttaactrtatatttttgtgtctgtgtgtgggggaggttaggatggaatcctggtatggcagggataagacccaaggatgaygaaaattcacctgggaggagctcaggggtgtgtctgcagaccccaaggtccaggcttgtcttttgataaatattattatgtgcctaccacatacctttttgggtatacagagttctagatgctctagcacagtagtgtttaaactacatatacttctgaatcaygtagagagcttgttwtacagtttccgattcagtagctctgggatagggcctaggaatttgcttttctgacaagttcccagctgatgctactggtctgaggaccacactttgasaaccaytgctctaaaacaggggtactgaaatgggatatcaatttacaaaaataaataaatagtaaataaataaataraacaggggtccctaacccctgagccatggacctgttgtggtctgtggcctgttaggaaccgggctgcacagccggaggtgagcagcaggtgagcaagcaaagcttcatctgtatttacagtgtctccgcattgctcacatcactgcttgagctcggcctcctgtcagatcagcaggggcattagattctcacaggcacatgaaccctattgtgtactgcacatgggagggatctaggttatgtgctccttatgagaatctaatgcgtgatgatctgtcactgtctcccatcacccctagatgggaccatctagttgcaggaaaacaagctcagggctcccactgattctacattatggtgagttgtataattatttcattatatattacggtgtaataataatggaaataaagtgcacaataaatttaatgtatctgaataatcccaaaaccatccccccaccccggtcatggaaaaagtgaattcctttcatgaaactggtccttggggccaaaaaggttggggaccactgctctaaaagaatcacagactcagccaggcacggtggctcatgcctgtaatcccagcactttgggaggccaaggcgggcagatcacctgagggagttggagaccagcctgaccaacatggagaaaccccgtctctactaaaaatacaaaaaattagctgggtgtggtggcgcatgcctgcaatcccagctactcgggaggctgaggcaggagaatcgcttgaacctgggaggtggaggttgcggtgagtcgagattgcaccactgcactacagcctgggcaacgagagctaaactccttctcaaaaactaactaactaaataaaagaatcatgaactcaataacaggggtcaacttcattttgtacattcattcatttattcattcttttcttttttttgagacagcgtctcactttgttgcccaggctggtgtgcagtgatgcagtctcacatcactgcagcctctgcttcctgggttcaagcaattcttgtgcctcagccccctgagtagctgggattacaggtstgcaacaccacacctggctaatttttgtatgtttagtagagatggggtttcgccaccttggccaggctggaattcatttattcatccaacagrtatttactgagtaccaactcttgcaggtgccaaggatgtaacagtgaataaaacagaaatctctgccctcatggagcttacatactagtgagaggacaggcrtactcttaagttatatggtaaagtagaagttggtgaggactatggagaaaaagcagtaggagtgagggktgggagggtggggcgacaggcycagaaaggtgagaggacagtggccacccagctaatataactgaccttcagattctggactggggagctctcatgcctcacacaaagcagccagcatgcagtgagtgccttgtgagtattatgcayagatacctctacccgttccagggarggaaggatttcttcttgctgaagccatatgaaaggctttgaggaggagctgatgcttgagttgggccttgagcatggatgggatttcattccttgaagyggggagtgtgtttaagagagtggatggggtggaccagagtctgggcctgagtagtgcatgctcaaggaacagtgagaggctccaatatttgggtcaggaggcagrggacctggcactggaagggtgtgggagaaccagtccttgggaggcctgggtggctgagctaggtgttgtggactttggtatttttttttttcatcccatggattcaagttgccctgaatatatgcttctgttcagaatcttgtgaagggaaggtttttgttcagaggagtaaggggattgaggtgctcagtggayggactgatagtgtaagcagaaattctagagatcagcctcattggggcttcattttacacaggsattcatccagcttctaacattccaggtactgggatacagcrgaggataaagctgacaaaagtccctgccctcaagtcagggttggggtgaacacaagcccgtcctgcagacttaagcagaaaagagtgggaatttgttggaaggatctccaattccttgtgagggtccagaatcatggactgaggtgactttctgcctctctccaaggggttgcaaacggggcttcattctctcccactagaaaaagagtgctccaataagctccccatgctgcacacatgacctctgggatccagcaccagcgccgacaaactggactttctcacttctaggtttccaggaaataatctgatgggtcctgcttggggcaggtgtccaccctattgggtgttaagtcacatggtcctaagtgggggcccaggctcaccctttcagcaggactggtccacagggaagagccagtaggctggrcagcagccaggatgcagtcaggggggcctgacagggkcagtggtgtcagaacaactggccaggtcaggacatgctaacttaggagwtgtttagagtgtgactgcacattgcagctctttttatggagaaggggagtgctgaaacggaggctgctaccgtgcattagccctgtgcgtttctgytaactaggggaagatcctagctacttctcactgtggtctcctgaggccattggcagctggccaagcacccctggtgaagacttcttagcggggccttgaattttcatttgtgggtcattgccagcaattacacatttatattaacaatttaatttggctgtatggtattttactgggctaagccctgtgaaaaatgggaatcatctatagggatctgacattttaacttgtgcagttgcttaaaaacaaaaatccataacagcaatggattttgctttgctttgcaaagtttttcatttaatgatgttttaatgggtcaaagcccatccaagccaacagctcatgtttcagggtctgattctctgaggagctatgaatggaggcgttctctctcatttcttctctgttccctcttgctccctctctcctccctcacctcctctaaccttcctcctctgcagygttctcacactttcccgtctgggtagtttgccggttcattaactgcttttcttttctccctggcatgtctcattagctactggtagagatggctgtttgagggaaatagtcttaggcaaagggtccagaaagcccagagtcccctttgggagtgaatgtgtgsagagggaggtgkkaggcagaaaagccaaactctgcctccctgctttcaagtctgcagtaagatcagtctcagtggtgaaactcagccagcagagggggtgagtctcagctgggagctaggcggccagtggggaggtgagtttcagtcccattcgtgaagggtggtggcaggaccacagtccaaacgtcaagcaggtcccctgtgagtcagccatctgagttggcccaagtgagacaggaccaactttgaggcccccaaagggtagttcccgtgcccagtggacttgttcttccttactttgcctcccttctgttatgggttctcaaaatatggcagtcttttttttaatttctttctttttgagacagggtctcactctgtttcccaggctggagtgcagtggtgctcacagcaacctctgcctcctgggttcaagcaattctcatgcctcagccacccgagtagctaggatcacaggtgtatgctaccacacctggctaatttttgtatttttggtagagacaaggttttgccatgttgcccaggctggtctcgaactcctgagctcaagtgatccacccgcctgggcctcccaacgtgctgggattaccgcttgagccaccatgcccagcctgtcatttgtccttttaaaagctcgttcttattgcagatttaaacctacatttagaagccccattctgccttaagaatatagccgtgggggccaggcacggtggctcatgcctgtgatcctggcactttgggaggccgaggcaggtggatcatgaggtcaggagttcaagtcagcctgaccaacatggtgaaaccccatctctactaaaattacaaaaattagctgggcgtggtggcgtgcacctgtaatcccagctactcaggaggctgagacaggagaattgcttgaacccgggaggtggaggttgcagtgaaccaagattgcaccactgcactccagcctgggcaacagagcgagactccatgtcaaaaaaaaaaaaaaaatatatatatatatatatatatatatatatatgtgtgtacagatatatatatatacatacatatatatatatagagagagagagagagagccatggggggctgggcgcggtggctcatgcttctaatccgagcactttgggaggccaaggcaggtggatcacctgaggtcaggagttcaagaccagcctggccaacatggtgaaaccaaatctttactaaaaatacaaaaattagctgggcgtggtagcgtgtgcctgtaatcccagcttctagggaggctgaggcaggagaattgcttgaacatgagaggcagaggttgcagtgagccaagatcgtgccactgcactccagccttggtgacagtgagacgccatctcaaaaaaaaaaaaaaaagaatatagccatgaggatagttatttatctcaagtaatgtgttgccaatataatgtgagcttttgtgtaggcagtttagtgtgttgactatgatgtctcttgtcttagtggtccttgggttaataattttaaagagcatcatcagagggtgctacagacaactttcccatcactcccctggggcagtgatggaaggggacaaaaacaagctggtggagagaaaaggagggtgttggatgtgctaggtggtttccatttgcctttctaggtccacccttcacctgttccatttgctttttgctctgggaggctgacatgtatggactacatgtgcatagtatgggttacattaatgaccctttgtcttctggctttggttgggttcagccattgggacattgtgataagccattcctgcatcactggaragaaatacccaaggctgggtaatttataagaaaagaggtttaattggctcacagttctgcaggctgtacaggaagcattgcatgctgtcgtcagcttctggtgaggacctcaggagatttatagtcatggtggaagggaaaaggggagcagacatctcacatggcaagagcaggagcaagagagagggtgggaggtgccacacacttttaaacaagcagatctstgaactcattcatcaccgaggggatggcgctaagccctcccaccaggccccacctccaacactggggattacatttcaacatgagatttggcatggacacagatccaaaccctatcaggcatcagatgttcaaagcgagggaagagagtgaggtgaaggtatgtattcctctggcttcctgtctgtagggtcaccatggattgtggccctaaactaaagggcccggttcctgtcaggtarcccctagctgccctctctgtctctgtcattcaagctcaggtgtgatagcagcattccccacccagccacagaggtactatcccttgtgttttgctgtgttctgtacacacctttgcacacacccactttgttattactttaaaaaaaccatcaaatttaccattgtaactgttttgaactgtataatagtgttagctatattcacactgttgtgcaatatatctctagaatttttccatcttgcaaaattgaaactttrtgcccactgaacaacttctctkcatttttccttcttccttgtccgctgataacaacattccactttctgtttctatgagtttaactactttagatacctcatataattcgtggaatcatgcagtatttgtctttctrtgactggcttatttcaytttacgtaatstcctcaaggttcatccatattgtagcatgtgataggatttccttcctttttaaggcggaataatatttcattgtgtgtgtataccacatattttttatccatttatttgtctatggacatttagattgcttctagcttttggctattgtaaatcgtgctgagttgaacatgtgtgtgcaaatatctgagttgttgttttgtttttgttttagtttagacagagtggtttttttgttttgttttgttttttgrgayagagtktcgctcttaktgcctgggctggagtacagtagtgcgatctcagctcatcgcaacctccgcctcccaggttcaagtgattctcctgcctcagcctcctgagtagctgggattacaggcacccagcactatgcccagctgatttttgtatttttagtagagacagggtttctccgtgttggtcaggctggtttctaactcccgacctcaggtgatccacccacctcagcctcccaaagtgttgggattacaggcgtgagccaccgcgcccagcttagacagagtcttttgttctgttgcccagggtcgagtgcagtggcatgatcacagcttactgcagccttgacctcctgagctcaagtgatcctctcacttcaacctcccgagtacctgggactacagtacctktgcaccaccacacatggctaatttttgtgtttttgtaaagatggtgtttcaccaggttgcctaggctggtcttgaactcttgggctcaagcttcaaccttggattacaggcatgagccactgcgtccggcctgattctgttttcagttcttttgggtatacaccaagagataggattgctagatcatacagtacttctatttttaattttttgaggagcctacagaccattttctagagcaagtacattttgcattcccatcaaagtgcacaaagattccaatttctccatatcctctccatcactttttattttccagttttttgatagtggccattctaacaagtgtgtgtgaggtaatattgcattgtggttttctttttctttcttttttttttttttgagacagagtttcacttttgtcgcccaggcaggagtgcaatggtgtgatcttagctcactgcaacctctgcctcctaggttcaagcaattcttctgcctcagtcccctgagtagctgggactacaggcatatgccaccatgcctggctaatttttgtatttttagtagagacggggttttgcctcagccccccgagtagctgggattacaggcatatgccaccatgcctggctaatttttgtatttttagtagagacggggttttgccatgttggccaggctggtcttgaactcctgacctcaggtgatccacccacctcagcctcccaaagtgctgggattgcaggcgtgagccaccatgcctggcctgcattgtggtttttgatttgcatttctctgctgtttagtgatgtgkagcatcttttcatwygcttgttggccatttgtatatcttytttggagaaatattcattcaatccctttgctcattttaaaattggattattttgtggtcgttgagttttaggagttctttatatattctagatattaatcccttatcatatatgaggtttgcaaacattttctcccattttttaggttgcctttttactctgttgattgttttctttgctgttcagagttttaaagtttgacaaagtccyctttgtctgtttttgtttttgttacctgtgcttttggtgtcatatccaatccaatgtcatgatgcttttcccttgtgtttttttcctagttttatagttttggatcttatatttatgcatttaatccattttgaattgattgtttcctatggtataaagtaagaatctccaactttattcttttgcatgtggagatccaattttcccwgcaccgtttattgaagagaccatccttacccactgtgtagccttagcccttgtcaaagatcatttgaccatataggcaaaagtttatttctgggctattttgatctattggtctatgtgtctgtatttgggtcagtaccatgctgccttgattatgatagcttcataatatgtttcaaaatcaggaagtgtgargcctccagytttgttcttctttctcaggattgttttggctctttagagtccttcaagattccaaggccaggcaccrtggctcacacctgtaatcccagcactttgggaggccgaggcagtctgatcacctgaggtcaggagttcaagaccagcctggccaacatggtgaagccctgtctctactaaaaatacaaaaattagccaggcatggtggcgggcccctgtaatcccagctactcaggaggccgaggcagaattgcttgaacccgggaggcagaagttgcagtgagccgagattgcaccactgcactctagcctgggcgacagagtgagactctatctcaaaaaaagaaaaaaattccgtatgaattttagtttagtttttttttttctatttctgcaaaaaatgccatcaggattttggtaggaattgcattgaatcaatagattgctttggttagtgtggacatcttagccatattaagtcttcccatccatgaacgagaaatgtctttccatttattcgtgtcctctttaatttctttctttctttttttagagacagagtctcgctctgtcgcccagactggagtgaagtggtgcaatttcggctcaccacaatctccacctcccaagttcaagcgattctcctgtctcagcctcccgagtagctggtattacaggcatatgccaccacgcctgtctaatttttgtatttttagtagagacaggtttcaccatgttggccaggctggtctcaaactcctgacttcaggtgatccgcccgccttggcctcccaaagtgcagggattacatgcatgagccactgcacctggccctctttaatttcttwcagcaatgtttttctagtttccattgtagtcttttgcctccttggttaggtttaatcctaagtatttcattcttcttgatgctattgtaaatagaattattttgttcatttccttttttaagattgttcattattagtgtatagaaatgcawctgattttggggtgttgattttgtatcctgcaactttgccaaatttgtttattagttgtttttttcccccacagaaccatcaagtccaatgtttattagttttaacagctttttttatggactcttayagggttttctatatataaagttatttygtcagttaaaagagatatttttacttcttcctttccaatttctgtgccatgtatttctttttcttgcttaattgctctagctaggagttccaggaccatgctgaatagaagtgttgaaaccaagcatcttttccttgttcccaatcacaggggaacacctttcagtttttcaccattgattatgatctcagctgtgcacaaccccattattaaactttcctggaacagcttcgtttgggtgtgtcatctgtttcctgcaggcccctgaatgagatgcctgtaaaaggtgtaaataagccagatcccaggacaggttgtataaatgcttactccagagtgtgcagaagtaattttcatgaccagttctgggcttgatgctgcccatgagtttgtgccakttgtgctgatcagaataaatttgttcagaacaactttatttttccagatggtcagaattttaagcagtagataagactggtcttgcattgttagcctcttatataaatgtatacattttctttcagaaagattttttggtttttagcactttggtgcttaattgttcacagtgcttaggcaacatcaaatgaagaagttaatactgtgaggcaacaactctttctttcttcctttcttcctttctttcttcctttcttcctttctttctttcctttctttctttccaggatctcactctgtcacccaggatggagtgccagggtatgatcttggctcactgcagcctctgcctcccaggttcaagcgattctcccacctcagtctcccaagtagctgggaccacatgcacataccgccatgctcagctaattttttgtatttttagtagagatgggatttcacaatgttgcccaagctgggcaacaactgtttctatacacctctagggatgccctgaccctggagtgtgagattgagatggtcctagattcttgcttttttccctcctcatgtttaatttcatgagcttgggaaattttgtaatctccaaagagcctgagtatcatagcacccaccttgaagtattgtatgaggattaaatggtgtagtatatattgaagagcttagtttgctactgtgcccaacaaataatagatactctgtaaacagtagttagtattaaaaagttttgttaaatttaggaagtatattckggttctgtgaatgaaaaaaataatttttaaagtagtttcttgccggtgcattgttgctgcttgcstgtgttctgtgcttgggagtctttgaagtcttgctttctggcccattattataataaatctgccagtttgatgatrgcttagtggcagggcgagtccccagccaagtgtaattcaagagcaggcattccagggggtggggattggggccccggaggtagagggtggaggtgtaaagctgacttgggcacacaactggccatgtgcttttgtcctctggcttgttggcctgtacttgaaatcttgctttctgttcactgaccttgaagaaaggaaacttattaaaataggctgtaaaactaggaggagarrgagaagagggccaggtctcaggaagctgccctgaggggagtggtgaggtggactctgttgctcgcccaaactgttcattagggaaaaagaggaaaaagtgaaaatatgttgcaaaatgaagggtgacgcattctcatgaagtaaatcccagcagctcttaacattttattacataattaattacattatcattttgaaatgtaagataattaaagagaaaacaaattcagtcacctgaagtcctctacctgtagatgatagataatatttcatgtattgccttgtggattttttcatatgcatctatatatgtaagttgaaaacggagtgattttatactgtgttaacctgttccccccccaccctttttgagacaaagtttcactctgtcacccaggctggatgacagtgcagtggcaccatctcagctcactgcaaccttcacctcccaggttcaagcaatgcttgtacctcaggctcccaagtagctggsactacaggtgcacaccaccacgcctggctaattttgtatttttagtagagatggggtttcaccatgttggccaggctggtctygaactcctaatctcaagtgatccaccgtccttggcctcccaaagtgctgagattacaggcatgagccaccacgcctggcattgtaacctgccctttactcttattgtatatatccctccgmgtcagtgagtaaaaatctgttataaaatgccatagagcattttattttatgtcttctgaaaccctgtgggtctctatcagtatataaggtacttgtaggcaaagtccatgccttgtactttatatcccccaaagcacctggcacagtcccctaataggcaaacccctgttgattgctaaatttgacaytgaagaagataaaggtgtgagtcacagccatgatttccttatttatcttttgatctaaggctgttgcctatcagcctttaaaacacgtatattagtgatcctaagactacatcatactttctattacctgtgataattatagcaatattggcataacacttaggktttcagagcatttttcacgttgttacacagatcctggggaggctgttattatttcttgcattttgcagtggaggaaactgaggttaagagagtttaagtatgttttatgctgttaycatgctgcctctgtgtttaacttagctggatgacttttaaaaaaaatcaagtgtgtgtgtgtgtgtgtgtgtgtgtgtgtgtgtgttaactttggccattagtacctatgatgttgcttttaggtaccaatcatatagaaaatgaaatgaagttttttttttttttttgacacagagtcttgctctgtcacctaggctggagtgcagtggcgttatctcggctcactgcaatctccacctcccaggttcaagcaattctcctgcctcagcctccygagttgctgggactacaggcatgtgccaccacgcctggctaattttttgtatttttagtagagatggggtttcaccgtgttggccaggctggtttcaaactgctgacctcaggtgatccactctcctcgacctcccaaagtgttgggattacaggcgtgagccactgcacctggctgtaaagtcttttttattttattttattttattttttgagactctgtcgcccaggctggagtgcagtggtgcaatcatagctcactgcagcctcaaactcttgggctcaagcgatcctcctacctcagcttccaaagtagctgggactataggcatgcaccaccacacctggctaattatatgtatttatttatttagtagagrsgggggggcctcactttgttgccccggctggtctcgaactcctaacttcaasttaactcctcttgccttggccttccaaagccctggcmtgaccacagccaactctttcttttttgtgtgtgtgaaagaataggtaactattttgcaaaatcagtttaacacatttttktttttytggagagagttatgctgattcttattgaactagatttgctggcaatattcaaggtagtctaaaatttccaaccctacaagtactgtccagtggagatgttcctgtatcagtaactcctaggcagggtttttgctttgctrtggccccattacatctgtgggcacatttttacaggttggtttttactgaggaagggactatttatacttttctttctctttccctaccctttgggccttcagctatgacagagactccactttcaaygtgtttgtgggaaaaggacagctgatcacagggatggaccaggctcttgttgggatgtgcgtaaacgagagacrtttcgtgaagattcccccaaagcttgcctacggaartgaaggagtttgtaagcttttcttcctcgtttataaacacrtcagcagaaacaatgagaacacttttaggatgttaagtcaaacagactggagaatcttggaagctttagattgggggaaaatgaaaagcagtgaactcatacacagctaaaatttccatcttaggtttatttcttctagatgtgaaagaaastgtcattaacacagatgtaytgaatgataccctcaatgagaagaaractgttttttctcttttctttcaatttcatttggaggaaagagggaggaagaatgggtcattttgggattgtatagcrgtgactgcttgaacccttttggcccacattcaccttgggagcatcctaggtgtttatttatctggcctgaaaggcagcaactgtgaactcagtgtgwaatctttaatttctagctggtgtgatcccccccaattcagtgcttcattttgatgtacttctgatggatatttggaattctgaagaccgggttcagattcacacctatttcaagccsctgagttgccctcagaccatccaggtgtctgattttgtgaggtaccactacaacgggacgttcctggacggaactctgtttgattcgaggtaagtcctgtcgttcatggcagtatcagtgaaatgtcccatgcatagttctttccttctgtcttacttgctttttatgctgatggggataccagaataaggactcttctcaactgtaatcagtactgaactcatctacttaagacttttggtcagtgttgcatcttctctggtgccagagtcaaaattttaatacatcttagaaacattgaagagcagtgtttatctaacttaacagtattttgagatctcatcattaagtgaaaggttctatttcttttcttttttttttttgagatggattctcgccctgtcacccaggctggagtacagtggcacgatcttggctcactgcaacctctgcctcctgggttcaagcgattctcctgcctcagcctcccaagtagctgggactacaggtgcatgccaccacgctaagctaattttttgtatttttagtagagacggcgtttcagcgtattagccagggtgttctcgatctcctgacctcatgatctgcctgccttggcctcccaaagtgctgggattacaggcgtgagccactgcacccggccgtgtaagtctctatttctaaggaggcttatgcacgttttggttcatttttgtagttttcccatggaagcaagagggaaaagatgaatgtatgtgaagctatggagaggcatggggctacacgggagatcagggaacccttcgcaatttcttctcattagagtgtgtttgattagtggaatagctgacctgtttttgtctatcactagtataaatgcatgctttttatttctttctaaacttgaggacatctgccctgtgtttgggggcaaagatccataaatgtctatctctaggatgggtatgggatcatcgtttagctgatatttgggtaagaaaaaccgtayagagagatgagttggaaatatcctcatggtgtggaactttttccctttctcattacctttcagtcacaatcgcatgaaaacatatgacacgtatgtgggaattggctggctgattcctggaatggataaagggctgctggggatgtgtgtgggtgagaagcgcatcatcaccattcctccttttctggcctatggagaggatggagatggtaagtccktctccttcttggagccactctytcctacccttatttttattgcagtggttaattcaattgtcaccacatgaaactcactagaccttttggtctagacctacgctggccaatatggtaaccactagctacatgtggctatttatattgaaatggaaacaagttaaaattagctaaaatttaaaattcagttccttggtcacactgctacattttaggtacccaatagcctcacgttgctgaggaccaccatagtggacagtgcagatacagacccagatcatttccatcactcagaaagttctatttgacagtgctagtctggattgtctgctgtstgatgattgagttgcagaaatttccacttacttatagtcattggcattcataagtaaccccctctgcccctgttgtacctgccatggccttggccaccaacctctctggctttaacatttgtgaaatgagacttgaattagacactataaaagttgcagatatscaggtagaaatttagccatacartgtcagaattgccagatttccccgtttgcacctctayratgagttttacctatggcattaactccatatggacaaaagcaaagtgtaatgttagaaaacacattaattrcaactagtgtcctgtttgtagttttactgtgaaggaaaacacataatatggactgataaatggaatgtctcaggtactcatgtttgaatttcaggtgcgtttagycatattgacatgctggcacaacatagagacctgtaggcatttaaacagcagatggatacagtgatgtgttgattcataatggggatatgttctgcgaaaggcatcattaggcaattgcattgttgtgcaaatgccatagagtgcacttacacaatcctaggtgctacagcctgctgcacacttaggctgtgtggtrtaacctgtttcctctaggctacaaacctgcacagcatctgtactgaatcctgtgagctactgtaacacaatggtaagaatttgtgtatctaaacatagaaaagttacagtaaagacatgatatgataatctcatgggaccactctcatatatgtggtctgttgttgaccaaaacttcattgtgcagcacatgactttgtagttaaggatataaatgagaacatgatgcttcttaagaagtttactgatagtgatagccaacttacaatagccaatatgttttcacgttttttcctggctctgtggagcggagcaggaggagaagggagcctgaggtgatggggctcggccttctctcctttctacctccatatatatatactcatatatatatatatacatatatacatatatatatacatatatacatatatatacacatatatatatacatatatatacacatatatatacatatatacatatatatacacatatatatactcatatatatatactcatatatatatacactcatatatatatactcatatatatatactcatatgtatatgtactcatatatatatatacgctcatatatatatatatacactcatatatatatatactcatatatatatacactttttttttttgagacagagtctcactctgttgcccaggctggagtgcagtggtgcgatctcggctcactgcagcctctacctcctgggttcaagagattcttctgcctcagcctcctgggtagcttggactacaggcgtatgccaccatgcctggcaaatttttgtatttttagtatagacagcatttcgccatgttggccagacttgtctcaaactgctgaggtcaagccatccatccacctcggcctcccaaagtgctgggattacaggtgtgaaccactgtgcctggcccacttttatatattttacatgctggggatctgcagatggtttcttaaacagagtattaggggtggaattccctactaaaagaaaaataaagtttaaagcagtgccataaatatgtcttaattctcccccccaatgagatataagatattgttgttattatttttagagacagggtctcactctgtcacccagactggagtgacaccatcatagctcactgtaacctcaaactcctgggtgatcctcctgcctcagcctcccgaatagttaggactacaggcatgtgccaccatgcttggctagttaaaaaagtttttttagagacagtgtctcgctacgttacccaggcttaccttgaaatcctggactcaagcgatcctcccacctcagcctcccaaagcgctgggattacgggtgggagccactgtgcctggcagttactgttttcttattgatgttcaaatggtcttgtccttggccccaaaaagttcattcacattggctcccagatccttttgtcatcagccacataacaaaaccagatgtgagcctaatatgagaaatattatttatttactttaaataaataatagcttatttagagtagttattttttaatactttatacttgaatactatgctcggctatccaagtgtaactgtatggtatgtgaattatatctctgcaaagttgctatagaaaacattattcatttagtacacattaatgctagaaaaattgaaaccccaggccgggcgcagtggctcccgcctgtaatcccagcactttgggaggctgatttgggtggatcgcctgaggtcgggagttcaagaccagcctggccagcatggggaaaccccgtctctactaaaaatacaaaatttagccaggcgtggtggcaggtgcctgtaatcccagctactcgggaagctgaggcaggagaatcgcttgaacccrggaggcgaaggttgcagtgagccaagattgwgctattacactccagcctgggcaacagagcgagactccatctcaaaaaaaaaaaaagaaaagaaaaatttaaaccccatggttacttttaagrctttcatttttctcttaaatgaaaagatacagtaaggcacaaaagattaatattctatctcccacgcatgcgatttagggattgaccacacctcgctttccaggggctgactcagcagccggctttcagcagatttcatcattccttggaggggaaggagatgcagggtgggctttgccaaaggccactggaaggagctcaggcttggcggcatctggtttgcttgtctgggcctgctcctttgcatgrtataacaaayggcargtaaaactgagggattggtttgttggttaactttctactatcccaaattactggattttgagttatttattggttgatgttgatctttgcaggaagaactagtgtcctgtaatctcttcatgtggatttcattttgcagatattcaaaataytcccactggcaggaacatccaagagaagcagtactacccagaagtgagatagaagtgatttgaggactatttatttatattttggattgtgggtgccatttttttctctgttattctgctttcatcttatttatatcttgctttggatatacttaaagcattgagttttactttttgcctctaaaaaattggccgttcgtttcaaagaacaagtctgtgtacagttctccagaaccagaccagagatttggaattttctcctttaaatgtctgtggtttgcatttattcacaaacagaaacccacagaggtaygtatttgggtttgcctgtgggtgcctgcccwcctacataragccttgatyttccagcatgagtccagaaaatatggtcatggtagtctcttatgtcattaataccaattttctccttttgctgagtcaggttttagattataccatcagcccatggttggacaccatgggggcccattcaagacctggaagaacatttgtttccttggcttcaaaacctcaagaaatgaataacaccaaccccaagcctgttgagttgtaaagtacttcctaaatcctgtgtcccgtttaatcatcttctcccattccattctagggaaagacattcccggtcaggcatctctggtgtttgatgttgcattattggacctccataaccccaaggacagcatttccattgagaacaaggyagtacctgaaaactgtgagcggwtaagtcaaagtggggactttctcaggtatcattacaatggcacrcttctggatggcaccctctttgattccaggtaaggaaatgattaaagtcttcaactgccagaacattgtattaaataaagtctgccattggctggaccatgatttaaatactctgtccatgctgatttatagttggcattttcatctctaatacaggtttctgttttctgatacttagttctttcctccttccttccttccttccttccttccttcttctttctttttttttgagacagggtctcgttctgttatccagtctggagtgcagtgcagctgcatgatcgtggctttctgcagccttgaactcctgggctcaagcaattctctcatctcagcctccttagtagctaggacgataggcgtgtgccaccatgcttggctaatgttttattttttatagagatgggcttaagtttcttcataggctcttgtaaccatttctttcttgggggctgttttagatggttctgcaggaagacaggagagactcaccctcgactcccaccatccccctatactgtgcttagytatccagttataaacctcattatggggcccaagatgaggagtggccagaagtgatgtcaaggaggtacagtgggcagagaatgggcttaatgccaagagagctgggctctagcccctgtctgtggtgcactagctgtatgactttggatagtgtttgactgccttggacttcatttttccctattccagcaactttgtcaagtagrtggttagattaaagagataagrtatgtgtcacagtgctttacaaatttcagaggctgatcagctggacggcactggttggatgcattcagctcccttctsgatgctgggtgccatagaggctaattactggcctcttttgttgttcaaagttttcttttgtttatcaggcatggcctgcagttgtagagatggcttgtgtttggcctgttttgctcattctagtggcatgtgttgtttgaaactactcctttagcttccagtagagcaaacaagtagtgacagcaacctccctgtctctgaggtgatagacttctagttaatgtagtcatccaaaaccattacagaagaatttgtatatggcattatttcatttgaataattcattcttgttcctwggatctcttttaaatttgtcatttaaattttttggaaaagagwaatagttacatagctcaaaaccaaaacaaagtatgcattaagatatgttgtaaattagccaggcgtgctggcgggtgcctgtaatcccagctactcaggaggctgagtcaggagaatgacttgaacccaggaggcggaggttgcagtgagctgagatcacaccactgcactccagcctgggcaacagwgcgagactctgtctcaaaaaaaaaaaaaagaaaagatatgttgtatacctgttcctgtctgcctaacctccctgtctcccctaccccttagagttaaccatctttattggtttctatttttaatttttccagtgtctggattttttttttttttgaggcagagtctcactctgtcacccaggctgcagtgcagtggcacaatcttggctcactgcaacctccacctcccaggttcaagtgattcccctgcctcagcctcccaagtagctggggttacaggcacacaccaccacgcctggctaatttttgtatttttagtagaaacggggtttcaccatattggccaggctggtctcgaactcctgacctcaggtgatccacccaacgcagcctcccaaagtgctgggattatagtcatgagccactgggcccagcctaatgtgtggattttttaaaatgcaartataagcaaacacaaatgttattttcttctccttaaattatacggatttcagaatatagtattactagggaacaaggtggtgttctccttgatttttgttactctgggatttttccatactaatacatagagagaaatcctttattttttacatctacrtggcgtcccattgggtgagtatattgtatttagataaccattcccctattgatgaatatttgagttgtttttatctttttctgttaccaaaaaaaaatcatttagtgcatatgtgtattattctttgttacattccagtgtggttctgttctttattccctggaattatatttccaattgaaagaccacttttctgtgtacaccagatttctgttcatataatggaaccacagttttcttaggtttcaagagctttccattttartacagtgggatctagcccattctaacagctgcatatatttcattgtatagatttgcctatatttaggtaatcaatccttgttgtttgtcctgtatgtttcctgtattttgacacttaaggctgcagtaattatttttgtagggaaatcttaaaatatatgattaattgtttccctgggatacatcgctagaagaatctctgggtcaaaggttatgtgtgtgtgtgtgtgtgtgtgtgtgtgtgtgtgtgtgatgtgtgtgtgttttgagacggagtttcgctcttcttgcccaggctggagtgcaatggcgtgatctcagtacactgcaacctccatctcgtgggttcaagcgattctcgtgtctcagcctcctgaatagctgggattacaggtatgagccaccactcccagctaattttgtatttttagtagagataggggttccatcatattggccaggctggtcttgaactcctgacctcaggtgatctgcccgcctcggcctcccaaagtgttgagattataggtgtgagccaccgcgccctgcctttttttttgagacagtatcttgctttgtcacccaggctggagtgcagtggtgtgacctcggctcactgcaacctccacctgctgggttcaagtgattctcctgcctcagcctcccgagtagctaggattacaggcacctgtcaccacaccaggctaatttttgtatttttgatagagacagggttttgccacgttggccaggctggtgtcaaactcctgacctcaagtcatctgcccgcctcggcctcccaaagtgctgggattacaggcatgagccactgtgcccagtggttatgtgtatttttataccttttgatacatactaccaagttgccctcaaggaaggttttactcagcatcacagtttaagagtatcccattccctacaaattcagtaacactgggtatcatttaaaaataatcttggctaatttataggagaaaacaatgatacctgtggttttaatctgaattttctattgctattgggattgaaattcctttgggtgtttatttgagtacyttcttttgtgaactacctgttcrggtcctttgcctatttttctatttagggcattggcatttgtctgtttcttgttgatttgaagagctctacacattaaaaatattaattattttatggctgcatattattaaaaacattttcctcattttcctcaatttatttgtttgttaattttggttatgttgatttttggcccatttaactgtaaacctkttatgttgttaaatacattagacttcctcattatggttcctgkctttggtgacttgttacaaagtctgtcctcttcctagagtatataaatgtttgcytgtatttccctcaagccttttaatggttttttttttctattctttaagatattctttattagaatttttattttcaaaagtaatatgttctttttttttgagacagagtctcactctgctgcccaggctggagtgcagtgatgtgattgcagcccactgcaacctccacctcccaggttcaagcaattcttctgcctcagcctccagagtagctgggactacaggtgtgcaccatcacctgtagtgatgcaaaaaaatttgcccgactaatttttttgtatttttagtagagatgaggtttcaccatgtcggcctggctggtatcaaactcccggcctcaagtgatccactcgcctgggcctctcaaagtgctgggattacaggcatgagccaccgtgccaggccagagataatatgtcctaattgcataatggaaacaatgcaaaaatgtatagcaaaaaatgtaaatttcctgtcagccccttccattctcactaccatgagataaccagtgttaacaacgttctgcagtttctctctatgctcataaatgctttcatatttaagtctttaatccatctggaatttattgtggtatcactgtgacaggaaggatttaactttatttttttccakatggttagctagtttttccaacatccgtcatgaatgactctrtcatttcctcactgcyctaaaaggtgatttttgttatgaactaaattcttatatgtacttttgagtctttgtgtagaatttttatcctttaccttctatctattcctagggcagcatcacaactttaactatgattaactagtgttagctttttaatttgtatagtagagggcattctttttcttttttaaaaaatagcttttttttctactaagtgatgcattgacatgatttaaaaccctggaagtatgaaaaggtatacaatgacaaatttccctcctatccttgtcccacctcccctcttcatagggaaccagtgttactaatttctttttctttctttctttctttttttttttttttgagacggagcctcgcttctttgcccaggctggagtgcaatggtacgatctcggctcactgcaacctctgccctccaggttcaagcgattctcctgccctcagcctcccgagtagctgggattacaggcacatgccaccaggcccggctaatttttttagtatttttagtagagatggggtttcaacatgttgggccgggctggtcacgaactcctgacctcaagtgatcacccacctcggcctcccaaagtgctgggattacaggtgtaacccactgcccctggcccagtgttattaatttcataggtgttccatacatatataatgaagtacatatatgtatatatttcctgcttaattttttacaagaatgatagcttgctgtatactgcaccttaaaaacagcattcttaattatttcttttttcaggtgaattttagcattactttactgagcaattttgattggaattgctttaaaatttgtaagttagtttgggccagctgtggtggcttaggccaggcacgatggcttacacctgtaatcccagcactttgggaggccgaggcaggtggatcacttgaagacaggagttcaagaccagcctggccaacatggtgaaaccccgtctctaccaaaaatayaaaaattagctgagtgtggtggtgcatgcctgtaatcccaactrcttgggaggctgaggcaggagaatcgcttgaacccaggagacagaggttgcagtgagccgagatcttaccattgcactccagcctcagcaacagagtgagactgtgtctcaaaaaaaagaaaagataaaagaacttataagttagtttaggggaggactgacgacttcacttttccattggggaacaggatggttttgcatttacttgtctttaacttttattcagcatttactacaattcaagcccaccccgccactccgtctctccttctgaggctcttatatcctgcctctyggcttggcccttgctgccagaccattgctcttcccttaggcagatcccacagccttcggtgtctgctatctcccctctgccatggaatctttgcaactattccagtgggcagcaatccccgctgtgggtacctgccatctctctcactacttggtgtccctttgtcgggagcccaccacrtaggtatccttctcttccctgaatgtctggcagtggctgcacattgctggtgatccccagggtcctgcaggtgggaacctcgggagggtgagccctgctctggctgaagsatgctgggagccgacacggtcctcctcttccctgctgtgttcccctccaggccttcctggccagtgcaccaggaggaggmytggagctgctcagcgtggggtgctgttctcagtgggtgggaagggggactcacagcctcgtctgggagtttatgtggacaatctcctgcttcctgggtgaggagagacatctgttgtgattctttcttcgtgccccatgactttgtggtctttgaggggtattgagaagggagaacccccacagctctgcctgtgtatcggcctggccccgctcggcrgtccttcttctccggggcatcatgccctggctttgaggtgagggaatggcaggaccgactggctctttcaggacaggctttctgcctcatcggcaccaggtggtgtggggaaggggtgcaggtcacgtggtccagtttgatagtggacttgtggcatatgaagttttattattttattctggaatcattatgctgtggggaattgattcctctttttaccaaactcatggtaatagaatcactcagtagtttacacacaggctggatctctccactgagtggacttggggctcctgccaggagcacttggaaaacccaagtattcaccagggtggcggggtgagcaggggtgatagtgggggccttttgtcgggctgtggtggagagtgcggaattcattactctcagtgtgtatgctgctttcctggcgatcggaatcttcatgtcaggctgggtgctgtggctcaggcctgtaattccacactttcggaggccagggcaggcagatcgcttgagcccaggagttcgagaccaacctgggcaacgtggtgaaaccccatctttactaaaaatacaaaaatgagccaggcatggtattgcatgctgtagccccagccacttgaggggctgaggtggaaggatcacttgagcccaggaggttgaggctgcagtgagctgagaccagaccacttcactccagcctgggagacagagcaagaccctgtctcaaaaaaaaaaaaaattaaaaagtaattagaaaataaaaacagaatattcatgtcccacatatgcagatattttctctttagatattggagacattatccttgtgacacattcgtagtttctgataagggctacgttcgattctgtcttttgttttcaagacagggtctcattctgtcacccaggctggagtgcagtgttgtgatcttggctcactgcaacctcaacctctccggcacaagcagtcctctgacttcagcctcctgagtagctgggactataggtgtgtgccaccacatccagctaagttttgtaattttgtggtgacagagttttgccatgttgcccaggctggttgagagcttgattgttttcattaacttgacatggttatagagtgtacaggctgggcacggtggctcatacctgtcaacccagcactttgggaggccaagtcaggaggatcacttgatccaggagctcaagaccaggctgagcaacatagtgggaccccatctctacaaaaaaaaaaaagtattagctaggtgtggtagcatgtgcttgtagtctcagctacttgggaggctgaggtgggaggattgcttgagcctgggaggttgaggctgcagtgagctgtctatgatggtgccactgcacaccagcctgggtgacagagtgagaccttgcctcagaaaaagaaagtatagtgttcaatttacattagctccatttctgtgtggtgcttctcataacccacactgcattcataacctgatgaaactggagggccacatggcgtgtccctacaggtggctgttcacatgctgtgtgggggttcytatttacccttccaggggagcatgtttcctggctgtgtcgtcagatactgtggtttacgctgttccggagtctggaggcctctgtgtgcctttgcatctctttcccaactaatttgcacagctgctgtggaggccctcatgaatgacctctttctttcctttcttcttttctagctactctcggaaccgcacgtttgacacgtacattgggcagggctacgtgattcctgggatggatraaggtctacttggtgtttgcattggagaaaagcgaaggattgtggtcccgcctcacctggggtatggagaggaaggaagaggtgagcatcagcatcacctgccttcctcactagctgtggctgcttccacattgcttgaaacagggcttctttttctttttcttctttctttttgagatagggtctccctctgttgaacaggctggaaagtgtagtgtgtgatcatcgtgtactatggcctggaactcttggcctcaagtgatcctcttgcctcagccttcagagtagctggcactacaggcaygcaccaccacaccctgcacagaacttcttgagagccaaaatattgaagctaaagtccagcttaagactggaattcccaaatagatttagtttctagagttgtcctgttatttctccttgtttctctgcccattttcctttaccttttgaaaatgttaaatcctacaccaaagtcaaaagcacgttatggtgaattccactttgttttgccagttgttaacattttgctatatttgatctctttttatatttatttatttattttgggctgaaccattgaaagtaagtgcaaaagcccctctttggtttttgttttatatattataaaattcacccatttaagtatacaatttagtgacttttagaacatttagtgggttatgtcaccatcactataatcctgttttagaacatttttgtcaccctcataccacacttccttttaaaagttacacaaatcatacatgttgactttagaaaaagaaaatacagttaagcaaagaaatcctgccacccagaaataaagattttttttcctttttttcttttttctttttttgagatagagtctcattctgtcacccaggctggagtacagtggcacgatcttggctcactgcaacctctgcctcctgggttcaggtgagtctcgtgccttagcctcccaagtagctgggactacaggcatgtgccaccacgcctggctaatttttttttttaattttcagtagagatggagtttcactatgttggccaggctagtctcaaactcctggcccaagtgatctgcccacyttggcttcccaaagtgctgggattatagatgtgagcgccatgccatgccagaaayaaatattgttaatcttaatctggtaggcagaatattcagcccctccaagtatctatgttctaatccccagaacctgtgagtatgttaccttactttattttgttttgagacaaagtcttgttctgttgcccaggctggagtgcagtggtaagataagctcctaactcactgcagcctccagcttctgtgttaaagtgatcctcctgcatcagcctcctgagtagctaggactacatgtgtgtgctaccatgcacggctaattcaaaagcaatttttttttttttgtaaagacagacatggtcttgctatgtttcccaggcttgtctggaactcctgagctcaagcaatcctcccaccttggccttctgaagtgctgggatgacaggtgtgagccaccatgcctagcctcctgttaccttattaaaagggactttacagatttgattaaggatcttgagataggaatagtattctagattatccaggtggcctcaaaatacttgcaacagtctttgtaaaagggaggcagggggtcagaccggggaaaaagtgctaaactgctgacttagaagatacagaaggaggaccctgtcagggaatgaaggtggccccgagaggctggaaaagatggaaacacattctccccggcagcctccaaaaggaacatatccctaacaataccttgaatttatgcttctgccttccagaattaggggaatccgtttgcgttgttttaagccaacaagtttgtggtattttgctgcagcaacagtaggaaacaaatgcagccatgaagtgaatgtccttctgtacctttgagtttatgtataggtttaaaaaaaaatgcccacctacactaatcaatacggacaaacatgggattgtctatgcgtattactttgtgatttctctcttcacctaatttgtggtgaacaacagatatgttgtgaacaactttctatgctatgtattttaatggctgctccctcgcttagcaatagttgatgcagtatttattttgtttttgtattcttttgctgatggaggctggccttgctggctgtacatttattttgttagttctgttctgtttttttgttgatacatcatatgtatcttgagagttttcccagtagtgttcatcccagaggatccaagaaacgtcaagttggttggaaggtaggttgtacaatggagaaatgtttttttctccctgacttaaatttctgattgatgaaaccacaacagatcacagcttaagatccattcgacaggcctttcttcacacatcctgcttgtctagtgtcttgatgctctattgctttttatcgtgtggatttctacttctagtcaaatataaacagaaacagataaatactttctgagtgttcttgtttctttatggcctgaggactaatctttcctttctttgaaaataatgcattgatggaaaacatttgcttaaattactttttttcctcttggctttctatcaagtatgagacagagctctgcaaagaattatataagcctctgggaagcagccgaaggctcataaattttctgggcaatgagactgcttcatcctgaatcacgttgctgtgggaggagggcaccctgagtgaccctgaggtataaaccccaagtgctcttgagtggagtctacctctgtcctctcctgatcagcacccttggcctctttgtgggggttacataggagctcatgctgatccctgaggggctgacccgagaggggtcaggatgctgaagctgtctgcttagtggcttcttcactgcataccacagggccaggcacattgtgaatgtttggcaaatatttgtggaaggaatgaattgtgggctgaccgtgtgctctcagcctctatcagcatttcattctgtcacagccattttcccctgcaagattggtggaggggaaagggtaggcctcctgggagaggttctggatctttctgccatctgctttgttccatgggtcagccctgaaattagggcacttggatgggtttgcagcctcaaagtggggaatggattctgcctgcgaggatgtgtaagcatcacttcatcgatggtttgctgttactcaacttccagattaccttttgagcacccttttaggaaagagaggaaagttaataaattacattttacccactgtgtgtctgggacttcttgcacatgaactcattcaaacctggaaacagtcttctgaggcatcattaccctcattgtttagaaatataatgaggcccagagagttccacccatgtgtccaaggccacaatagctaatccatgatggagctggaattggacccagggctctctgacccatatgtgtcctagacagacagaaagaatgagtccccattaggtagtgacttgttgatacccatatgtggagaaccgagacctcaaacyagaagtcctagagctctcagaggaaacacacccgctcagaggaaacccaccttcctcagaggaaacccactcccctcagaagaaacccaccccckcagaggaaacccaccccctcagaggaaacccacccccctcagaggaaactgactctctgcagaggaaacccaccccccgcagaggaaacccacccaccgcagaggaaacccaccaccagcagaggaaatccacccccagcaggagctgcagagtttcttgggtgggctattggccgcttttaagtttttctcatctgtatctcttctgagggaggcatcctcatggtgagaacagaatgatgacttctgcattggttaagggtttatacagagaggaggttggtgttggagccacgttggactatttctgcccgtttgctggtcagcactcatttctatacttaatctacaaatagctttgtggaagtcagagcaagatagagggatagaggttcgaagccttggtgctgcctggggtaggtggggtctatggttcaaggctctgatcttcatttttgcaggcggagaaactccatctatccatccatcaaakatttattgagtttcttcatgaccaggccctgctcacggtgttagggattcagcagaaagaaacacaaacaaaacttcctacgcacacagagagtgtttccttgttgacgccctcaataatgtgtgtgcctcagaggttatcaggcacctgggagactgactcacgttaacttcctagaagctgacatactcacctgatgctacatggttccttgactgggtgtgaatcgacctctacactggttggaattcttgtkcctggaatcctcggggcctgagaggctgagttcatttgactgctgacatcagatyccagggatgtgggtggttccagatgcattccyttttgccctggagaaggccctgcacctgaatgcatcttggaggggagattatatttgaattgayaaaatttggtgactgcttagctcagtgttagaagtttttaaaatttgtggtaaaatatacttaacatctttaccttgttaaccattttaagtgtacagtttagtggcatcaaatatattcacaatgttgtataaccattactatcatctacactcagaactctttcatcatccccaacataaacccattacacaataactcccgattcctccctcctatcaacctctgrcaaccacctttctttctgtctctaccaayttgcctattctaagtgcctcacttgagtggaatcatacaatatttctctttctgtgtctgtcttattttacttagcataatgttttcaaggtctatttgtattttagcatttatcaaaatttcaagctgggcgcggtggctcacgcctgtaatcccagcactttgggaggctgaagcaggcggataacctgaggtcaggagttcaagatcagcctggccaacatggtgaaaccctgtctctactaaaaacacaaaaattagccaggtgtggtggtacgcgtctgtaatctcagctgaggcagggaaatcgcttgaacccgggggacggaggttgcrgtgagctgagaacatgccaatgcactccagcctggatgacagagcaagactccatctcaaaaaaaaaaaaattaattcctcatttctggctaataaatttcattcctttttattgctgaatgaatattccattggatgtatatactacattttgttgatcagttcgtctggtgatgaacacttaggctgtttctactttttgtctgttgtgaataatgcttaatgcttctgtgaatatgagtgtacaaatatctgttcgcatctccagcttcaattcttttgtatatatacccaagaaagatatttttatttaatgttttcttgaaatataattcacatactataaaaataatcatgttaaagtttacaatttagttgtttttagtatattaaccaggtaacataaccattacctctacctaattccagcacagtttcatcactccaaaaagtaacccataactatcagcggtcactctccgtaccctgtcctcatccatccactgcccccacgctggcaacaggtagtctatttcttgtctgtatggatttgcttatgcyggakgtttccatatccctggaatcctacagtatgtggccttttgtgtctggcttctttcacttagcataatgttttcgggttcattcccaggtgatttttaacaggttaccaaggttgagraaccatagatctgcctctgcagacacccaccctgtccatgtgtgttagcttcccacacagagccatccgtggcctggctttgagcagccttctggccaatggcaggctgtacttcctggttcctgtgggaaggagcctgcaccccactccacccacaccagcagcccctgttttgagtgagtagcaggcacctgtgttctgctattaaagcacacgcttctcaaattattacctttaactttggccagccccaaaatttgtacctccattttctcaggattttaatgagaattaaacaatacatgtttaatttagaagaatgcctggtactcaataaacgcctattaaatatgagcgtgagtgtgtttctattagagataggagagagaccaatcaagaagcagacacagaaaagtacgtgtkgggacaggaggtaaggagggactgttggagtttgtgtatctctatctgaattttgtcattagctgtgttattctcttgaataagtaatatcrtgtctgaatttttcwtttctttctttctttcttttttgaggacggagtctcactctgttgcccaggctagagtacagtggtgcaatcctaactcactgtagccttgacctcctggcctcaagcaatcctcctgcctcaacctcccgagtatctgggactacaagtgctcaccaccacgcccagctaatttttttgtagagacatttggctgtgttgcctaggctggtctcaaacccctggcctcaagtgatcctsccacctyrgcctcccagagttgagattataggcatgagccaccaccatacctaacctgagttggtttttttatrtgtaaaatgctgatgataataaaatatgtccttgactctaggtaacatgattttaaaatattttacatttaaacttctctgaaatgatttgggctgggggatgtattacaactgatgcatatgtttaagtgtcccccacgcccctgggaagctgtcgttaaattcctggggttatggccaygcctaccccataaggttgctgcagggatttaaagggaaaatgtaggtgaaaaatactttggcaaactgtaaaacattattcagatgtgagctactgtcttcaaaaktggaaattatggaaaagttaataaataatttagtatagaacaaataggatgtattctaaaagcaccttgtgactgttaggtgtatgatcataaggggccaattttgggggagagatgtctttttctttacgaagtttatgttatgtttttcttgagcagtggtaggacattggagtgatttcactctacggctgattttctcaccccacctcttacttccagtgggyraggggcaagtattaatttggctgggtttgagtttcctcatctgtgatcaacttagccactcatctttcaggctcaacgattccatggggcaatagtccatagtcttgaattttagtccaaactgtgctcattacaggctgtgagacccasggcaaatctgtgcctccrtttatccacctgtaaaatgaggatgaggttacatctaacagccctttcagcgtcagtcttggagtcctcctagggttctgtatctgggtgcccgttttcctcacttggagggccttgaggacatacctggtgayactggggaggcccatgtgctgcagcctgcaggggtcattcattaattccccgtgtctgtcctttagggaatatccccggctcggctgtgctggtgtttgacatccatgtgatcgacttccacaacccttcggactccatcagcatcacctcccactacaaaccccctgactgctcagtgctgagtaagaagggagattacctcaaatatcactacaatgcctcacttctggatgggaccctgctggactccacgtaagggcaaccagaatggtgtgggagtgagcctggagggtgacagttgcatgctcccaccatcctcctctcttgggtagatgctggttgagagcttttatctccatgctgccccactgcatagctcgtggctgcatcactgctcaggtgcattgtgttaagagtttcctattaatggtcttgccctgctgcaggtcatttttcaccccatgaaattgtctttctgaaaagcagatctcatcgtataactgctatctttccttccttccttccttccttccttccttccttccttccttccttccttccttgctccctccctccctcccttcctcttctttcctttctttctctttctctctttctctctttttttccttccttccttcctttctttcttttttttttttttttgataaagtctcactctttttttttttttttttttttttttttgagacggagtctcgctctgtcgcccaggccggactgcggactgcagtggcgcaatcttggctcactgcaagctccgcttcccgggttcacgccattctcctgcctcagcctccctagtagctgggactacaggcacccgccaccgcgcctggctaattttttgtatttttagtagagacggggtttcaccttgttagccaggatggtctcgatctcctgacctcatgatccacccgcctcggcctcccaaagtgctgggattacaggcgtgagcctccgcgcccggccaagtctcactctttcacccaggctggagtgcagtggtgctatctcggctcactgcaacctctgccttccaggttcaagtgatcctcccgcctcagcctcccaagtagctgggattgcaggcacgcaccactatacttggctaattttgtttactttttagcagagagaaggttttgccatgttgccctggctggtctcaaactcctgggttcaggtgatcctcctgcctcagtttcccaaagtggtaggattacaggtgtgagtcactgcacctgacccaggctaatttttaaaatttttttagagatggggggggtctcactatgttgcccaggctggtctcgaactcctgacctcaaatgatcctcccctcttggcctcccaaagtgctggagttacagatttgagccgtcatgcccagccgaactgctttctttaaaaattgatgcacagaggctgggtgcggtggctcatgcctgtaatcctagcactttggcaggccaaggtgggcagatcacgaggtcaagagatcaagaccatcctggccaacttggtgaaaccccatctctactaaaaatacaaaaattagccgggcgtagtggcgggcaaatgtaatcccagctactcatgaggctgaggcaggagaatctcttgaatctgggaggtagaggttgtagtgagccgagatagcactgctgcactgcagcctgagcaacagagtgagactctgtctccaaaaagaaagaaaaagaaaagaccctatggatatactcttcagagctctccctctcggtatgggatcctgtatgctaatgcatttaatgtatttcaacaactctaaagagcgtgatggaaacatttcatgtatctctgaccaagtaaaaacgctaactgatgacatactgtcagtcataaaatgtatcctaattatagaaaggttaaactgtgaaaaaatatgcattttagaatcagtgaaatatgtgctaggcttccagggcccagatgtacagggacctggcttacaacagaccttgcaaagaaatcccaaccactgactattrgaagctagcgggaggcagggcagcagggaaggggcatggcttgtagtgcttttgtggatcaagtgagctcctaagagtgaaaatggtccatgaggttagaagggtctgtaaggtccgtggctgctgycactgctcctgctgatgttcatattcctgtccgctgatcctgaggctgaggaaaggggaagtgggtgtggggaatgaacaaaggaattccttctcrgaggctccaggatctgcttctcacgtggggcggggagagtcagtctccctgcctcctgcttgtgtttgraggactcataacatcctggcagagcactsaggagccacatgagccagagctccttatcaggaagtgcattttgtactctgagagcctctgtattacatgtaaatctgcagcagaagagtagcggctggcgtccctgctggtgtcttcctggtgtgagcttcagaatastgggctaatggaaagcttggccagcacctgcctatctggtcccagctagagccccgtgtgggctgggccccattcatcaggactaaggcagcagctgctgcctagaagggaggagaggagtgggagtgagccggrgagggtgaagcaggcaggaagctgcaggccggcggtggatggggccaggaagcatgcagggggagtgaggacygtgtwtgagagaaacactgcccaagagagaaagaaagaaaatcacaggacccgaggaaaaagaatgagtggtgtgttcagagatgacacatgacaacaaattgtttgcttggagrattttcttacgcktgcgtgtttaaactggcctcaaggaggaagaagaaacatgcgttcctggatgactgagttctggaatattctgtcataagactttgcaactggagtagccccagaraaaggcaggcagtgagagttggctccctccccaaagccatccctgagttggctttgtttggggttcctcccaggtgggaaaacacaaaccctgtcttggtttgctggtaatcagctggaggagggaaagaagtggctgccctgggtccaggggaggtcgggaagcctgagaagaggatatgacccaaaggggcacccgtccatgttgtccccagtgctcatgggcatcaaggggggtcagggggcttttctccttggagtaaagaacatcaacactgtttgcctttaggaagtgataggaatggcatagattttggcgtagatttatttttagtagtgaccgaagtgatagagcaaacttttttttaactggcttcctgaggcccatggccatcaaggataattaaactcttggtggtcttttttttttttttttagtcttagactgctacagacataaacactttacacctcaaggccaaacatttattgagccctttgtacttcccctccactgtgccaagcataacatgttatttgcgatttaaaacgtccctgtgagatagctatatttgttgtctccgtttcatagataaagtaacagagattacatttctcagggttaaattaagtggcagaaccaggaatccatctcaggtcttgctgaatccaaaagccagggttttttgtcttgtttttgtttttgagacagagtctcactctgtctcacaggctggagtgcaggggcacgatcctggctcactgcagcctccacctcctgggctcaagcaaaaaggaccccattccactatgcttctccactctggaacttccacagtcttgcctggattttcatggccttgacagttttgaagatgacagccagacatttttcagcatgtgccccaatttgtttttgtctgatgtttcctcatgattagatagggatttgcatttctttggtagaaataycctagragtgatgtgttcttctcatrggaacactctcagtgccartgggttggtgacctaacatgaggctcttctgtttcattttaggtggaatttaggcaaaacttacartattgttctgggatctgggcaagttgtgttggggatggacatgggtctcagagagatgtgcgttggcgagaaacggacagtgatcattccgcctcacctgggctatggggaagctggcgtgggtgagtaagcaacgctattcaagggtgttgggggcccgcttactatctgaattttgtgctttttggggtgccatagttagaatcacagcatgcttcttacatgtaatacccaaagagtgtgtggtttctatttttwaaaaattatttagtatttttgtttggagacscctgtgaattcagtgagccacgtcaatgctccattaccctcttgagaaagaaccagtttgagtgaaataaatcttggatcttcagacccatgtgtgggaggtgtccccaggggagctgtccgggaggtttctctggggtcagactgagcacgtccttctggaactgtttcctgggacaggtggaatgctgtaggccgttgcttttcacttctgagcctgtaggctgtccaagacagtttcctttgggagagattagttgcaagttcttgaaatactggctttacctcatcctcacagtggttatgttttactccatcatttcagccacaatgtgtcctccacrtggggattcaataactttttttttttcagmgacagggtctcactctgtcacccaggctggagtgcagtggcaccatcatggctaactgcagccttgaactcctgggctcaagcaatctkcccacctcagtctcccgagtagctgggactacaggcatgcaccacctcgcctggctaattttttattttttagagacagagtctcgctatctttcccatgctggtcttaactcctgggctcaagcgatgctcctgcttaggcctcccaaagcactgggrttatcagtgtgagccactgygcctggccccaggaaccscttcttttcagtgttttcacactgctgatatctggacatggaggagmtaggaagagctaactggtaacaatgataggcactgtggattgatattttttccccrtaaaagaattgtaaagtacattgttcttcctaccaatcccagaagaaacgctttaaaaattgttgtatattctggccgggtgcggtggctcatgcctgtaatcccagcactttgggatgccgaggtgggcagatcacgaggtcaggagatggagaccatcctggttaacagggtgaaaccccgtctctacaaaaaattagctgggcatggtggcgggcacctataatcccagctacttgggaggctgaggcaggagaatcgtgtgaacccaggaggtggagcttgcagtgagccgagatcgtgccactgtactgcagcctggcgacagggcaagactccatctcagaaaaaaaaaaattgttgtatattctttaagactttttctgtgatatattattaataattataatacatagcatattatatataacatataatctagataaaatataataatttggaataatacacattacctttatatattccatacttagataacttctttggacctatactgtatacactattcttgaatttgtgcttacagtcaaatcttggatcatcatcttcaggcatattgttcagattctaaaagttctgctgttagatttacttaaaagttttaccattgtattgtagtctctacaagcagctttcaaacttttttccacaagacacacagtaagaaatacattttatttcccaatctgtattccacataaacatacaagttacacatatacacatttatttatttctttttaatcaacacatcacaaatttgcttgtcctgtttgcacggaggtcatgctattcttctcagtatggttccaattttagtatgtgttgctaaagtgagcattacttttagttttatatataaaatttaaactcaagtttcatgacacaatacctatcttttctagaggtacaaagtattctgttccttttttttttttgagatggagtctcactcggtcacccaggctgaagtgcaatggcgcgatctcggctcactgcaatgtttgcctccctggttcaagcaattctcatgcctcagcttcccgagtagctgggactacaggtgcccaccaccacaccagctaatttttgtattttttgtagagatggagtttcaccatgttggccaggctggtcttgaactcctaatctcaagtgatccgcccgagtcggcctcccaaagtgctggaattataggcgtgagccaccatgcctggcctctattctattccttaatttaaaaaataactaaacgctggtcaccaccctctaaactgatttcgtgagtcattaacgggccactgcctacagtgagaargtgactagcctctgctccgctttcttgctttggtcagaagtcccacyctgagtgaggctgctggaggtyggggtgggtgctggttgttgggcttgactgctgcctgccggctgacaccgcctcccgctcctgtcacctggacagatggagaagtgcccggcagtgccgtattagtgtttgacattgagctgctggagctggtggctggccttccygaggggtacatgttcatatggaatggtgaggtgtcacccaacctytttgaagaaattgacaaggatggcaacggagaagtcctcctggaagaggtaactaactggcctctgtaggaaggtgggaccgaagagctcagggagcctggtaaggccgtggggccggttctgaaggtaaggacttctaagggtgaggccagctggctggagggcttgtgagatgaccagcacacttgtgtgccaagcgcttttacacacaccctctcgatggaagctyaccattcctctctgaagaaacygattccctaagaggtgtagggcatgattccagggcatacagtctgcatttagttctcgttactgggtgctcaatgmctgcctgtatgtgctgagtgtattctctgatttggccctcacagcagctgttttttagaagaaactgcacagagaaggtaaatgacttgtccaaggtcacacakctactcagttgtttgagccaggaccacactcctctttgtgaagctgggcaatagaaccrtctgttctgtcccacccctggggaattccagctccctgcctcttccacatctgctattgaagcrcatcctccagccttttcctctctctctccacatcatcagcmcttctggatctttctcatttgcatacaaatgtgctattattttcccttccctggatgtgtctgtttctttcattgctttccttcctttacagcaaaaacttcaaaagaattgtgtgtcctttctgcctccaattcctctcctcccattctctcctaaacccactcctttctggcatttgtccctctatgcctctgagcctgaccttgccagggtggccaatgtcttccgtatcgcggaatccagtggtcagctctyacgctcctcttaacttcaacacagctgattcccctacaggaygcatctttctctggcttccaggacaccacacttcatggtgttccttctacctccctggtacgtccctctcaggcctcttgtccctgatcgcttcatgttggagtaccccgggctaagtcttgacctytgttcttttctctgtctttaagtcactcgctcmgtggtcttatcgggtccatatcctgatggcgtctggatttgtagctccagtccagtcttctctctccacttcacactcatgtgttcagctgcctgcttgatgtcctcatttayggaacccctgctatccacccgcacaccccgcttggggcctgctttacccaaagcctttcccgtcgcagtcagtggcatcactggcctccagtggctcaggcgagagcactcggtgatctctsactcctctttctctcgtaggccgtaatggtcctcaggaaatcattccagctctaccttgagagcacacrcagaacctgacrcttcttaccacccccaccctgtagcatcttagcccggggcctgtcatcyctttcccgggtcacatcacagcagtggtgttcatgaagctcctcctgcsctcacagtggcygttctcacacagaagctgggtcagaccygcagaggcccctgtctacagggcctcacagtggcctgtgaagaccctgcactttctgctcgctgtaacctctttgccggctgtctccctctgcccactttacccggccacaccwrccyccagtgctgtctgtgaccacccaggcatgcgtccaccttgagccctggcaccggctgccmtctctgctcaggagacatctaccccagataacttgttcggycctttccttctcatctttcaagmctttgcacaaatcttcccttctccttaaagttttatcctgaccactgaattcaacacttcatccctttctcccttccttactgagctccgctttttgatttttttctggagcatttcactttgtaacttaatgtgtaatttacctattyttatgttcatgtctaattgtctgtttccactagaatgcaagcatcacaggggcagggtgtttgtttgtttgtgtattgatatatttcaagatctagaacagtgtgctcagcacatagtagaccatatgttttgatcatatgaatgaatgcatgcatccaagaatgttcttacagtcttgggtggtcatgggggtcagcctttggtggggaaccgagttgggagaagggatagctctgacggctgctgggtattggctacctgagtaataagggctctgggagtcatttagtacaagggtttttcacctgcatttagagaaaaaaacaaaacaaaacacagatcataggtcatatagctgccaaaaagatcttgtctgtgttggtagcccagactcaagttccagccctgtcacccccagactgctctgtttctggccccaggcctggcgttcatggcrgctgaactcatggtctttcctgtccccttcttttccagttctcagagtacattcacgcccaggtggcatctggcaaagggaaactcgctcctggctttgatgctgagctgattgtgaagaatatgttcaccaaccaggaccggaatggagatgggaaggtcacagccgaggaatttaaactcaaagaccaggaagccaaacaggatgaactctaaacctggcacgaaccagatggtgccagggagtacgtgacaccaagccamctgtgtggcaagacgtgcagtgagggtgcaagggtctytcagaagttgcatcattagccagtagtaggtgggtcacatagtacctggtgtacacatcggggtgggttgatatatggggtgagaagtttrggctgatcgccagtgatagtaaacaaaatctgtgcagagggccttagcatgggatgtgtccagtattgaaaaggctgcactgccaaccatgatttgtgarccttctgggaaattttgttattaaargaatatatagtgtcagacrgaagttataatcatcttggaggaaccataagaaaargtgtccagggtatctatataaagagggttaaatttttttttaacttgctggttaaaacattttagaaatattctwgagatgggcaggagagtcaaagggcttgcttgccccagcagagttcccagcagacagccatggctcttcccagcagcctgtgcaaattctgatgatggccccacccccgcacacgcacacgcacatcatgcttttccagctcatcacaccccgccccactatgggcctaccattaatagtgtataacttggaggttaaaagagccttttggacagaaaactgggccaggaaaaggcatctcagaccacaaatagagaatttgattcctcatttgccacataagtcatctgcttagcttttcctttcctttttttttttttttttttttctggaggcagagtctccctttgtcgccaggctggagtgcagtggtgccatctcggctcactgcagcactgtctcggctcactgcagcctccgcctcccgtattcaagcgattctcctgtctcagcctcctgagtagctgggactacaggtgtgcaccaccacgcccggctaatttttgtatttttggtagagacggggtttcactgtgttggccaggatggtctcaatctcgacctcgtgatccgcccacctcggcctcccaaagtgttgggattacaggcatgaatcaccatgscyagccacttagttttttgtcattyccacctttctatcccatagaacactcttttttatcttccctgaaycatattgatgagataaatagggctgggggctgggccccgctggtcactcaacagagtatttcccttggccgagatggaagttttgtcccaatagatgagctgctgagyatcaacaaggtgacatttttctgctgcccatttgtgtcctggagacggtggtaccctgaaggcagaggccagctgcygcaagacagcaatgacagtccacctgccgrcctgattcctgcatcatggaataaccacatggctaccttctatcctctgttcccaaatggtggtggcacttatcctgaagtcrtcaatgatttccctttgaaactactttattttactaatttaaactattttgtactgatgtagccctgaggtagttcatgaaaatgctgtgcactcattccatggaataaatgttggaaagctgatcttttctgatataaaatgttgaatkatattatctggttttctgatrttttattggaaggctgaagacctatgagaatgcaccatgcagtcagaatccccttgatgaaaacagcaggacttcactgcatttactgagggagcgcactctacttatagggagtgtcagtcagggtcctggccctcctctgggactcctgaagagaagctaaggaaaggactgtttagaggggtgtgggcgaggctgggggaactgaggctgttgagtgccagtgacagcagtgttggccaccgcaggaggctgctaccaccagggcctgagagctcaagaggaggcagtgggagcagcacaggaagggctacctggaggcgtaacagagggatgcagccagctgcatctgacagtgcggctgacactgcagcagagcgagggacaaacgccccatcccctctgtgcccccattctctgatgcctgccactggctcccattagtggaaccatgttggaagccagagggtaagaggagctcagagactggagttctcagaagtcagcctcttgagtgcagagaaaggtggagaatgaatctgaggtagggatggggtgggtgggagcaaatggagaattactggcacatgtatagagaaactgtgtgtgtgtgtggtgcaattatatatttaaaagcaattattttaatatatattaataaacataaaatatatgtattatatatacataaagttgctgttaaaaagcaaatgttggccatgtgcagtggctcatgtctgtaatcccagcagtttgggaggctgagatgggtggatcatttgaggttcaggagttcaagaccagcctggccaacatggtgaaaactcttctatactaaaaatacaaaaaaaaaattagccgggcatggtgatgggcgcctgtaatcccagctgctcaggaggctgaggcaggaaaattgcttgaacccaggaggcggaggctgcagtaagctgagatggcaccactgcactccagcctgggagacagagcaagactatgtctcaaaaaaaaaaattttttttttttttgcttcttgctaagttgaattgggctttggaatgcatttgacttcattagccttacccgccttatgaaaagaaaaaccttgtgcttatcctctaccgcagatttttatttgcctatttgaatttcttcactggctgttttctgtgatggtggagacagacgggctgaatcagaaataagtttcttggccaggggcagtggttcatgcctgtgatcccagcattctgggaggccaggaatttgagatcagcctgggtaatatagcaagaccccatctctaaaaaaattttaaaaattagctgggcatggtggcatgtgcctgtagtcgcagctacttgggaggctgaggaggcaggattgcttgagcccgggaaattaaggctgcagtgatttgtgattgcaccgctgccctccagcctgcacaacagagcgaaaccctgactctaaagaaaaaaaggacatggaccttagaacttcaggaatggagagaagctttggcctgctgaattctgcctaggcacttccattcttcccgttgccgaggagggcattcagtgatcaggcgcgtttatctgtctgcaaggggaagctgcttagctggccccactttatgctatggctgcaacacttgcttctatttacattatggttatgggctatagttctgccaacaaggctgtaaatactaaataaggggccaagtacagggtagagatgccacacagcaatttttgtttttgttttctaaatcagttctcacctgagacagcactttttttttctttttttgagacaaggtttgtcacccaggccggagtacaattgtgcgatcacagctcactgcagccttgacctcctgggcttaagcaatcctcccatctcagcctcctgagtagctgggaccacaggcaggtgccaccaagcccagatatttttaatgttttttgccgagatgggatctcactatgttgcccagggtagtctcttgaactcttggcctcaagtgatcctcccacctctgtctcccaaagttttgggattacaggtgagtcactgtgcctggccagcctctggaccttctgacaggaacatttattgataggtactatattgtgactacctaactcaggatctatacagattttgaccctacatatgaactgggtcattgatacctactgtgggatgagagtctaatagaacatgaacatgacatctgagtatgtttgacacaactaggccgcctgcacatgtaagcagtatgcaccattttgttaaaaccagtgagttttgatctctgattatttatgactttataattttgtccaaatacttaaaagataggaaaaaaattcattctggcagggaaataggtttaactgcaagactatacataaacagtggaccctgcccccatctgttactttactatctcaggtttccagggacaaagttgctttttttgaagactttttcccttcactctctcagggatctggagtttttacttaataagaatgctgggctgggtgtagtagctcatgcctgtaatcccagcactttgggaggccaaggtgggaggatcgcttgagcccaggagtttgagacaatcctgggcaacacagcttatctctacaaaaagtttcaaaaagtagccaggcgtggtggtgcacacctgtggtctgctcgggaggctgaggtgggtcacttgagcctgggaggttgaggctgcagtaagccccaatagtgctgctgcactctagcctgggcagagggagaccccgcatctcaaaaacaaaataatattcctgattatttgttgctagatgcaaatataaaatatttatgcttattaatagtttgtgtgtggtttccatgcttaatgttggaaattctgattggtcaggcaatttcttccagcttacactggccatatttaaatctcatttaaatgcagacaacacccacatttatagttcctgctcagatttctcctttgggctctagtctgtctatttggtatcttctcttgtacgtctcacaggcatgtcaaactttgtatgtccaaaacagcatgtctgttcccactcccttgccaacaccaccaagcctattcctctccatcttccctggcacccatgtgtccaaagcagacatcagcgaccccctgctctctcatctcatctttacatatttaagccaacagcaagttttgtcaattctgtctctaagctactcctggaaatgacccacttctctccagttccacagccccagccccaaaaaccaaccattatttctagctggaactgctgtaatagcccccaaactggtgtgcttgggtttatctgccctcgctagtccctgccccacgtggcagcagtgatcctgcccctcctttgcaaggagagaaaaaccaaagttcttatgatttataaagccctccatgatctggcacccacctacttcccgttcaacgcctgatgccattcttccctttgttcataatactgttaaaccagttctcagttcttcaaatggcctaaaactttctcacttgggaccttcgcacaccctgttccctctcctaggaatgtttctacctcaactcctcacatggctaggtccttatccttcagactttggcttaaatatcacctgagaagagcttcctctgactaccatatctaaaatagatctctgttggctgggtgtggtggctcacgcctgtaatcccagcactttgggaggccgaggtgggcagatcacgaggtcagaagatcgagaccatcctggctaacaccccgtctctactaaaaatacaaaaaattagccgggcgtggtggcgggcgcctgtagtcccagctactcgggaggctgaggcaggagaatggcgtgaacccaggaggcggagcttgcagtgagccaagatcacgccattgcactccagcctgggcaacagagtgagactccatctcaaaaaaataaaaaataaataaataaataaagtaggtcatttgtgttttcttcagagcatttaccatattcataattgctactctttcctcctgtttgacccactaggaatggaagctacacgagggcaggaagcatgactgattttttttttttttttttttttttttggggcagaggggacagtttcactcttgttgcccaggctggagtgcaatggcacaatctcagctcactgcaacctccacctcccaggtgcaagcgattctcctgcctcagtctcccaagtagctgggattacaggcgcacaccaccatgcccagctaatttttgtatttttagtagagatggggtttctccatgttggtcaggctggtctcgaacccccgacctcacgtgatctgcccgcctcggcctcccaaagtgctgggattttacaggcatgagccaccgcatccagccctgatttaactactgtttccctagaactcagcacaacatagagacttgttgagtaagtgacttttcatttaatcctcatctctagttaatactcccctttacagataaaaaactaaggcttggagaagttagaaacttattgcagatgacagaatcacagattcagatccaggtctgactatttcaaagctgtgtcccttgcaccttgatcactttttatgtgttaaactggtactgaaacaccagactaagtacaaaaagcagcatgactgttgactctctgggtaactctggagaagtttcaggataagttattcaagattacattgatcttttccttgctgattctccctagggtatatcaaagagaaaactgaacctgaaggccggttaaacagaccttcggtcatctaccaaaatttgggtgactattaaatagaccatggaaggtagacttctcgtgaaatcactccagaatgagctagtattactgatggttgttttcatttttttccagttttgtcaaaattgttagctctagccctcaaaattactttatttcataaagtaaaatttaaagttgaataaaaccactggctaacgctaggctctttggagaatatggtagttaccatacactaccagtatttgctggggctgcaaaagatcattccatttcattgattcaacaaaacactgtactgggggatataacagcttatacatttgtggacggattctacctaacattgaatacttggactgttttaaatgcatacataaatttcaaatgcatacataaaagatgagcatatctacttatgaatctagaagctatatcaccatcttcacttaatagatgagcaaactgggacacaggctcaataatttgtcctggtcacactcttaatggctatactaaactggtctgaaaactgaactcaaataccaatattttaaatttcagtagcatcaggtggcagtgagatgtgataggttgataaacatatcatggaagaagcatgagactcaatttatggaattggttagaagaggccttagagagtgcatgttcttatggcattcattatatagggaggtgactgaacctgtactcttagtaaggggctgagccatgaccagaatgtagatcatgacttcagtgttctttagatttacagcatgcaatatacttactcatggaagcatattataaacacctttgggaaacagccaatataagctctgattgcaatacaggggtaaagagctatcattgaatcagattcccaactgttttttctatgtgcaaaagtcctgcaggtaattctgatactcccatgccatgctatctgctttaatgcaagaagttattttcagtttgattttagaaacacttaggcagggtctagtctgccttttgccattgcatttttgtttcattgtttatttattgagatgaggtcttgctctgtcacccaggctggagtacaggggcatgatctcagctcactgcaagcat

SEQ ID NO: 93700 - DNA, 16326 bp, Homo sapiens
  misc_feature (1)...(16326): n = A,T,C or G
ggtgaaaccccgtctccactaacagtacaagaattagctgggcatggtggtgggcacctgtagtcccagctacttgggaggctgagccagaagaatggcttgaacccgggaagcagaggttgcagtgagttcaggtcatgccactgtactccagcctgggtggcagagcgagactctgtctcaaaaaaaaaaaaaaaaaaaacctacaatgaagggagagggggcacccggggatgtttggacacaggtggggaaggagttggagggagcggcgggcccggggagggggaaggtgggaatgcgtgtgaggagacaggacacggatggtgacaatgggaggtgggggcgcctgcagcttgggagaatggggtgccttcaccaccaccaagccagctacagaggggcagagagcccaggagcgcatatcacagggagatggggtgcccaggtgcacctctgcccatcggacacacgtcctgcagcgagtctggctgcccacagccccaaggtctggggaactcgcccactaccaaccctggaggtttgaggggtgtggctgcaaggagggggatggcccccagcagtagggctgtctcctcagcgcagcccagcaacccccatgagctcagggccggtctacctgcttcctccgtccagactgggagagcttccaggggtcacggtccatgagccgcaccaactcggcttcttcctcccgggtcacaaagtcctcgatcagcatcactcctgggaaggggaaggcccagccctcaaagtcagactcctctgtgcccacggcccagccggtgtcggagcagtaaatgaaacggtatgttttctgcaaaagaaacacaagtccacaggctgggcaacacagcgagacccggtccctacgaaaagttaaaacaggccaggtgcggtggctcacgcctgtaattccagcactttgggaggccgaggtgggtggatcacctgaggtcaggagttcaagaccagcctggccaacatggtgaaaccccatctctactaaaaatacaaaaattagccaggcatggtggcaggtgcctgtaatcccagctactcaggaggctgaagctggagaattgcttaaacccagaaggcagaggttgcagtgagccaagatggcaccactgcactccagcctgggcgacagagtgagactcaaaaaaaaaaaaaaaagtttaaataaaaattagccgggtgtggcagagcgcacttgtcatttcagctactcaggaggctgaggcgggaggatcatttgagcccaggaggttgaggctacagtgagccatggtcgcgctactgcactccagcctggacaacaaagcaagaccctgtctcaaaaaaaaaaaaagaaaaaaaaaaaaaggaaagacacatcctggagccatggcagcccctggcacttgtgtgccctcaggagaccctctgatggctcattcctcccctcaggacactgtggaaggcagctggagtctagggggaggtgcaggcagagcctctgccccaggctgaccggggaaggcccgcagccctcttgagctaacacgaatttgattggtttcctttctcactttcctcccctgtaaaagagaagggtttgtacaacatgtttttccttctccattttacaaaggaggctcagcaaagttaaggaaccagcccgaggctggacagcacctcctgcactcccatctcctcagctgcttccaggaggccccaaactgcctgactaccttgaatctgtgcaccctaatctctttaggtctttgctgatgccaccccggtgtcccaggggttggcccgtgcctatcaccagcgtgagggtcacctaggaggkcagccaacttccctacagagctgagcgttcagttgagctcctcagtgtcccaacctcccttctcctcactcttgtcctcagggcacctttccagacccagcatcacccctcaatcctcataccctgggctgtcactcaactcccaccccatgtccctctctgctctgccaccaaccccgaggcctggcggtactctaagggttcccccatgctaaagaaagtctagaaaccaggccaggcgcggtggctcacacctgtaatcccaacactttgggaggccaaggtggactgatcacctggggtcaggagttcaagaccagcctggccaacatggcaaaaccccgtctctattaaaaatacaaaaactagccgggcgtcgtggtgcatgcctgtaatcccagctactcaggtggctgaggcaggagaatcccttgaacccgggaggtggagattgcagtgagccaagatcgtgctagtggacaccagnnnnnnnnnnnnnnnnnnnnnngaccagcctgggtgacacagtgagaccccatctatgaaaataataataatactttttgtctgtttgtttgtttgtttgagatggagtctcgctctgtcaccaaaactggagtgcagtggcacgatctcagctcactgcaacctctacctcctgggttcaagcgattctcctgcctcaacctcccgagtagctgggactacaggtgcgcgccaccatgcccagctaatttttttcttgtattttagtagagacgaggtttcaccatgttgaccaggatggtcttgaactcctgaccttgtgatcctcccgccttggcctcccaaagtgctgggattacaggcgtgaaccaccatgcccagccaatagtaaatttttaaaaaagagtttcgccaatgaaatagccagtatttgcatccgtggcactgaacattttacatggattatctagtttcatccccaggacagccccaagaggaaggtaccataactatcatgggcaggaggtgtggaggttctggccggagtcacccagtgaggacttcggaggccaccagaactcagccctgggctctgtggcctgtctcctcttcctctcccatctccaggctcctcacaccctgggctgccactcactgtgggccgctgtctttctctgttcttccctccagggacctcagccccttccaatgctttacttccagccaccgactccagctcagacccctcctgagattggcactatctcctcctgctcctggggccctcccacgggaaacattaaaactgggagtcccccgtgtgtcggctgagcaggctggacttgtccgaaaggccatggagcgctcttgaagggttttaaaggagtgacgaggtcaaatgtgaattttagaaagatctggaggggggaggggcagatatgaagggtggaggctggaaagccagtgaggaactgccccagtgccctgagatcctggatacctcactctccttgttccatagccatcgggttgggaagatgtcacctccacatggccactggaacgggtcagactttccgcaatttttttcttttctttttttttgtttgaggcagggtctcgctctgtcactcaggctggagtgtagtggcgctcacagctcactgcagccttgacctcctgggctcaggcaatcctcccacctcagcctcccaagtaactgggactacaagcacacaccaccacacctagctaatttttaaattttttgtagagacagggtcttgctatgttgtccaagctggtctcaaactcctagactcaggcgagcctcctgcctcagcctcccaaagggctgggattataggcatgagccaccgcacctggccccttccacaaattaaaactcttaagttcattcatattgttgtacagccgtcaccaccattcagaactttttcatcttgcaaaactgaaactctttccctattaaacaacaggtccccatctccccttcctgagcccttggcaacaacccttctactttctgtccctgtgactaccctatgtagctcacacaacaggaatcatgcagtatttgtcttctgtgactgcttccttaacttagcatcgtgtccccaaggttcgtccatgctgtaacatatgtcaaaatgtccttttttttttttttttttttgagacagggtctcactatgttgcccaagctggagtgcagtggcgtgatcacagctcactgcagccttgacctcccaggctcaagcaaccctcccacctcagcctcctgggtagctgggactacaggtacgtgtcaccatgtatggttaatttttttgtagaggtgggatttcaccatgttgcccatgctggtctcaaactcctgggctctggcaatctgcctgcctcggtctcccaaagtgctggaattacaggtgtgagccactgtgcccggcctgtccttcctttttaaggctgaatagtattctactatgtgtatgcaccacattttgtggatcaagtcatctctttttttttttttttttttttttttgagaaggagtcttgctctgtcacctgagctggagtgcagtggtgcgatcttggctcactgcaacctctgcctcctgggttcaagcgattctcctgcctcagcctcccgagtagctgggattacagatgtgcctcaccaagcccggcaagtttttgtaattttagtagaggcagggtttcgccatgttagccaggcaggtctcaaactcctgacctcaggtgatctgcccacctcagcctcccaaagtgctgggattacaggcgtgagccactgaacccggcccaggtatcttgatagatgcttggtttgcttctatctttgggctgtcatgaataatgtcgtgaatatgaacatgggtgtgcaaatatctcttccagaccctgcttttagttcctttggatatatacccagaagcaggattgcggatcatgggtaattctatgtttaattcatgaggcatgccatgctgtttccataggaccttgggcacttttaccatggacgttggggcagtcttcactggcttaccagcctccacaccttcatatctgcccgttcccttcccaggatctttctaaaattcacatttgacttcatcactcctttaaaacccttcaagagctctccagggcctttgggacaagtccagcctgctcagctgatgcaccggggagcatctgtgatcagacctcccccccccacaacctctccagcctcatctctctcacctgaggcatcaccaatccaccttcctaccccacgcagttttctgggttggaatgcccttgcaaccaaccacagtccttccatgccagcccaaaggcgctgagttctttttctttttttatttattttctttttgtgagacagagtctcgctctgtcgcccaggctgaagtgaggtggctcgatcatagctcactgcagcctccagctcctgggttgcagcgatccttgagttccttttcgttagttaactggaattcactgtctccttgcccattgcagtccacggccttcaggcaccgttggactggtattcagcaccctcgatcgaccctttccgtgtcatctccctgcaggcccgtgaagctcccagcgccagacccgagaggctacgtcgaggtttacaggcagatccccccagagtccccgaggtgacctgtaatcgaacccacccacgttccagctccttccccactcccaagcccgctccttaaagccctcatctcctcaccctgcatcacccctaccgtaagggtccctcacaggcttcgatcccggcccctatcatggccaagctggacctcagtttccccagatgcagagcgacgtttgtgggcgcggcccctctcccaccccttaccgctgggggcagctcccagggcgggtcactgccgcgctgccgctcgcagatcagacaggtccggatgcccttgcaaccgcattcccgaaggacttcgggggtctcggcggcagccgccgccatcgcgccgtccgcgtggccagtgcgcaggcgcggccgtgggggccgctgggagttgtagtccgcgccgggcgggggcacgaggcctgggttccgcttccttccggtcgttaacgcccacgggctcgcgcggcgccgcctcctgggctcagttaccgcggacgccagtgccgggctccaggagacgcagggcgacgccacacgccggggtggccgactgggtcagcgcgggctgcgcctcctcgccatgggccccctctcggcgcggctgctaatgcagcgcgggcgccccaagagcgaccggctggggaagatccggagtctggagtaagagccgggcagcgggtgaggctgtgtcctcggggccgggcggtcggggagaagagcggggaccctccccaacggcccgcttgtccccgttatcgccctctgggttcggcagagtggtccaaatgtcttcttgttgggagatcgtggccccacccgctcgccgggagccccgaggggcctcatcccctgaagggagcccggacagttaggggcacagcctgccgctatcgttagagggcctgggaagcacagacgagcccccgaaggatcaggaagagcatcctagagggggctaggatgccccccagtcctaaagtagttgcagttttttttttttttttttttttttgttaagtggtggggagtcgggagtagtggcgcgcgcttctagtcccagctactcgagaggctgaggcgggaggatccctcagcccaggagttggaggcagctgtgagctatgatcgcgcctaggcgactgagtgacaccccgtctctaaaaataaagtaacggggggatgggcggggcggctacacttgtacgagaaatgtcaggtgaaaaagccttctgaggtacccrgggcagattggtgtagggtgcaaagcctgcccgccccctaagccttctgcccccaactccagcctgtcaggattggagctgctttccgagcacctggaccccaarctcctgtgccgcctgacgcagctgcaggagcttgacctgtctaacaaccacctggagacgctgccggacaacctgggcctgtcccacctgcgtgtcctccgctgcgccaacaaccagctgggggatgttactgccttgtgccagttccccaagctcgaggaactcagcctggagggcaaccccttcctgacggtaagtgggagcctcccaccagcttcatacctggggccaggactctgttgggctcaggctcagcatctcctgagccactgctcttcaccctctcttccccaggtcaatgacaacctgaaagtctcctttctcctgcccacgctccgtaaggtcaatggcaaggatgcgtcctcaacttactctcaggtggagaacctgaatcgggagctgaccagcagggtaaggggatgagaggattattgtgtgcttaggagctgtgggggcattgggagaatgatagaattggacatcaggaggatgttgaggagggtgactgatagaggctctttgccccaacagcccctagcctgatgtgctactttatttatttattttttgagatggagtctcactccgtcgcccaggctggagtgcagtgatgcgatcttggctcattgcaacctctgcctcccaggttcaagtgattttcctgcctcagcctcccgagtaactaggattacaagcacctgccaccatgcccagctaattttttttgtatttttagtagagacagggtttcaccatgttggccaggctggcctcaaactcctggccttaggtgatctgcccgccttggcctcccaaagtgtcgggattacaggtatgagtcaccacacccggcctgactcttctaagtagctttttctggggtgtttcttttttaccttttttttttttttttttttttttttagagacagggtctcgctctgctgcccatgttgaagtgcagtggtgtgatcgtatctcactgcagcctccaactcctgggctcaagcgatcttcccgccttagccttctgaatagctggggctttaggcgcatgccaccacgtctggatcattttaaaattttttgtagagatgggatcttgctctgttccccaggctccaactcctggcctcaagcgatgcttcttcctcagcctcccagtggctgggactataggcacctgggttgttgctggtgtgtgtgtgtgtgtgtaggcacctgggttgttgctggggtgtgtggkgtgtgtgtgtatgtgtgtgttgctggggtgtgtgtgtgtgtgtgtgtgtgtgtgtgtgttttatgaggctgtgattccaggaggcttccagcacgtggcgggattgagattccctgagatggagggctgggtccggaggagctggggtgggccgggcctggatctggtccctcttgcaccaggtcacagctcactgggagaagttcatggccacactgggtcctgaagaggaggctgagaaggcccaggcggactttgtgaagtcggctgtcagggatgtccgctacgggcccgagtccctcagcgagttcacccagtggcgggtatgtccctgtcccaatgtgcagggagtcactggctctcgtatctctagctgcctggaggtccctggccatgaagggctgaggggytgtgggagtggggtgagtcagggtgggcagccctgttggctggagaggcccttccccaactctggaagcataagctccccctgactatgcatcggcagggctgggggcacctgggactctgcccagcttcctgatggcytggccccacccaggtgcggatgatctctgaggagctggtggcsgccagtaggacccaggtgcaaaaggctaacagcccagagaagcccccagaagctggagctgcccacargcccagggtgagtgcagctcccagggctctgaggccagcccagtccctcctccctggagaagcttcaggagaccaaggcgtcctgggcaygtgcccaggaagcaccccaggtcctggctcactccctaggtgaccccgggccagcctgggcctcctgcatccgcagtgaggtggggtccagcctgtgatggggaggaaggaagccccaggcagacaggcccatggtcacaaggccccctccacaggccagactggcggccttgaaacggccagacgacgtcccactcagcctctctcccagcaagcgggcgtgtgcctccccgtcggcccaggtggagggcagccctgtggcaggctccgatggcagccaggtgagctgaggtggcaaggagcaggtggcagatgagtcggggctgggcagctgtgacccttctctccccccacagcctgctgtgaagctggagcccctgcacttcctgcagtgccacagcaagaacaacagcccccaggacctcgagacccagctgtgggcctgtgccttcgagccggcctgggaggagggtacatggtggcgggcaggcggggcaagggccgctggaaatagggccgcctggatgggtgggggatcaggagacaragcttaaaaggcgccatcaaggctgggaggaggaggctgcagggaggacctagatgggaaatgtctctgctcatccgacctctcaaaaccgggcactcaggggccacatcccagaccgtggccacgtgcggcggggaggctgtgtgcgtaattgattgccagacgggcatcgtgctccacaagtacaaggcacccggcgaggtgagtgcaaggccctgtccctgctgggcaagggtgcccgactgactcctgaacagcagcatggggatggatgcaggctcggccccctgccccatggcctttttctttcatgctggggctccctcccccaggcccgggctacccgcgtgttcacaccaatagctctgccccagtgactgtttactctaacccccgcccaggagttcttttctgtggcctggaccgctctgatggtggtcacacaggctggccacaagaagcgctggagtgtgctggcggctgcaggcctacggggcctggtccggctgctgcacgtgcgtgccggcttctgctgcggggtcatccgagcccacaagaaggccatcgccaccctgtgcttcagccccgcccacgagacccatctcttcagtaagcccctccccttcacccctgggacccccaagcacccctgtcctgctgccccagtagcctccacgctcccctccctgggatggctgtgagctcgggygcctgccgggccccagtctgcaccgctccgactctagctttggcaggaagccatgtcgcttcaaccctggctttatccacagcctgctctgtggcctcggagttttccaacagcctgggccactctgtcccctgtcagtgacctggggggatgcccctgcccccgggtgtggcgcccctgtcaagggggatggatgagccacaggaagtggccgctggagccaccgcatcaggttagatggaggaaacagggattgggggcccaggagtgttcctgtctcctagcctcggcccgccctccccgcctcggaggggctggccttgggwccgtgggctcagcctgggatgcagccagcaggagggagcagggtcatctcagggccacttctcccctaccccaccccctcttcagcggcctcctatgacaagcggatcatcctctgggacatcggggtgcccaaccaggactacgaattccaggccaggtgatgcttcgggtgaggctggggagtggccagctgctggggcagggacacctcggtctgggtctgatgctctgttcccccttgcccactggcagccagctgctcacactggacaccacctctatccccctgcgcctctgccctgtcgcctcctgcccggacgcccgcctgctggccggctgcgagggcggctgctgctgctgggacgtgcggctggaccagccccaaaagaggaggtgaggctgggcagggggcgccttggaagccaggccwctgcagagggtggctgttggcccagatgggctcacagcagcctgggcacaccsgggtaaccataagggttgtttttagaggcctcttcgcagagctggcttgtcccacctttctgccaggctctggaggaaaggactctgaccctgctctcaccctgggttcagctgtgggactgggccatgatgacctccccttcacctggggcttcagcaccatgctgtgcccacgtgatccagcccactcctgccactcatcagcagtgtgatggtcctctgtgctggcrtaatgtcctcatctgtaaagaggggccgatggctagcggagggcaggtgaggtggtgtctgggcaggcaggctttggaagtgccacgttgaggctttctggctcatctgtcccacctggaaggcctctgagacagggcttggcaaggggtccctgtcctcttggggcccccagcctactggggaagacagatgctcagcaaaggtggccaatcaaaatcccacagtgtgatgccagctacraaggagacggaaaaagagtaacgggcagagggacactagcgtgggggtctcaggggactctgctgaggtgaccagcggcagatggatattctggggctcacgctttcctccctgggagcctggtgagggagtcagcgggcggagggtggggaggtgcttgcatggaggaaatggtacgtgcaaaggtcagtggcaggggagccagctggcctgctccaccatgtggccacagctgggtggacccagcccagaacaaggtggcaagggtgcctgggcggggcacgccgggcttygtcagccacggtaagctttgcatttctatttatttactttttatttgagatagagtctccctcttgtcacccaggctggagtacagtggctcgatctcggctcactgcaacctctgccgccagggtccaagtgatcctcctgcctcagcctcccgagtagctgggattacaggcgcacgccaccatgcccggctaattttcttttctttgagatggagtttcactcttgttgcccaggctggagtgcaatgacacgatctcggctcactgcaatttccacccccccaccgggttcaagcaattcttctgcctcagcctcccaagtagctggaattacaggtgcacgccaacacgcctggcttatttttgtattttaatagagatggggtttcaccatgttggccaggctggtctcgaactcctgacctcaggtgatccacccgcctcagcctcccaaagtgccaggattacagatgtgagccattgcacccagctgacttttgtctttttaatagagacggggtttcaccgtgttggccaggctggtctcgagctcctgacttcaggtgatccacccacctcagcctcccaaagtgctgggattacaggtgtgagccactgccctgggccaagatttggatttttagcttacctacaacaaacagcccaggaggagcttcgacacagcagctgctgtgttgaaaggagcagcaggggccttggcggcagaggtggtggcggcggtagttatgggcttctctttctcaccagcagcccctgggccgccgcctccctcyctgcccgtatgtctggtccctgtgtctaagatgcttcttctcttaccctctgcccaactggctcaggcctggcccatggttagctgctgggccactctcctggctccaggctagcctccgagagtcaggtagctgccgggacacttctccaagcagacactcccacacactctcagctctgaaccatgcagcagccattccctcattcccccattcccccgtcttttgagtcagagcagatgcccccaacagccccctgggccatggccccccattcccccgtcttttgagtcagagcagatgcccccaacagccccctgggccatggcctggaaacacctgctctacttggctgccaggaggcccctgttcatctcacactcggtcccagaggcactggctcgcttcagagccttwtccaaccccctggcctagccccgtcctggaagagccacccctcgtgcctctgggtcactactgtgactcgggacactcaggtgctggctcccccttccagggcaaactgaaccttcctggggccaagaatgtatctctttggtggcatcttctgtgcagccttcacacagggcagggtccccagcaggtgcgctgcagatgcctgggtgagtgggcagctctctatctgcaaggaawggccaactagcatctcgtgctgccccacagggtgtgtgaagtggaattcgtcttctctgagggctccgaggcatctggacggagagtggatgggctggcatttgtgaatgaggacatcgtgggtgagtgagctcagcttgtgggacagcctggcctccgggcacacagatggaccgcttgtccctgggctaggcttctgaggatctctagtgggagaaggtgtctgggaggggccaccctgcacagctctcccttctcccccacagcctccaaggggagcggcctgggcaccatctgcctgtggagctggaggcagacgtgggggggccggggcagccagtccacrgtggcagtggtggtcctggcgcggctgcaatggtcgtccaccgagttggcctacttctcgctcagcgcctgccctggtgagcctgcccccctgcccgccccatcccgcgggcytccgggagctctgcccccactcagactccacctctgtcccggcagataaggggattgtgctctgtggggatgaggagggcaacgtgtggctctacgacgtcagcaacatcctgaagcagccacccctgctgccggcagccctgcaggcccccacacaggtactgcccggctcaccctgcccaggcttgggctggcaaggcatcaggggccctgcctttggtcagcaggagcccagcccagccctcccctctctccccaccagatcctgaagtggccccagccctgggcccttggccaggtggtgaccaagaccatggtgaacacagtggtggccaatgcctccttcacctacctcaccgccctgacggactccaacatcgtagccatctgggggaggatgtagcctcacaccatcgcaaaggaccagggacacagctaactaacttattcagctttgggccgatgggggtggggggggtctttcagtgaatatttttattaaactctactgtggacaagaagcctgtggaaaggtgtttcgagttatgcaggaagaagtgttcctgctttgactgacaggcaggcccaggagttgaggcttctagagcagagactcttgggagctcatgggtttgcacacttctctccggctsagcacagcccccgcagcagcccctggaccccggatctttggtccagaatgaattcatccctgccagccggacgcccctgaaacaggtcatctgyctgcatcaagcctgacaatccatttgcttgcgaagtcaccgctgctcaagtccacatmcaggtctctyccgctatactttattaggaatataaaacctaatctatgtacaggacacgtcggtgtcagggtgaggggtggccacaaggcgggccatggctgggaccggccgctctcctcggtgtggtacctggagcggagggtcaggcacaggtaggaacggggctcacaggccgagcagagccccctctggcccctactcaattccttcctgcttgtcttttatggccacctgggagagaagaaggtggtggagactgagctggaacagctggggcaaggacgctggaaacacatgcccagcatcccccccgccaggcccttcctggagggcagccatgggccacactccccaggacagtggagcagccaaagggccctcccagctggcccaatccagccattctctatggcagccccggcaggagtcagaggccccagaggcttcctggtgagcagacgactcagacgttgaaatcccccaagctgtggctctttcccctctaaactgttctagattcccakgcgccctgccaggaacaggtgtgggccaccctggggtgagctgcctcccagagacctggaaggaccaggccttgccaatcaccaacaagggacgtagaagagcacccccaaaggacagtaggtccccgcccsgatctggcccacagcacccgagggaccctgcagcactacagaagtcccatggggcagacgggagccacaggcccagactccacagcccctcagtccacatgtcctggagcctgtggtggaagtccctgctcttccatcactgccgcctctcccccaggacctccgaagaaacaggccagggctgtcccaggcctgggcacacgggccagtgtccagcccaccccgtctgcccctccaggccccgccctcacccgaaagcgctcctccagcagggacagctcactgatgaggtcggtgatggcgttggtaaaggcttcctgggggctgtagtccggcgtggtctgcactcggatgatgatcttgtgctcyaaggggtgggggactttgtagccagcaaatagcacttgcgggtcttttaggagttgtctgaggtccagggacagacagtgtgagggtctagcctcatgcccaagctgggtagcagccagmtcagagcagaagaacagactttctagccaaaaatcccccccaacttttttcccaaaaagtcttcaaggaaagtaacacttttaggaagatacctcatgtggggacaccctatccccgccacacacacacactctgcatccatgaggttgaaggacccgagctggaaagagattccagcaacctcttcccaccgggcaccgcagtgctggcaaagagatctcccaggcagtgaatgtccagccagtgttcagtgactcagacccaaaaagcccacaaagagcctccacgcagcaaataaaggcagcaggagaggagggccagctcccggcagtgagtggaatgcaaatggaactctgccctccgagcagcacagccgccagcggctggccacgcacactgggccttgtgccatggggctgcgtcgcgtactgtgccctgggcacgcaggggtctcctctagagcggctcagagtggygtgagcaccacaagggggacccgtgcataggtggcaacactgagctcaagagcaggggagcagcagggccccaggagagcttgggtgccccactggctgggctccgggcaggagtcctccatccccgcgcctgcccacaccaggagactgggcagaccccactcacagacggggaaaagcctggcttcgctggtggcaccagagggaagagccaagtctacagtaaaatgacaagtccctgggccagaatg

SEQ ID NO: 93701 - DNA, 115403 bp, Homo sapiens
gtgcccttccccaattgcagaattgtgaggaaataaatggtggtagttgttttgagccactaagttttaagcggcccccatggtatcagttcaggtcagacatgtgctttattctgctgtgagtttggctgggtctggaatgtccaagatggcttcccacatgtctgggacctcagttaaagtagctaaaatggttagggactcctttcttgctgtggttgctcatcattcagtggtccagcccaagcttctttacacagtgcctgggtcccaagaggaagacaacagaaagttttaaggtaatttattatgcagcaatagataattgaaaacaattatccagccaggtgcagtggctcacacctgtaatctcagcactttgggaggtggaggtgggcagatcccttcaggccaggaattcaagaccagcctggccaacatggcgaaaccccgtctctactaaaaaaacaaaaaattagccaggcacagtggtgcatgcctgtcatcccagctactcgggagactgaggcaggagaattgcttaaacacctcgggaggcggaggttgcagtgagctgagattgtgctactgcactccagcctgggcaacagagcgagactgtctcaaaaacaaaacaaaacaattatcaaatgtcagggtatcttcctattgctttacctttactctgtgggctgggaagaagttgtaacaatgtcagccatagaagtcaagttttcaatgcagactaaattccatgacagtgaacactatatgccatagtagtcactgctctgtccatagagcttagaacagtattgccacttaataggctcccaaatatttgttgattgaatcattaaataaatgaattgagataagatcccctaccctcaagaggatggacaaaaaagattctttaaatggagtgtggagtcttaataagggaaaagaagtaaagaaaaagcagataagctctaagtctgccttttttcatggtccagggctatttgtcccatgcattttctctttgaaaaaggtgctgttttttgtgatgccttagaggccagaaggatgttttgaaggggaaaattgtaggagttaggcagagcagggttttggctccttctcaatgtccctctacctagacaaattcgggctattctgcagaggttgcagtgagccatgatcacgtcactgcactccagcctgaggaacagagggagactccgtctcaaaaaaaaaaaaaaaaaaaaaaaaaaaaaaaatttcggcctactctatgaagcacctggtaggtgtcccaatattttctggtatatgggaattacctttttctattattggaaggtctaaaaagcaaacaatgtgctccatatggctagagttagtattaaggggaccaagtagaataattggtagctagtgttagcctggagactaacatagtcaaagctgtcttgtcatgttatgtcttttttatttgtattgctccacggtccaagacaaaatttctgaacgccacttggacacagtgagtacctggtctgctctattgttctcaggagcaaccaactcaacccttatttctctgagaatgatgatttcatacagcacatctctctaccaagatgtgaaagatgacaccatggcatctgaaatagcttcaggagagatttgggacatgggaagcttgtagacaataatggaaaattctcttttagaatatagttacttgtatgacccacagtagcgccttttggagaatgtcttaaaattatctttattgaaagaacaataatgtttgttattaggataaatgaaataaggggaaaacctcagacccttggaacaatgggtttacattcaatccaatgattattatgtttttatattctgtattatttagaaaacagtagttaaacagacagaaatacagaagattgtttaaaaattaaagctattgagttagatccctttttgaaaggtcagcgtatgggagatgagaaaggcactatagagatcagagtgtttacacaaaagacatcttagcagatgacctacaaagagcacatcaagtatttatatcatccacatcaagttgctggtcatttcgcttatcaaagaaaataagaaagaaattttctttcgacattattttggtgtagtaacaatagagttttggaatcagctgttagaagcgataattaaagctagtttaccatgcttactaatcaatctacatagtcaccctgaagctttatataattgtccctttgttacaagcttctacttctccctatggtattctggttctgaatccagacaggtaaagaactaagtatggccgggcgcggtggctcacgcctgtaatcccagcactttgggaggccgtggcgggcagatcacgaggtcaggagatcgagaccatcctgaccaacatggtgaaaccctgtctttactaaactacaaaaaattagcccggcatgatggtgtgcgcctgtagtcccagctactcgggaggctgaggcaggggaattgcttgaacctgggaggcagaggttgcagtgaaccgagatcatgccactgcactccagcctgtgagactccgtctcaaaaaaaaaaaaaaaaaaagaaaaaaaaaaaaagaactgaagtgcttggagaccagtgtattgtaatatctatacagccaagcaggtattttcaactgaactttaaaaaagtactatttttgaaactttctttagtttagatagggccagccatttgggtagaaaggaaaagaaaaacaaaaaattggaaaaggatgcatcagtatttctttcagaaacaacttaacactaggaacagaaggaggattttattcaccaactcctaataaccacctgatgttgctgttgggctggccaaatatctgccaacattgatgatcctttcattcaccactagagagaagtagagggacctgatgtttagagaagcagtaaaacccatttcccattttctttcttcagccggatggaagtacttggaggctggtctcatattctagcactttagtgctggtgatgcagattatctctgctccagagtaactctgtgccatggaatccaagaggattctgtcgcaccaggacaggaatgcacccttgtttcatttgcttccatgaaagcagatttcagagattctcagatgctatgagactaattgtcacttagggtaggctccaggggagggacagagaagggcagtgctaataacagggactctggagacaagatcagcaatctaagaaacaaatgtgagacattttacccctccctaatctactccccttttaaaagttcatcttcattttccctttttctaccacgcagtaattgataattaaacacagctctggtttttaccatgcaatctagtagaacacctagacatcaggaactccttatctttggttatttatacaataatgaaatctgtagttcacgctaggctgtgtggacagtatctgcatctctggaaatcaactggaggcctttctcttactcttttccggttgctttccatttccttttccactgtggtccttgcctttcccaagctgaccagaactatgcacaaaaccagtcttcaataaatatcaacactgaagcttcagcaggttgttaactcctgcacagctatcttaaatgctgtatataagtgcaaagttttatggagcctcagaggtctctaagaacactgtaaatatcccaggtttaattagtagtcccggagttaggtaatggcctgtggctttctgcgctaggtctcttgaggtttctagtcttcagaggttgcctgcaactatgatgtgcacatatacagtactctttctcaaatacagcataaaccctctttagactttgctaggcacttacaattattgaacacacatgcagattgattctcattctctcaaagtttgaaaaacaactcagtgcttcaacctaggtctcgttagatattttttgactcaaattgtcgtctgtagttctacttcctaagggaaatgaaaaaacaataaattcccagactggtgttgatgctcattctctttaagcgggtcgactacttgctttgtagatccttgacgggtggggtgcggggtaggagtgcgatccaactctcagcatttccgaatcagctctctcacggtgacaggtcagcccaatcggggctgtaaacagacttgacaggtttgttctgggctgacggccrttgactaggttctcagaccagataagtcacttggctgagtccacagtaggtggggcgcgctcaccagctcaggggtagtgactggacgtttgttgcaacatcggagaatgcacgctctgggctgcagcaggagataccctcaagcacagaaccaaaagggttcaccctaagcggcagggcatcagcgatggagaggcccgagagccctagcgcccagctccttttcccacgtttgggaaggcgcagaataggtcgatgtagagcaaggagtgagtctcaggtctcagtcctttggcttgctcttagggtagcaggcgaggagtggcaccagtttggggactctctccccgcgttctgtaagaatcggcggcagccagcaggcggggaggcgggggcacgtgtttggatgtgggtgcttgtgtaaccagttccccaagcgccagccccgacagcgctccttcgggaggctggtccgagcccctgtttccgccgcggcgcaggaagggttggggttccgctgcctgcaccaggcaagagcaccccgagcaaaggaagaagacgacttgcctccggagctatcactggggagtgggaatttggaaagttccccaactagggacacacgtgacctccttcggaaagtagttccgactgtggcccgtgtatccttccacctccttttgaaccctcctaggtctcctcgccccgcccactcgctgggctgcagcttcctaccgttccgtactttccactcaacccggtaaccccaaacgtgcacggtccggccggggcgcgcggagcctggccccgggcgatccatcctgccgggttttcacggcggccaagggggggcggggctaggtggtctctgagaaccgagcttgactccgacgccgcgaaccgacctggagcccgaggggaaagatgctcgactctcttgggggcaccggagcgggcgcaggagaggcctgcggggtgcgtcccactcacagggatcctctttcagttcatttagataggtgccctttgggcccttgaaattcaacggctatgtgttcacgttcagcacgctcggctgagagctttcatttttagggcaaacgagccgagttaccggggaagcgagaggtggggcgctgcaagggagccggatgaggtgatacacgctggcgacacaatagcaggttgctctttgtgctaagactgacaccatgaggacacagatttgggggaagggggaatctctaggcaaaggctgttacagtcaaatctctgcgaacgattgtgatccgacagcggtgcaaaaggaaagagcgaatgcagtccacgccgcggaaatctaggggtagaggcaaggggggagggtattccccttgcagggaccgtccctgcatttccctctacactgagcagcgtggtcacctggtccttttcacctgtgcacaggtaacctcagactcgagtcagtgacactgctcaacgcacccatctcagctttcatcatcagtcctccacccccgccccacaacagcctaccctgcctccggctgggtttctgggcagaggccgaggcttagctcgttatcctcgcctcgcgttgctgcaaaagccgcagcaagtgcagctgcaggctggcggctgggaaccggcccgagcaagccccaggcagctacactgggcatgctcagtagagcctgcggcttggggactctgcgctcgcacccagagctaccgctctgccccctcctaccgccccctgccctgccctgccctcccctcgcccggcgcggtcccgtccgcctctcgctcgcctcccgcctcccctcggtcttccgaggcgcccgggctcccggcgcggcggcggagggggcgggcaggccggcgggcggtgatgtggcrggactctttatgcgctgcggcaggatacgcgctcggcgctgggacgcgactgcgctcagttctctcctctcggaagctgcagccatgatggaagtttgagagttgagccgctgtgaggcgaggccgggctcaggcgagggagatgagagacggcggcggccgcggcccggagcccctctcagcgcctgtgagcagccgcgggggcagcgccctcggggagccggccggcctgcggcggcggcagcggcggcgtttctcgcctcctcttcgtcttttctaaccgtgcagcctcttcctcggcttctcctgaaagggaaggtggaagccgtgggctcgggcgggagccggctgaggcgcggcggcggcggcggcacctcccgctcctggagcgggggggagaagcggcggcggcggcggccgcggcggctgcagctccagggagggggtctgagtcgcctgtcaccatttccagggctgggaacgccggagagttggtctctccccttctactgcctccaacacggcggcggcggcggcggcacatccagggacccgggccggttttaaacctcccgtscgccgccgccgcaccccccgtggcccgggctccggaggccgccggcggaggcagccgttcggaggattattcgtcttctccccattccgctgccgccgctgccaggcctctggctgctgaggagaagcaggcccagtcgctgcaaccatccagcagccgccgcagcagccattacccggctgcggtccagagccaagcggcggcagagcgaggggcatcagctaccgccaagtccagagccatttccatcctgcagaagaagccccgccaccagcagcttctgccatctctctcctcctttttcttcagccacaggctcccagacatgacagccatcatcaaagagatcgttagcagaaacaaaaggagatatcaagaggatggattcgacttagacttgacctgtatccatttctgcggctgctcctctttacctttctgtcactctcttagaacgtgggagtagacggatgcgaaaatgtccgtagtttgggtgactataacatttaaccctggtcaggttgctaggtcatatattttgtgtttcctttctgtgtattcaacctagggtgtgtttggctagacggaactcttgcctggttgcaagtgtcaagccaccgattgctttcttaggctatctatatggtctcttcctgagggctattgtccgttaatacagaatacagtacactgttagtggattagcgagctcggtaatccggtctcctaaatgaacaaaaaagtagacgctttttgaggttgagcatatttcgattaaatcttggcttaggccctagatcaagggtttagatcagaataaaatgaaaattagtgttgcacgtacgcatattgcatcagaatcttgcagtgattgttttagtttcctgagttgcattgatagattcttttaaaatatgactgatttgcataactttagaagcagaatcattttcagtatatatggtgcacattgagggcaaaaagtagttttgttaatgtttaaacttaagttacctacaactttgaactgtatgtagaagttttgtagtttgaagtcaatagtgccataatataccttataaggcgttcttactagatctttgttatatttacctttttctctccctatggggtgatgtaggatagtgcttgaaatttgcacttcagtagcatttaatgttcagtgctcttgtcataaacatagaatggatattgagtagtttctgatcccagatggtaatgtgtaggttcaagggtattgtgtgtagcaagtgaagattgcagaaataaaacttcagttcatgcttgaaatttaagtattgttgtgatgccagaattgctgctcaccgtttttaggtttcaggtcctctgacaccttttggtatcgttaattttactgatttgtgtagaatgtcagttgtattttaccagctaatatctagaaatgctggcaagaggggtttactccagctttagattgtaggtatgttagcttttttcatacagtgtattaaatttactgagtcagcttgctgaataagacagaagcccaagaattttaacagtgtgtagctttagttgtctaaaagttaggccttcgggcttcaaaagttagtggtcatcgaaaagcattaatctttgcagtttcaggtacaacacattggttttgattagggatggggatggggccctctttttgcagaatggggaaagtattgacaggaattgagagctattggtaggccagtgtataaggtatgtgaaaacagaattaagttattggtctgaagtgactgaagcatttaggctctatcaaggcctaaaatttggtaatatgagtttggtaatgcgaattgtggcagtggacaatatttagttaaaattatgtaattgcataagtactagcacagtatttttaataaaagttatttcttagcaaatgtcagttgcattttgtctaaaggtagagtgacactacagtgtctatatgtcctgctaaaaattgtggggaatatttttttttaagacagcgtttatatcgggagaggttttattccgttggattatgttagctgcatataaatgtgcacagttaattttgcccaagtttttgttttgaaatgaatgtaaaacttactgaagaagtagcttcccaaaatttagttttctgttaagccaaaaatawtattttaaaagagtatttgcaaattttgaagttgacattaattgagaatgttactaaggctaaactggacccgcttgcccagaagataattatggaaaaattcttttgtgacttccaaagcagtctactattagcatgaattactgacagtcatccaaatatataggaacaaaaaattaaatgtttatgtaactttgaaaaaaaagcctttgaagaaaataattgaatgctgtctgggagacagatttctttcagcacttaaagtacataacacactacttttacttttcccacttgattttaaattatcagggttattaagaccttaaaattattttaccaggtttttacatgtgagctgtgacatgactggcattttctttgatttcagcgtatgttggtctctacacatgaaatttgtgtgacttaaaactttctctaaaactgtacttttagttatgatatgcatagaaagcagtatcaaatattgcgtcaaatgactaataacacttaatttctagagttgtggttttattgagccaaaagttgatatgaaaaaaagtcagtaaggaaagtcagtgaagtgcttgcttttttgataattgcactcccaataattttgatattccaacgtacttggtttgcttgttttcacgttaatgttttctgtttattggagtgggaaggcattaaaattgtcattgaagactttgtctttgacatgttgtagtatttatttcagtaactaacctgtgaaaagttaaattcctttatgaaagtagtgattggagtatttttatctgataaagaaagattaataatgaagccatttctccgaggaaaattgaggacaataattcagttttaaaatattatcgcaaaattaaattattctaaaaatttgttagtagggttatatgcttaatattagtctgaaatatagtgctgaatttgagactatagaaaaattaagtgtatttagggtatgtggaaacgttaggcttctgttgtatttttattgtttggtagatttgcctcttttcaaataaatgttcacagggaatacttttaacttgtagagagtacagtgactattgaagttacctaaattacctcaaggtaagtgattactgaaattaatcatgagggttttaaaaagtattctattcacaacatttattttacattgttttgtatctgctaagttatatttcctgaaaaacatgactggaccacctaattgctgtatgataacttacaaacttcatttttcatagtgcttattcaagtgtaaagcacaactgaaaggagtaatgtacagtttatatgaggaaaaaggaattttattgctgccagtgtaaaagtttgcacagcagtatagtcatcaatgcagatttacattgcttataatatactaagtaaatactaaatgattaaagataataaaatatggtgaggtataaccaccttcattttaaacttagttttagaagatagtaaagaaagattcctttattacctttttagaattttatttttaataacatgggaaaggcaactggtgatattttaatttttgtatggaacagtgcatctgctttctcatagccacataaaatacataaacttcttagtgttatgaaatggcttactttttggaagtgaagaagtcttcaattcttattttctaatgttattttgaaatttgcctccatttgctgtttgttcatttggtgatagcgcaacacttaaaaaaatattttaagccgcttctgaagtaatcacttcagtgacttttaatggaggagtatttgttatgggaaattcacttcacaaagttttaacattaattcacttgaagtaaacgtgctatttttaaattttcatctcaatcttttaagtaagacgaaagcttaggaaatcacttttattattgatattgtgtgtgacttcagagtttgtaaagagaattgtagaagtgttgcatgcatatgacaattttctgcttaattgaaatgtgaggcctctgccatactacaaggatttagcttccagaaaatgtaatattaacatagcttaagaaatgtatttttttttttctgtagaaaccgttgggttaaacaaacagttcagaagttttattacatggaacccattagttcttaatcttgttacctttttcttcattttttctgttaaacttgattttcacagtcagcattgaagaattcatcttgtggcctgaattcattaagaaaagatgttaggatttgttctgaagatagtgacttaggaaatttgtgagactggggtcagtcagttctgttttacaattgctttctatttggtagctttgaaattaatttagttgcttatcagagagaataatgttgaggttagactaaccttaaattggtaaggctttgctgagcaaactgataactgtaagtcttttatagggtgcattactgccacatatacgttcttccataggtggttaaaagtatattggtctgtgtttggtgattctctttgtacatattgagtatatgcattcactaatgtaaaataatttgccaagaaaggtgaaattagtatattgtacttgactattcacctttcccttagttttttgaatttttttcattggttgcagaggaagtattagcaatttaattcttttaaaataatttgcactggaataaataagtatcggcaaatataagaagagtaacataatttaagggtgaattaattttatttgggaagttttagttctgtatagttaaggcagattcttcatttgcaacagttgacattgggacatgtgtgaacatcttcaaggtattaggacatcttcaaggcattactttttggcagtgttgagaatttttttttttttttttttttttttgagatggaatctcgctctatcgcccagtctggggtgcagtggcaggatctcggctcactggaacctctgcctcccaggttcaggcgattctcctgcctgaacctcccaagcagctgggattataggtgcatgccaccacgcccagatagtttttgtacttttagtagagatggggttttaccaccttggccaggctggtctcaaactccagacctcaagtgatccgcctgcctcggcctcccaaaatgctgggattacaggcgtgagccactgcgcctggccagtgttgagaatattgagagatggatattgtagctgtacctgccatcaaaagaattttcttgacctccacatagtgtgaaaaagaagactgtttacacattatattttaagtaattatacacataattattatcagtactcaccacttcaaatatgaacagtgaatctaaccagtgtttgatttctctgtgtgtgtatgtgtatacaaagttagcaaaccttttatcttaatatttattaaaaaacgaatttttgtttctttaaagaaaagactaccttagagaatattgttctatagtttttaaatatggtcagatctattttaaattatgttaaaattttgagtattacgtttatctatacttttaagcatatatacattgtttcattttagattttagggaggcagtgtgggctctggagccagactgcttgttttgtaatcctggatcttccatttagtagctggatgactttgagtaggttatttagattttctcaatctattttatctgtaaaatggggatgataatggaacctaccgcatacgtttatcttgaatagtaagtgagataataataagtaatttcatttagcatagtacctgccacattgtaaatacttaaatggtagctactgctctgaaaaactgtaatttcaggttatgtatgtagggaaattatttgtattttcatttatggtgtatgattgtaactgaatttcctcagtttgggccatgttaggattttgtttcaagttataagtgtttttaaaaataagggtattcctttaggaagtctgggtatgacatgtctgtgattttgctggttcatcacaaatgggaaataaatctctgctaactcaaactgttgaccaaagtaaaattaattatgccaatcaaaaactatttgctttaaaatataaaaggcaaaaacttcctattagcataatgaagtagaatttttaaactttgttataatcttaaattttctttagtgttgaagataggtcaacttaactatcatacatttttattcacataaagtaaactctgcctcaaatgtaataaacttaatatgagttatgtaaactttggtcaatagaggtatattttttagcatttccttttgaaaatttcagccttttgagggagtcttgcaactgaatgtcaagttacatttattacaataaaatggacacttaatataatctgtaatgcattaacataatatgggaacttttaaagtattcagtctctgtattattgagtcctatttccacatttggccaggattctcaatatgatttaggcccaagacgtgggaagaaagaagtaaagaactaaaggatttttttcttcatttttttaattgaatatggggaaagatggaataagcttatctgtccagtaaaggccattatgtgtacatagggattattatttttcccccccttgggctgtactgatttcccagatgtaccacagcactcttagtagtgaagcacttgacttctagtgagtggattttttgtgtgtgtgttttatattgcagagtgaatacactctgtctgatactatgtgactttctgattatgtgatttttatgcattttatgtgttttgtaaactagctgtatttttggtccatgtctaggttgtagaattgaattgtgcattttggcatctgagcacagctgagttttctaaatcaatctctctccttgcacctagtttttgctttagatcactacctaagacttactgttgatttaatattagagcacttaagcatagctttgacttttatttcctttgatttttgtagattttcaggctgaagtacaataaggttctctgttctttactagtaattgcaaagattgtattctgtgaattttatttgtttaatacttttgatcttttgaagaggatgtaattatttaaggtattatgaaatgcattgtgatttgaattagatactctttggagatggagttttgctgttgttgcccaggctggagtgcaatggtgtgatctcggctcaccacagcctccgcctcctgggttcaagcaattctcttgccgcagcctcccaagtagctggaattacaggcatgcgccaccacgcccggctaattttatattttttttttcagtagagatggggggtttctccatgttggtcaggctggcctcgaactcttgacctcaggtaatctgcctgtctcagcctgctaaagtgctgagattacaggcatgagccactgcgcccggcctcagatactcttttaattagatgcgtttaaaaatttaacccaccattgctggcatgaatagatgtatttttagagtgattcataaatatcgtatacatgtttaaagttacaaactttttgcttatttcaaaatgcaggattcttttccatttaaaattccctctctttgtgagacttctttttgagtattctggttactctaaactgattggagatgaaattagatagaattgaaaactgtacttttaaaatgaaattttggggatgtcattaagcttgattttttaggttttttttttagtgtgtattataaattattttacactgattgtcagcgataaaatggaatgcctgggattttttaaaatttattttattcatttttataaggtaaaaacagtgttttgctaggcttaatttgaccatgttgtaaaatttattgtataccttgaaagaatcatttatgaaagatactgaattagctaatatatactctgtcttatgtagtttttgattaacaatacactttttaaatcattagctcatttgattttgcaaagaagaacaggtaacctaagaggcagacagaacaggcattacttttatttttctttcttttttattttatttatttatttatttatttattttttgcagcttaggaattgtagctccagtggaatcagtatcttgttaatggctagtgaaagactgagtctgaagaaggatgcaggacttttttggcacttggtgcagtatttttcccattatgttacatgagtggttcttaaacttcagtgtgttagaacaacctgaagggcttattaagctatggattgcttactccaccctcagagtttctgattcagtaggtctggattgggacctgagaatttttatttcttagaagttttcaagtgatgctgatgctggtgctctggggatcacactttgaggaccaccaatgaacattatctcccaccaagcaaacccttaacatgttatactcctttaggttattagaatttatacatgcattatttcatttgacctgtaaactctaagtaactttgcatggaaaatgttatcytgattttatagacgagatagtgagtttagaaaggcagtatggtggaatggagcatagatttggagttggctagacctaaagtccagattaaatctctgctcaaggctgggcgtggtggctcatgcctgtaatcccagtgctttgggaggccagcgttggcagattgcttgagtctggaagttcgagaccagtctgggcaacataggcagaccctgtctctacaaaaaaaaatacaaaaattagtcgggtgttatagtgcgcattggtagtcccagctactgaggaggctgaggtgggatcacctgagactgggactttgaggctgcattgagctgtgattgggacactgtactcctgcctgggtgacagagtgagaccctctctcaaaaataaataaataaatacatccccgctcagccacttatcagttacgtagatacactgcctaaccttagtgaaccctgtttcgacaactccaaaatgggagtaaaaatcctaaacttgtacagtggttttttagttttgttaaaagtacaggtgaggtttttttcagagtattggttgccatctgagagtgatcccctttcacctcctctaggacttttagcattttctggagacattttggtggtcacagctggggtggtagagtgtgctattggctaggggcttgaagccagtgatgctgcttaacatcctatatggcacaagacccctccccatcaacaaagaattatctagcccaaaatgctgtgtaaaatgtctggtatataataagtataatatttgatgaaaatcagtacctttgcccccaggtgtgatatttaagaaggtcaacttactaaatcagtgatggagttagtcctaacatctgggtgttctgactgctgctaggccagtattctttatatgataataagaactttgtccacagaagatatccctaataacaaaaaaggtttatttgaagaggactcatgtgttctttggctgattgtgaaagtgttgctttgaacttctgttagaaaaggttgaagatgttttccgtaagtgtttttaatactgtacgtagtattcagaaggatgtttaattttttttttaattttgctagtagtttttaaagtaatcctttttcctttaattatgtagttgttgaactgttgggagttacttttctcttactattttgttatttaatgtattctttgaccttatgcttttttattctaaagctgcttttattatagtcagatatgatgaagttaaatgtacaatgtaaaattgcaaatttccaacgagctatacaaacttaaatatttctaagtaaagaaaatagggctgactctaaggttctttgatccatgtgttgcattcttttctaggccctaaatttgctatgccagcctgttgaattaaagtgctttatttatctaaattagaaacttgtattaaagtgaagttttagaaaaaaagaaacaaaatcggaatggagttttaggttagcccagagatgggaagatgccaagaaggtagctttagtggattctgaattttttggttttgttttgtttttagggcaggcaaatgtaattacaaaagggttctaggaatagattgctgtgattttttttctgtttgcatgattttacagtttgctttgcctctcacttttgaatgcagaataaaatgtcaaggccttatttttttttaaattcttaagaaatttaagatttgactgttaattccttttgaaatatgggatattttgagataccaattatttaagacaaataggactcattgttacaattcagttgaataaggcttatgatgtttatttcagtatatgaatgaaaactatgtgcttattgtacttaagaaaatttcttttattaaaaacatgactaaagagaattttaaaaatcacccactgtcctacttctctaaaacttaatgttttcatattagcttccagttttgttcatatgcatatactttaaaacctagttcatggtgaacttaagagggtgttctttttaaaaaacaatttccattgcactttgtcgttgccttaattaaatggtgaaatcatcagaaatatttattttcctatacttatacatttattaagcttgtttccatttttttattttgtgattttttaagtggatttaagataacctaaacattagagaggattttcatggttttgattcatgaaatcataatgttatacaaacctaactgaagtgttagagccttgaagatttttcccccgaattacatatagtaactctacttgtatttaatactgaaagcatattttacttatttaagtgagacaaagtaaaatttagctgaatactttagatctatcatttccttttcctgttgtaagaacattacattgtgttgaaattaaagtggatatagaaggtaattagaataaactgccacatcatttttatagtaaagtggtaataacactattgctttctgtttttttaatcagaaggagtatgggcttataatgatgttactgttccctgaagcatattttgaatgatacggtttatatttgcacagttgcccaggtaatcattgtgatattaattgatcaatttgctatttatttgcgttttaaatcagtactagtatttgtgcttaaaaattttgcatatgttttatcagatttaatttttaagtgtcagatactaaaacaaataaccttaactttattaaattataattttttatcatgaggtggtattcatttattcatatagttagaacaaaaaatatttaaaatattgaggtagaaacaaattagtctctttttaattaaaagccagattacttgttagagtaacattttcccaaatgaggtaaaattgttgcgactgttaaacttaaggaaattttgatctaggtgtggtatataccttcttgtggggtgctaatgaaaacagggatggcaaaaatattttgtttgtgagtgtatgcatttatgctttttgacaacctaagaaacactcttacatctgagtatctttcatggactagctgtaggaaatctatataaaatagcttagtatactgaaagtatgacatagttttacatatctagattgtggttgtgattatatataatactataaaatatgctaacgtgctgcttaataatactatttggattttttttaatactgaaaaggtcacacagattgtgattattgtgtagtgtccaagaactaaggcctaccatctgttactcaaatgtatgaaaaagttaagataatttagtgatataagtggttttgacaccactgtttttggaataatctaattatgatttttataaagactaatatcaaattttaaacgtttgcaaaaatgaaacctaatagttatactgttatttatatttttctattacaatacagatactggctgagaactaaagattgtgtaataaacgcctggccttcagtcatttggttttttttttccctcgattgtttggatagttaactggacatcatgttttaacttgagaaattaagttatacaagattttgatattttaaactagttttcctaactggttgagatatataagaatttagtattacaggactcaatcagggaactgatttaataagaatttcttaaaaatttgtttaaatatttttcaagttcttttcttcatcttctacaacttaattcttgtctgtatgcaaatgagcttccccatttaaaattttgctgttgcattttaggccactatagaagttgtttctttaattttcactcacaagaatttggtcttaccaaattgtgtaaatctttaaaattgtgtatttggcttaatattatagaatctgattgatttaatctaccttgtttcatttagtatgttgacattttcttgagaaatttgttatgccaaatgattaacataataatattttaagtttagatatgattttgaatttacattttcaaatgcaactttgtgtctgtggccttttttttttttttttttttacgagaaacatcttgccaattttcagattaatctgtgaggaaagtagattggtttactagactcagtttgtagactttggtgagaactgaattggaggctatgaaaaaaataccttttgggcctttctgaatagacatatatacataaattatatctcttacattaagtgaggcacatatgtaggtgagatttttacctgaatattaaaagtttaaaagtcgttacctattctgtttacttaatagtatttaaagggtgtgagaggtgttatgtgtttctgtcccttgtttttattcctatccctcccatctaactgttggtactcttatcttcccaggtattaaacttgtatgttttaaaagcttatttacttgttgaaatggttaacttaattagttttttctttgaagtttcagcctaaatattttctgtttttttatatgtcctttaaatatgaaaattctacagctaatcataattagtaattgtactttttcccctattacaataactggtttcataataaaatggtatcccttcaataacaagcatttatagtagtttattaaaactaagggtgttatctattcaaaccaagcaatgcagacttactgttgactctgttaatatattttaaaattgcatattactaaaatttaaaatatgattttgactagtattttggtgtatgttattttagatattttgattatgcactacttaagaatgaattgtcaagtatgattataaagttgatataatagttaaccttcagtgggaataggaatcatttaatattgttagatatttgtattattagaacaatctcctatgattcttactaatatagtaatgaatgacagacaatatgttggctttcatatttaaaaattcacatgcatttctagtttatgtttttcttcgactaaaattctgcagcacttaggcaaagctatttttaccagttggaaaaaaagtaagtcatttccaaccaattttcctggcttgtagtatagaataaagagacttgattttattacattaaagccaaatataaaatgatgcaatctagcacacacttgtttggaacttttctcttttaaatattcagattaagaggacgttgaaaggtaaatttttttttttttttgagacggagtctagctctgtcacccaggctggagtgcactggcacgatttcggcttactgcaagctctgcctcccaggttcatgccattctcctgcctcagcctcccgagtagctgggactacaggcgcctaccacggtggcgcccggctaattttttgtatttttagtagagacggggtttcaccgtgttagccaggatggtctcgatctcctgacctcgtgatctgcctgcctcggcctcccaaagtgctgggattacaggtaaattttgattgttattagcaactataaaagttttgcagttggcttattggaaaaagaaaacctccttgccggagacggagacgcatttgtattagaactttgttttctgagtaccttacctatagtaggtttcaaatattggtgaattagttgatggttaggtctgcataattactgcgtatggaaattctggaaccctattttttcaaaatgcagctaatgttgagagaatatgcactaaatattactagatctttgtttttcaagatgctgatatcccttaacatcttctgcactttacctgtttgaatatcttttttgctgtaaaaattagtggccttatgtctttctgcataattatagagtagccaaaacctgttttaggttaatcacctctggcaaaataaatgataaaagcatagcttttgtaagcagaatgatattacagaagttaacttataaatctaagtgtattaaagacacttaggaaatttatgataatgctgggtcagcattacagttttaactttttacagtttttcatatgctttttttgtgattttgctgtagaaaattaacagttggcatttggcttagttcaagtataatgctgttgacaagtatatctgacacgtcattgaactaataatatttttgaaagctgataggtaagttatatctattttgtttcattcgtcattagtgatcggtcttagatgtttttagcgagagcaaaactgtagaggaatgtgtgtctgtgtgtgtatatgtgtgtgtgtgtgtgtgtattttaacagcaggagagttctgaaacaggaaaccagtcttatcatattcatccagagacctaggaagaaggtaattgtttggtatactcgttaaaaccagttggttgggcaacttaaatttttagaggatcacagatgtaggcttgagcagttgtaatagatgatttctttttttttctttcttttttcttttttttttgagatagagtctctctctgtcatccaggctggagtgcggtggcgcgatcttggcttactgcaacctctgcctcccaggttcaggcgtttctcctgtctcagcctcctgagtagctgggattacaggcgcatgctgccatgcccggctaattttttgtattttagtagagacggggtttcaccgtgttccccaggctggtctcgaactcctgagctcaggcaatctacccacctcggcctcccaaagtgctgggattacaggcgtgagccaccgtgtctggcgatagattatttcataattaacacctgctatgaagaaaaattgattaaaatagttgagaagtctagtacactctcagctaatatactaaattatactatggattttagagtattgttaacattatcagtgacttgatatcttcctgaggttctaatttgcttaactttaaataattggggttcagatcaccttgattgttcccttaaagattaaattttgtaaaactgtgtgtaattttcctgtatctggtttggatagctttaaaaatggttcttaagtttaatgagttcaactgggaaaaaagttagttctattttagatgttgtgtcactggaaattatgtttccctgtttgttatatgcacattattacaaagttgtaatcaatgttttcatactgttctctggtctgtttttttcacaaatacactttttatttgtcgccaggtacttatttttaaagctatagaggtaatatttcatcaggtgagggtaactaccatggtttgtttgctatactgtgttagggttattttcgttttttttttcttttataaactatagttgtgaatatgtttatrtagtttacttttggtttattagaatatattgctagagtgggattacaggattaaagagtgtacagtattttagttttttttttttttttacaagttgcagatttgttgccaaatgaacgagtttgtagtattgctaacaaggagaagaattactagcaagtcttgatgttacttttgaagagtgtgatgattgcatttaggaagatatctaaacttctgtttcaaagcaaaaagtatgtgcaaatttcttactcatgacaaattcatataatataaaaacatgaaagttgtgaggtcaggttgtttggagaagtagaaaacttcagtagagtttatagataggcagtcttcctttctggtttggcactgacagcagattaactagaaagtgttagaaggaacctaaaatttatactaaagtcaatttaagttaattaatataccagaattccttcttttacaatttatttataaaaacaccatattgagttgccttgtaatgagacatttaaactaaatttaaataacagaattcatgcaccatctaataacaaccccttatttacaattatagagtcctttgcaattttatagatattttcatgtatcccatttggtccttgaaacaattaatgaagaagttacagcaagtggtattatcattattttacagaagaacaaaacaaaaatatatgtggcccagagattgagtgatttacctgaggttataggctttagattgcatagctggaagtagaaccttgttcttctatattaaatgacaatattcattaagtacttagcacaggatttggtacctagtaaatatttaaatgttcctgtgttattcctgactattccttctttattcttaaaacgccattttttgagcactcttaatatttatagttcaaactttgtacctatgtacctttttctctttagaaaataagatttcaggctgcattaatttgatctgtacaggaatgattatatgttttacatattgggacaaattgctctttttttatataccttaagctctagggtacatgtgcacaacatacagatttgttacatatgtatacatgtgccatgttagtgtgctgcacccattaactcatcacttacattaggtatatctcctaatgctatccctcccccctccccataccccatgacaggccctggtgtgtgatgttccccaccctgtgtccaagtgttctcattgttcagttcccacctatgagtgagaacacgcggtgtttggttttctgtccttgcgatagtttgctcagaatgatggtttctagcttcatccatgtccctaccaaggacatgaagctcatccttttttatggctgcatagtattccatggtgtctatgtgtcacattttcttaatccagtctatcattgatggacatttgggttggttccaagtctttgctattgtgaatagtgctgcagtaaacatacatgtgcatgtgtctttatagcagcatgatttatactcctttgggtatatacccagtaatgggattgctgggtcaaatggtatttctagttctagatcactgaggaattgccacactgacttgaactagtttacagtcccaccaacagtgtaaaagtgttcctgtttctccacatcctctccagcacctgttgtttcctgactttttaatgatcactattctaactggtgtgagatggtatctcattgtggttttgatttgcatttctctgatggccagtgatgatgagcattttttcatgtgtctgttcgctgcataaatgtattcttttgagtagtgtctgttcatatccttcgcccactttttgatggggttgtttgattttttcttggaagtttgtttaagttctttgtagattctggatattagccctttgtcagatgggtagattgtaaaagttttctcccattctctaggttgcctgttcactctcatggtagtttcttttgctgtgcagaagctctttaggacaaattgttcttaaataatgaacagttggcactttttcaactggaaaattcaaggaactgctctttctgctttctgctcaatatgaatcttcaatttagaaatgagagtccatcattaacaattcaacatagcttattaataggaaaaaaaaacctagtaacaaatgtaaaatctttgattaaatgagaaagtcatagaagttcatcagatttgtatttaaagcatgatttcattagaaaagttgataataaggatttaactgtgacataattggaaaatacttgtttaaacttaaaattttgaaaagaaatgtaaatgtgatgtaacttatgaatcagtggttgagtttcttttttgctcacaagaaccctaactgtgtgttacttgaaagcactgatggaaatcagggaaaaagctccagaagttcctacgaaataaaattaaatgataaagtcctggtatctgctaacttgccttccattcctgttatcttttcttcttagtctgacttcattaattctttcaccctggctactggtttagctcagtgttttatgagccaggcagcttcagactttgcttttgatgctctttgttcattacctctaaagctgtattatcactttcattttatcattratgtttcatgtatatgttatagtttcatattgttactgcaacttttacttagctataatttaaaaaatatctgtgatctgtggaaataattattctatggcagaaaagtagttattgcattttactttataagttgtttaaggataagcatacctatatattaagcactacaaagaaacttttacaatggctttatttttagcaaaccatcatagttaaaataagatttagtgtacatgtcaggaacacagtcttatgaaataaggtttagggagctatttttagttactatatcctacttgaaaattgtagttaaatttctagcatataccctattaatttagatgcaagtacagatttgagataaggtagatacattatttggatgtcaactcggaagttgttcaagaaaagatattttgttatttagatgtaacttggaacatatttctagtgtttcaagtcatgattgtatgcctagaacaggcaataaaaatttacttagctggtaaaacagccacattatttcaaatatagtttagttatattatggattaaattgatttttgtggacagactttagaacttaattgctattaattacattttttctttgggacggtatttgttctttggtgagaaaggattcttgtaacacctaaatcaagactgtccaaacatggcatatgcagtttaccagtcaaaacaaactaatcacttaagwtctgtgtattttgttttatttgaattatacctcaattaaaacaaatttagcatgtttacacaaaggtggggggaaactgtctaatatatctgagatctgttggagctggggtgaccatccaacttaggcaagatagctagtaccatgtatgcatttcttttacctttcttattgtatatacagtaatcactgatattatgagaaaaagaactttttaataattcaggagatattttatcgctagtatatattgagtgcttattatgtgccttatatactttggactcatttaatcctcaacacaacaaccctatgtagttcatactagaattattcccatttaaagatggggaaagtgatgtttagagaggctaagtgacttgcccatggccaaagtattagaactgggatttgaacacaggtagcctgattcctaaataaatgaccactaacattaaaaagacataaacatagaggtgtttgttgcaatgttagtcataatacctaaaaattgtgaactagttaaatgtccaatagtagtaaaatggttcattaaccatggtacacccatcaatataatgttatattgtcatttaaaattgtattcccaagtttcgtatcaggaaaatataataaatttttgaaaaatgtaatgggatatattgtatttataatacagtaatcactatgtaaccaacatttttatttccatcaaaaattagttataaagaaatagaaatctaagaagtttaatagatattaccattgaacactagatttgtattagtatcttttatatttatctctctcatttcctatattggccatgtttacttttaaaatagtaaaagtcataagctctattttaaaaataaatgttagtttattaacccaagaataatagctaactataaattcatatttgataaaataaaaagatgacattcatcataagggatacatacctgtgctagcatatggcatttttaaaatcacatgagtaatttgtaatcatcatagaaatattagaaaatacaaataagcaaacacatactgaaaatttagtgttcccaaatctaaaacagagacactgtttttttcttttgggattgtattttagatatgttcttaagttataataaagtaaatacttaaaaggcaaattgatacattaaggatttcaaagagtaaaactttttgttaagctttgatgttctttagaaagtttagattattccacaagtcactgtcgttgaaagaaaagtagttacagtggggtcttatgggataaggcattaccatttgttcagttgagagacagctatcactatgttttaagcattgttcatatattagctcatttaatcctcatagcaaccttatatgataggtacctttattagccccattctgcttaggaagcaacagaaagagtatgtattttgcctaaggttgcacaataagttaagctggggttccaattctagcaagttggttctagagtgtatgttattaaccattatgccgtagtgcctgcaagtagatctctagatgtcagaaatactcatcttcctctggttacctggttgttataaatctttatgcttaatacttatgtcattatatgtaaatttcgtattaaacactcaacttattcagaagaatatcaggtaagtgtaggttaaggctgttttctatcagaaatcattatatgtatatatattcctcagttcttatgttgtttagtttttctaaaatgtcaaattttataatatatggagaagtataaatgtatattagaaagattttgtttatttgtgtaatttgtggcataagaaatatttgcctcaagatttggtgcttgtttaggtagttgctggcattacttttggaaatgtcagtaaattttcatactgtcttggaattttttcaatttttacattttattagtaaatgtaattacaggttagtaaatcacttatttgaacctgtttcctttgaaagttttatatttttatttggaaatagaaaaaccttaatttcctctcgttgggcagtatggtgtcaaaagcttgggctttggagcttcgtatataatctgggttcaaattataacttactagttactaacttgggcaarttacccagtctttttgactctcaatttctttgtctatgaaatgtaatactatttaggattgttaggattaaatgagaatatatttggcatactgtctggtacatgatacttaacaggtactagttgtctacatctttctaacttaggatggatgccgatgtcttgggtaacatctcaaactttatcagtaaggaaggtgagaatctgaagaaaatgaaaccttaaaaagattgaattcctggactccatttaaaggagtaaatagctcacgaacaagacttgctgctctgcaaagtcttccatgttgatcctggtctttgactccttatctgtctgattaaattgaattcgctgccgtggcatccttaaagctggaccttactttgtcagtcctgccttctccatgttgctttgtgtgtaagcttcactggactgtttgctttttgctgattattttatgtatttccatatgtctactttagcctttgcttggaatgttctaactgctcttgtttcttcctctgtttactggtttctgacttaactcttaaggattatctaatatattacctacttggtgaaggtttatctgtgtccccacagaattaatccttccctctttaactcttaagctatcttattttttatctaatcgggtctttggcacaattataggtctgtgtgtctgtcttccctaatagaataggaaagccttgaggacagtagtctttgcttacttagccttatattctcagtgccccttgtgcaaaacgttcaatatatgtttgaatgattatgtgaatgaaggagggggccagctgaatttactttaatgattatgtaacacccatttatgtatagttatagacttgtctgaaatgagttaaatcctttgcaacgtttgctgctatgctttgaatgtctcttacaaaactcatgttgaaatttaattgccattgtaatggtattaagagatggaacctttaagaggtgattagataatggtatctctatccttatgaatggattaatgctgtttgaatggtagtggatgagttatcttgggagtttggcctcctccgtctcacatgcttccttaccttctgccatgtggtaactcaacacaaagatccttgccagatgctgatgccatgctcttggacttcccagtctccagaaccgtgagccaaatacatttctgttcattctaaactacctgttttgtggtattctagtaaagcaacataaaatttactaagaaaactggtaccaagagtgtgattgttgccataacaaatacctgaaaatgttcaaatggcttgggttctggctagagaaggatggaagagtttggatgaacaggctagaaaaagcctgtattgctgagaatagagcattaaggacaattctgatgaggattcagaagaagagagctgtagggaaaatctggaacttcttagagagttgtcatcagttggtagaactataagtggtaaaggtctttctgatgatatctcagaaatgaagaacaagatactggacactggagtaaaggccatccttgttaaatagttgcaaagaacttggcgaaattatgttcatatcctaagactttatggaatgcagaatttaagagtgatgaactaggatatgctgcagaagaaataactcagcagcagarcatttaggttactggatggctacttttaaccacttaaactaagctgggggaagggaatgacttgaagacagaatttataattaaaagagaggcagaatggaaatacttggaaaatttgcagcctggccatagtaaagaatgcaaaaggtatgtttaggagagcaaaccaagggtgtggtccaggaaccatttgctgaagagattaatattcctagaggagacccaagggctatttatcaagacagtggaaaaagaccccagaggcattttggagatctttgaggctgcctgccccatcacaggcccagagctctaggagggcagaatggtttgtggctcaggtggtccttcacaagcttgctgcccagggctacctcagctccccatatttcaacccagtgggccttggctgtcctaggtctggttcagaggggcccaggtgtggcttaggctactgctgagtactcaaatggtaaaccttggcagcgtctatatggtgctaattctgcaggctcacaggatgaaagagctgtgggagacatggctaccaccaccaggatttcaaaggatgatggggatagtctgggagagacttgccacaggcttggagcctctgaagggtggaaatgtgggttggagtcactacagagagtccctactagggcattgcataatggagccatggcagcaggcccaccaccaaagcttcagaactgtagagctacaagtatacagtgccagcctgggagaacttcaggcttgagaccctaacctgtgaaagctgcatgggctaagtacagcaaagccatggaggtggggcttcccagggtctattgggatgaaaygaatgtattttgtaggtgagaaggacatgagttttgaggcccaggggcagaatgctatggtttggttgtttccttcaaaactcatgttgaaacttcattgccatgtggcattattatgaggtggaacctttcagaagtggttacattataagggctttgccttcattaatggattaatgccattattgcaggtgtgggttagttatctctggagtttggccccctttttctctatcatgtgctcatgccctcttttgccatgtgatgccttctaccatgttatgatgcatccagaagactctcaccacatgcagccccttgatcttagacttctcagcttctagaactgtgagtgaaataaacttcttttctttataaattaccccgtctgtggtattgtatagcagcagaaaatagacatcagcctgaagttcccccaggctggcattaaatactaattattaattagtatttatagtgcaaggataaattcaagtttagccctggttagaatgaccacatttcaagggaggggctttgtacttctgtgcatatctgtaaggataaaaatcttaatactattctcactgaaattaatggtttaggttaggtaaggttgttagtgctaataattatttcttttaataaaatattcttagttgcgttgttcaaaaaacatagatgatttgaatttatattttttggccaaaatatatttataattttgagtaggaattccagagtattggtagctataaccactttgggttccctgccattgcttctggtgcctcattttttctgacgtcttccattttcttacatttgtcttctaaggtggagttaagattactcagttaagattatttcactttaggcctctgctgtcttctgcttttttttttaaaatgaatggatataatatcccaatacattttgataattgaacaacagctacatttttaagtgaggctactttcttctaattttttaaatttatttttctcagtttttaaaaaaaatgtcagattggctaagagttggggcagctttcttatgtgagagtagtagatgacagcaaatatttgtgatgttaaaatgataatcctaatagttttcttttagaatctttataataaaaaccctttgaggctgagggtgaatttgtatgttcctaaagtgacaaaaaatgttcttggggcatagtaatttaaatcttagatgcttttattagtataattttttggtagaaatttggcattaaaaaatgcatacagagctttttctacatacagggcaagacagcattttgtcatggcaattagtaaatagataattataaaacatctaattttaagcaatttgttacagaaacgatacaggtacattgtggcaaaaatagaagatacaaaacaagcaaatatgagaaaaaatatacatgccaccacctatatatgacttttagtactttataatcttttgtctatatatgtctatatggatatatacgtattctttttatccaaatggtattacattgtacattctgttttgaaacctgccttttttagtcatttrcatctacttttccatctcagtaacttttcatcttgtgtaatgcccggatcacattaaaatgtttccaattagctcaaaaatgtcctttatggctggtttggctaaaacagtatccaggccagcattgcacctatgaaattggctgttaggaatcttgtatctttaaaaatcaagggcagcaacccatcctcccgcttcccccacctcccaccacccccccaccttttttttttcttaaagatactggcttgttgaagagagaatgggtcatgtcctacaaactgtctgaatttgtccagtttgctgtctcatagtgtcatttagcttgttttatcctatgtatttcctgcaaattaaaatttgtatctgaatccttggtggatttgagttgaagatccttaaccatcatagatgaygctgtgtcctttatattgcatgtcagaagttacatgatctttacttgattcatgatgaggagatggccactgaaattggacagtgacagtcttttctgcccattgttcaattatattcgtctctttacattagaaagtattttgggtagtagtattttggtgctgtaagaaagttcattttctcatcaaccactcacctattggtttaacaccatttgttgatctttgagtatatcagtaatttcatcagggtttgcaaaataagactttaaattctattgttttacattattaattgatgttttttgataaggtagaacttgtgaaatgggactatttgtttgtctttaaatacagtctctataggaaagacaaaataaatacttaaatctcactctttaccatttttcaaagtgaagaactattccgttaaccacctcaaaagatgataaataaaaagggtatttttagttgtttcaactttttttttttttttgagatggggtcttactctgttgcccaggctggtgtgctgtggtgcaatcatggtacaccgaagcctcagtctccctgggctcagatgattctcccacctcagcctgggactaaaggtgtacaccaccatggccagccaatttttttgtattttttgtagagatggggttttgccatattgcccagcctagcctcaaactcctgggctgaaggaatccacccatctcagcctcccaaagtgctaggattacagacgtgaccaacaatatcyggccttaacttttttcttttgagtgtctttatagactcaaggacttttatttaattcagggtgttagtaccatttaaatgttttctttgatgctcagattatcmcagctagtcatttggacctttataccacctcctatgtccatttgatataggccattaatctctataagccttcctccttctcttggaatgaaaaggtatcctaggctcacctgtaccttccctactccagacctggcattaagtctttttccaaggagtttggtaccttttagtttattatgatattagagatgaaaatctgtgttctaggaatgtttattactgctagagtratgttgcttttaggccatttcagagaaaagacctagaaaacagatttttacaaacatgaattcatactgatatttttagttttttacatgatttcttgattttacaatattatctgctttcttaacttaaaattatgamccttaaagtcattagcataacttctttgcttatttctacaacataaagaaaatagtcctggtgcggtggctcacactgtaatcccagcactttgggagattgaggcaggtggattgcttgagctcaggagttcaagaccaacctgggcaacatgatgaaaccttgtctttacaaaaaattagctgggcatggtggcatgtgcttgtattcccagctactcaggaggctgaggtgggaggatcacctgagcccaggaggtcaaggctctagtgagccatgatcatgccaccacactccagcctgggtgacaaagtgagaccctgtttcagggggaaaaaaaagataaaatagtttgaggaggctggatgtagtggctcatgcatgtcatcctggcactttgggaggtcaaggtgggaggatggcttgagcccaggagtttgagaccagcctgtgccacatcatgagacctggtctctatttaaaaaaaaaaaaaaaagaaaatagtttgaggatatcaataatgatattactagaatcagtaaaactaccaaaagaagtttaaagtttcttcctagtgtttttttgttcttagaatacttcctaccaagaagtgcagtaaaagtgcagtgtccaaatagcccttgtaacaaaacctttctctttctcctgggtgccaatttgacatttaatcagttttgtttctagcagtgttcaatttattagattataagtcttttttttctttatattattctaagatcaaaaatatataaagatatacacaggagtcctgctgctacctgttcttgctatgcttttccccttttcttccctttctctgtgaagcagccatttttattagtttcttgtttatcactcatgcatgcatatgtttattgaggatgttgacattcaagcaaatatatgggttaacattctttttgtcatccctatacgaaagatatacccagtatactctattgggtgggtttttttccttaaaatattcagtagatctctccagttagcacatagttatcttatagatagaacatatacatataaccttttcttaaactatgctattaaaataatagctttcagtaacttgataattatttttggattgaaaatactactgaaatcaactcaatcatgtgaaagctgcagaaagaaaaagacctagaaaaagggcattggattaggtcaactttgaattttatttggaagataaatgagtccagaagtgagtgggcagagattattggagttggtcttgaaatgaggcgttaggcagattgactgggctggtgtgaaaggtctgtcagaaaatcatgagattagattgaggtacctcaaaaaatgagagctggtatgatgagtgggtaagaatcataaaagcgtagagtgttgatgatttttatagtttataaatggttcttgtgtgtagagttttgtttttatgctagctatagtctgtaacataattcactataatgggcatgctaaatatccatgacagttgacccttgaacaacacagagggtaggggcgcctacccctgtgcagttgaaaattcacatgtaacttttgactccccaaaacttaatatttagcctatacttgactagaagtcttactgatgacataatgttcgttaatacatattttatatatgtgtcagatagcatatttgtataataaagtaagctgcaggaaaaatattaaaatcataaagaagagaaaatatacttactattcattaagtggaagtggatcctcataaaggtcttcatcctcactgccttcactttgagtaggccgaggagtaggagagagaggaaaggtcagacttgctgtctcatgggtggcagaggtagaagaaggtccacatacaagtggtccgacacagctcaaaccggttttgttcattggccaactgtagtttgattgaaagtaataataaatgaagtttctgcctcagttcagtattatcaagtcatagatagcaagggctggaagaaaccttagtagtaatctctttgagtctaattatcatgtagaataggaaattgcggtctagaaaggttaagtgacttgtccaaattacacaactagttagagacatagccagctcttaaatctgacttccagattttcactgtgtcttcttttttctgtaacgtgttgccttttttagccatgaaaaattagaagttgaactcttgtcttttcaggcaggtgtcaattttggggttttgttttgatttttggtttttgacataaagtactttagttctgtgatgtataaaccgtgagtttctgtttttctcatatacctgaatactgtccatgtggaagttaccttttatctttaccagtattaacacataaatrgttatacataaatacattgaccaccttttattactccagctatagtggggaaarctttcttttcataactagctaatgttttaaaaagtattcttttagtttgattgctgcatatttcagatatttctttccttaactaaagtactcagatatttatccaaacattattgctatgggatttcctgcagaaagacttgaaggcgtatacaggaacaatattgatgatgtagtaaggtaagaatgctttgattttctatttcaaatattgatgtttatattcatgttgtgttttcatttagaaaagatttctaagccacagaaaaagatactttgtgatgtaaactattattgtagtgctctataatcattttttggcttaccgtacctaatggacttcagggggatacagttcatttgataagaactgaccttatacattacataatcaggtacttatgtgatatcatttcctggactccataaaatgctggtcaccaggtttaatacctggattccattacagtgtgatttttgtcttatttcatagttggggattaggcttaaaatcctagagtggatttattcagttaaatttattcacactaagatgtagatgactaatactgtatatttttatgtagaccaaattttaaggtaccactgtgcatatgtataccaactacctgaagaagtatttggttggtacaagagatatagaaaggaatcgctgggtgtaccaaggctaatcagttttataattttgcataattttctaactgcgattatcatttagtttagaacaatttatttctcaaggcccatgtaaatattatttttaaaatatacagtcttaagaattcatggcatattttatgaaaggaggaattcatgtctgatgtgcaaatagtcttaasatattttctaatttcagagcaaaaatatatatgtatgaataaattaactgtaaattgtcagtaggaaccttaagaattcgtggcgtattttatgaaaggaattcatgtctgatgtgcaaatagtcttaacatatttgctaatttcagagcaaaaatatatgtgtatyaataaatcaactgtaaattgtcagtaagaaccttaatggctttaaaagttaaaatttcaggtcaagcattgtggtgtgctcctgtagtcccagctacttgggaggctgaggtgggaggatcacttggcttgaacccccaggtagagggtagaggccagtctgggtaacacagcgagaacccatctcttaaaaaaaaagtttaagttgtggattatttcctttacactctttcattagtatctttcctggagactttcaatttaaatacttggtgcttatgacaattagatgttaaaatggatgggaaagtactttgtaacttataaagcattatgcagatgtagactccttttataatagttgtgtaagtatataagacaacctacattcttcatgagctagccataagttttagcaacttgctttgaaccacggtagatttacaattttctgtagtattgagttgtgttcatttagaattttgtaatatttatattgaaaatcaaatttttgtacctacaaaaactacaaaaaaatccccctagtttttatagtttctattaaaattatagctggtacatagggatgccagaaggactgtttaagaagctgaaaatagagaaatgaatttatcttctcatagttaggcagggcacagtagaaggatgcttaacattgcaagctgatgggaacagyaggttgatatagcttgtgataacacttctaaagaaaaagcaatgagccatagaaaaaagaaaaagatacattttgaattaaggaagatggtgaatctgggaagtgagcagtacagtcaccagacgtgtatcctctcctatggtacagaagtgtttattgggtctctttatggcctgcatgatatatcccacaagatgacctacttcacattattttaattctgtattcaactaagcactaattcaacccagccagattagtactcataccaaaaaagagtgaatactctgaatagagggcaggttttctgattatggtgagaatatctttgtggtaaattaatctggtgtgctagtttttacgttggtctcttctcagtgtcgttagtcactgaggctgattgatcatcttttaggttactgataaagttcctgtacagctgattttcagaccttagattgcaataacttcaccaagaaaatacttcattgggaagcattttggtccttccatttgattcataactcttacctttatgcctctgaaggaaaagatttatacattcagcttgtaattagtaatcaagactgaggtttagtctatctagcttcacaatctatctagtttgttttgtctagccatatgatttcttcaaatatgccatttcttaaaaaaaaatgttttatgtatcccgattaatatttagccagtggttcttttagccgatggatcttgtcacctcttatgmtactattaatagcatgtcaacatgaagaattatctgctgaatataatagctatgctgkccttgtttccttttgtctcattcttttttgattgggggataattggccaataaagctttgatagcctctattgcccaggcccctcctcttcttttatgagagaaaggatgaacagtgaccagaaataaaggtattgtttttttctatcaactaaaatggaaataaataattcctaagtaatttgcctgttaggattaaagtctccaagagaatggctgtgcctagtacctaagtgattaatttccttgattggttcacattatattgaggatattagtaatcagtagtgattccttttttggttcaaagatgatagtgtcacagtgaaaaatgtttttaaaatttttgtatacttaatttttctgttaacgaaagtattttcagttggatttttgtttgccctctctattagaatgcccaaagaatatttaaaattttccttttctcttatactgcatatttttcctgtgatttttccccaaacggaaaatactctgcagagattagactttgttattgttgtactacatcattgctttgactaaaataaactcagattgcaaataccttcaagcttacattgctcagtatttttttttttttttttttttgagacggagtctcactcttgtcgcccaggctggagtgcagtggtgccatctcagctcactgcaacctctgcctcctgggttcaagcgattctcctgcctcagcctgcggagcagctgggattatagatgcccgcccccacgcccagctgatttttgtatttgtagtagagatggggttttaccttgttggccagtctggtctcaaactcctgacctcgggtgatccatctgtctcggcctctggaattacaggtgtgagccgccacgcctggctaaattgatcagtattatttaactttgagggatatgatttgttatggaatgmgaagttttatacttgaggtactcagagtccttttgagacaaatatttaacttctccttttgaggttaccgcctacgattgggaattaatgtaaaaaataagccaaaagaaagtgagggaaaagtgaaccaagctgtaatttttttactcttttttattgttgttgttattgttgctgttttttactatcttgattgcaacagtttggcttatatatatagcatttggaattgacagtaagaaagccacatctcatagaagctaactattcccaaattgtttttttcttcttttcctcttactactgctgttttcctcctttcttgctgctaagctcttgtcctgacatgctggtaatatgaaacagtgttttattcagataattgattattctgtaatatgtatgttaatcttttttattacactttaagtaatagggtacatatgcacaacttacagattcgttacatatgtatacatgtgccgtgttggtttgctgcacccattaactcgtcatttacattaggtatttctcctaatgttatccctctcccaaccccccaccccaggacaggcccyggtgtgtgatgttccccgccctgtgtccaagtgttctcgttgttcagttgccacctgtgagtgagaacatgcggtgtttggttttctgtccttgcgatagtttgctcagaatgatggtttccagcttcatctatgtccctacaaaggacgtgaagctcatccttttttatggctgcatactactccgtggtgtatatgtgccacattttcttaatccagtcagtcattgatggacatttgggttggttctaattctttgctattgtgaatagtgctgcagtaaacatacgtatgcatgtgtctttatagtagcatgatttataatccwttggatatatacccagtaatggaattgctgggtcaaatggtatttctagttctagatccctgaggaattgccacactgtcttccacaatggttgaactagtttacagtcccaccaacagtgtaaaaatgttcctgttcctccacatcctctccagcacctgttgtttcctgactttttaatgatcgccattctaactggtgtgagatggtatctcattgtggttttgatttgcatttctctgatggccagtgatgatgagcattttttcatgtgtctgttggctgcataaatgtctataaatgtcttcttttggaaagtgtctgttcatatcctttgcccactttttgatggggttgtttgatttttttcctgtaaatttgtttaagttctttgtagattctggatattagccatttgtcagatgggtagattgcagaaattttcttccattctataggttgcctgtccactctgatggtagtttcttttgctgtgcagaagctctttagtttaattagatcccatttgactattttggcttttgttgccattgcttttggtgttttagtcatgaagtccttgcccatgcctatgtcctgaatggtattgcctaggtttgcttctagggtttttatggttttaggtctacatttaagtctttaacatttaagtctttaatccatcttgaattaatttttgtataaggtgtaaggaaatgatccaatttcagctttctacatatgactagccagttttcccagcaccatttattaactagggaaccctttccccatttcctgtttttgtcaggtttgtcaaagatcagatggttgtagatgtgtcatgttatttctgagggctctgttctgttccattggtctatatctctgttttggtaccagtaccatgctgttttggttactgtagccttgtagtatagtttgaagtcaggtagtgtgatgcctccagcttttttctttctgcttaggattgtcttggcagtgcgggctcttttttggctccatatgaactttaaagtagttttttccaattctgtgaagaaatttattggtagcttgatggggatggcattgtwtctataaattaccttgggcagtgtggccattttcacgatattgattcttcctacccatgagcatggaatgttcttccatttgtttgtgtcatcttttatttcgttgagcagtggtttgtagttcttgaacaggtccttcacatcccttgtaagttggattcctaggtattttattctctttgtagcagttgtgagtgggagttcactcatgatttggctctctgtctgtctgttattggtgtataagaatgcttgtgatttttgcacattgattttgtatcctgagactttgctgaagttgcttatcagctgaaggagattttgggctgagacagtggggctttctaaatatacaatcatgtcatctgcaaacagggacaatttgacttcctcttttcctaattgaataccctttatttctttctcttgcctgattgccctggccagaacttccaacactgtgttgaataggagtggtgagagagggcgtccctgtcttgtgccagttttcaaagggaatgcttccagtttttgcccattcagtatgatactggctgtgggtttgtcataaatagctcttattattttgagatacgttccatcaatacctaatttattgagagtttttagcatgaagggctgttgaattttgtcaaaggccttttctgcatctattgagataatcatgtrgttttttgtctttggttctctttatgtgatggattatgtttattgatttgcgtatgttgaaccagccttgcatcacagggatgaagccaacttgatcttggtggataagctttttgatgtgctgctggattcggtttgccaatattttattgaggatttttgcattgatgttcatcaggggtgttggtctaaaattctctttttttgttgtgtctctgccaggctttggtatcgggatggtgctggcctcctaaaatgagttagggaggattccctctttttctatgaattggaatagtttcagaaggaatggtaccagctcgtctttttacctctggtagaattcggctgtgaatctgtctggtcctggacttttttcggttggtaggctattaattattgcctcaatttcagagcctgttactggtctattcagggattcaacttcttcctggtttagtcttgggagggtgtatatgtccaggaatttatccatttcttctagattttctagtttatttgcatagaggtgtttatagtattctctgatggtagtttgtatttctgtgggatcagtggtgatatcccctttatcattttttattrcatctatttgattcttctctcttttcttccttattagtcttgctagcagtctatcaattttgttttttaaaaaaaccagctcctggattcattgattttttttttgaagggttttttgtgtcctatctccttcaattctgctctgatcttagttatttcttgccttctgctagcttttgaatttgtttgctcttgcatctctagttgttttaattgtgatattagggtgttgattttagatctttcctgctttctcttgtgggcatttagtgctataaatttccctgtatacactgctttaaatgtgtcccagagattctggtacgttgtgtctttgttctcattggtttcaaagaacatctttatttctgccttcattttgttatttacccagtagtcattcaggagcaggttgatcagtttccatgtagttgtgcagttttgagtgagtttcttaatcctgagttctaatttgattttactgtggtctgagagacagtttgttgtgatttttattcttttacatttgctgaggagtgagtgctttacttccaactatgtggtcaattttggaataagtgtgatgtggtgctgataagaatgtatattctgttgatttgggatggagagttctgtagatgtctattaggtctgcttggtgcagagctgagttcaaatcctggatatccttgttaaccttctgtctcgttgatctgtctcatattgacagtggggtgttaaaatctcccgatattaactgtgtgggagtctaagtctctttgtaggtcactcaggacttgctttatgaatctaggtgctcctgtattgggtgtatatatatttaggatagttagctcttcttgttgaattgatccctttaccattatgtaatgcccttctttgtctcttttgatctttgttggtttacagtttgttttattagagactaggattgcaacccctgctttttcttgctttccatttgcttggtagatcttcctccatccctttattttgagcctgtgtgtgtgtctgcatgtgagatacatctcctgaatacagcacactgatgggtcttgactctttatccaatttgccagtctttgtcttttaattggggcatttaccccatttacatttaaggttaatattgttatgtgtgaatttgatcctgtcattgtgatgttagctggttattttgcccattagttgatgtagtttcttcctagcatcaatggtctttacaatttggcatgtttttgcagtggctgataccagttgttcctttccatgtttagtgcttccttcaggagctcttgtaaggcaggcctggtagtgacaaaatctctcagcatttgcttgtctgtaaaggtttttatttctccttcccttatgaagcttagtttggctggatatgaaattctgggttgaaaattcttttctttaagaatgtagactattggcccccactctcttctggcttgtagagtttcagcggagagatctgctgttagtctgatgggcttccctttgtgggtaacccgacctttctctctggctgccctttacattttttcctgcatttccaccttggtgaatctaacaattatgtgtcttggggttgctcttctctaggagtatctttgtggtggtctctgtattccctgaatttgaatgttggcgtgccttgctatgttggggaagttctcctggataatatcctgaagagtgttttccagcttggttccattctccccgtcactgtcaagtacaccaatcaaacgtagatttggtcttttcacatagtcccatatttcttggaggctttgttcatttctttttactgttttttctctaaacttctcttcttgcttcatttcattcatttgatctgcaattactgataccctttcttccacttgatcgaatcggctgctgaagcttgtgcatgcgtcatgtagttctcgagccatgattttcagctccatcaggtcatttatggtcttctgtacactgtttattctagttagccatttgtctaatcttttttcaaggtttttagcttccttgcgatgggtttgaacatcctcctttagctcggagaagtttgttactactgaccttctgaagcctacttctgtcaactcgtcaaagtcattcttcatccagctttgttccattgctggtgaggagctgtgatcctttggaggagaagaggcactctgggttttagaattttcagcttttctgctctgttttctccccatctttgtggttttatctacctttggtctttgattatggtgacctacagatggggttttggtgtggatgtcctttttgttaatgttgatgctattcctttctgtttgttagttttccttctaacagtcaggtccctcagctgtaggtctgttggagtttgctggaggtccactccagacactgtctggatatcaccagtggaggctgcagaacagcaaatattgcagaacagcaaatattgctgccggagccttcctctggaagcttcgtcttgggggcacccggctgtatgaggtgtcagtcggcccctactgggaggtgtctcccagttaggctacaagggggtcagggacccacttgaggaggcagtctgtccgttctcagagctcaaacactgtgctggtagaactactgctctcttcagagctgtcagagagggatgtttaagtctgaggaagtttctgctgccttttgttcagctatgccctgcctccagaggtggagtctacagaggcaggcaggcctccttgagctgtggtgggctccacccagttggagcttcccaaccactttacctactcaagcctcagcaatgatggacgcccctcccccagccaggctgctgccttgaagttcaatttggaactgctacgctagcagtgagcaaggctctgtgggcgtaggacctgctgagccaggcacgggatataatctcctgttgtgccatttgctaagaccgttggaaaagcrcagtatttgggtggcagtgtcccaattttcccggtatagtgtgtcacagcttcccttggcttggaaagggacatcccccgaccccttgtgcttcctgggtgaggcaatgccccgccctgcttcagctcaccctccgtgggctgcacccactttccaaccagtcccagtgagaagaaccaggtacctcagttggaaatgcagaaatcacctgtcttccgcgtggatcatgctgggagctgcagacaggagctgttcctatttgaccatcttggaatgccacytttttttttttttttttttttttaaggcagtttcttgctctgtcacccaggctggggtgcagaggcatgatcacggctcactgcaacctctgccttctgggctcaagtgatcctcccacctcagcctcccaagttgctgggaccacagccacgcatcaccaggcctggctaatttttgtgttttttgtagagatagggtttcgctgtgtttcccaggctggtctcaaactcctgcgctcaagcgatccgcctgcctcagcctcccaaagtgctgggattacaggcatgagccactgcacccggccaatatgtatgttaatctcatccctcaagctgatactgaagtttttcaatttatgttatttggtgtaaatctaggcagtctttaacaaaattggtgcttcatgtgtttaagaggcataacttaagaattgtttgtttcttataaatcaggagaatggaggtttaatagaggtgaactgtctttctcactgcagaacctttaatatgccactatgcattgtaaatctcccaagagtgagattctagtatgatgcttttcttttccttttctgttctttccctttccctctacctcctttttcttttctttgttggtggcatgagtcctatattataaggaaatgcttttagagtacagtcttctgatatatagtgatttttgaaaaagatttatttattgtcttgttcactgtgagctttttcccccatgtataagcagctgtgtaatagattcaagagcaccccctcgcccctttttttttgagacagagtctcgctcggtcactcaggctggagtacggtggtgctgtgatcatggttcacctcgacttctgggctccagcgatcctcccacctcatcctctcaagtagctgggaccacaggcgtgtgtcaccgtacatggctaatttttctatttttagtagaggcagagtttcgccatgttttccaggctggtctcgaactcctgaactcaagcagtccacctgtctcagcctcccaaagtgctgggattacaggcgtgagcctccactcccagtctcaaatattcttttgaaatatttgaaatatgttgatctctcagtctttcaaccttagttgtatgttgattttcaataaaaaggaagtatttgttgccctaacatcagtattggctattcagtttaaaaaaggagttaaagagatgttatttataggcaggcttcaaaagaggaaagaatgatcagtttcattctctgtttctagcatattctgactccttctctcatattacctcgtttttcccacattttttctttaataaagtgaaattcacataacagctaaccattttaaccacggaaagtgtacattccgtggcatttattaccttcacagtgttacctctacctttatcaagtttcaaaacattttatcaccccaaaagaaagccctgttcttattgggtgcctcttgcttttttttttttttttttttttaaatcttgagacggggtcttggtttgtttcccaggttgtagtgcaatggggcgatctcatctcattgcaacctctgcctcccgagttcaagcaattctcctgcctcagcctcccgtagctgggactacaggcacgcgccacatgcctggctaatttttgtatttttagtagaaacgtggtttcaccatgttggccaggctagccttgaactcctgaccttaggtaatctgcctgccttggcctcccaaagtgctgggattataggcgtgagccaccgttctggccacctcctacttctttcattagtcttaattccttagtggatttgacagtgtttatattatctacaccaatgcatttttttgtatgttaataataggagatatttattgggcatttatttacatacttatttgcatgtgtaactgttgtatagccagtttatgtatataatcttactaaatctctacagtaaatctatccccatttcatagatggtttaaaagaagttaacttccccaagcattacttttagtaagtagtgagactgaaggttgagttctggtctgtcagattccgaagttgtttccttaggaaccatattatcttgtgtacaactcttgggctaatcttgttaatattctttatttgacctcacactgttgattcataccatgtttaaaattgaaatacattacctatatttaaaaattgagacctcacataaaaagctatatttctagctgcttttgaaatttcgaaggatcttccaacacttggctgacattcctgcgtgacaaaaatcagctggagctgtgtaatgtccgacctgtctctgtcaatgaacagattattcattgtcatttctcatctgtttttgagattgtaactttgattctgtataactcatagaattagtagttagacctatatatgttagttattacattatttgtatatgtacagactgctttagacaatattgtagtgttatatgttaattttatcaattaaaatgtgctataggatcattgtagagatcttgtctctaattaacaggattcataaagagaaaacaaaggagagaaacatccagattgaaaagacctacatagtgccaagcacaataaaagaaaccctatactaggcaaattattatgaaatttgttttaggacaccagaaataaagataatatctaaaaactttttagaatcgcctaggagggattaggaatatgaatagcatctaacttgttggcagtagaattgaaggtagaaggtggtaaaacatcaccttgaaagttctgcattcagcctagaattctgtatccagttaaaccatcaatcaagtgtgaaagtagggggaaaaactcaaggactaaaaaaatgtgctcatgaagaacattttttttggacattacccagaagatgtggttcaacaaaacaagggaataaaccaagaaaggaaataaaagagcttcagtaaacagagaatcccactcagaagcaacaaagaagaaagtcccaggatgacagctgtgacacaagctgaaaagttaccagttttgcttggagcaggagattagaacttccgggaaaataatcaaattgatagatggatgttgaaatatttggagaaaaatgtaatggattcttgcaaaactgagcaaattagaaaaaggaaacaattattagcattggtggtttgagttaacccaaaattgtgatgttgctattttaggggaattaagataagtgaaacacgtatggaatactgctagttttgtaagtctcctttaccatggcaggacatctgtagttaataaatctgtaagaagcagtattaagaataatattttaaaatacctaattaaataggaggaaaaagaatccgagtagttgagggtgattgcatctggggagaagcaggaataaaggtttgaagataaatagggccagagatgagtaattttgttactgtgataatatattttatatatatgtgtatgtgtgtgcgtgtgtatatatatatatgagatatatctcatatatatgagatatatatgatatatatatgatatatatgatatatatatataaaacatacagttcagtagcattaacatctagcattcagtacatttacattgttgtgcaattgtcaccactgtccatctctagaactttttcattatcccacactgacataccacacccattaaataataactcctcattgctcctcctgttagtaccaaccattgttctactttcatctctatgtatttgactattctaggtacctcgtataagcggaatcacgtgatatctttttgtaactggcttatttcactaactatcttcgaggttcatccatgttgtagcagttgttagcatttccttccttttaaaaggccgaataatattccattgttatgtatataccatattttgtttatccatttattcatcaatagacacttttggctgttgtgaataatgctgctatgaatatgggtatgtaatacctgtttgagtatctgctttcatttcttttggatatgtacccaaaagtgagattgctggattgaatggtaattctatatttaaatttttgagaaaccaccatactgtttgatatactggctgcccaattttacattaccaccagcaatacactagggttccgaatttgccacatcctcaccatcgtgttgttttgtttatgtttttttttaataatagccatcctaatgggtgtgaagtctcattgtggttttaatttgcattttcctaatgatcagcgatattgaacatttgcacatgcttatttggtcatttgtatatcagctttggagcaatgatgtctcttgaagccttttgcccatttatgaattgagtagtttgggatttttaaattgtgttttagaagttctttgtatactctggctgggcacggtggctcgtgcctttgggaggccgaggcaggtggatcacgaggttaggagttcaagaccagactggctggtatagtgaaaccccatctctactaaaaatacaaaaattagctggtgtggtcgggcgtgatggtgcacacctgtagtcccagctgttggggaggctgaggcaggagacttgcttgaacccggaaggtgggggggttgcagtgagctgagattgtgccactgcactcagcctgggtgacagagcgagactctgtctcaaaaaaaaagaaaaagaagttctttgtattctctgaatattaatcccttattggatatgttatttgcaaatattttctcccataaagaatgggttactttttcactctgttgattgtttcctttgctgtgcaggagctatttagcttgaaaaaatccaacttgtctgttttcttttgttgcctgtacctttggtgtcacattcaagaaataattgccaaattcataccatgaaactttcccccatgttttctcctgaaggtttttatagttttagctctcacatttaggtgtttgatccattttgagttaaattttgtatataatgttatgtaagagtccagcttcacacttttggatgtgaatatctagttttcccagcattatttgttgaaaagagtgtctttttccccattgaatagtcttggcactcttgttgaaaattatttgacaatagatgcaagggtttatttttgggctctctcgactattctgttagactatatgtttgtttttttatgtcaggaccaccctaattttagtactgtagctttatagtaaaatttgaaaccaggaagtatatgtcttgtgtatttatttacttattttttgaaatagcatctggctctgttgcccaggctggagtgcagtggcacaatcttagctcactgcaacctccacatctgaggttcaagcaatcctcccacctcagcctcctgagtagctgggattgtagacacataccaccatgctcagctagtttttgtatttcttgtagagacagggttttgccatattgcccaggtgggtctcgaactcctgagcccaagcagtctgccctcctcagtgtcccaaagtgttgcgattacaggtatgagccaccgtgcatggccccaacttcttatatttcaagatggttttggcccttcagggccctttgtgagttttaggatggattttttttttaacttttaagtttaggggtgcatgtgcaggtttattacataggtaaatttgtgtcaaggtgttctgttgtatagattatttcatcacccaggtattaagcctagtacccattagttatttttcctgagctcgcctcctcccacctggatttttttttttatttctaccagaaacattgttgggattttggtagggattgtattagtctgtagattgcattgaatagtactgacatcttaacaatattaagtctttaaagccatgaacaccagatgtctttccatttatttacgtattctttcttttctttcagcaatgttttgtaattttcagtgtacaagtattttacctccttggttaagttaattcctaagtattttattcattctgatgatcttataaatctgttttcttaatttcctttcctaattgttcattcttagggtatagaaacacaactgattcttcgcacattaaatttgtgccctgcttcttcgcgggtttgtttattctttttttgtgtttgaaatccttgaggttttctgcatataagattatatcatctgcaaatgagataattttacttgttcctttccaatttgagatgatttttattcattttcttaatgctctctcatacattcaatactatgttgaatggaagtggtgaaagcaggcatcctgtcttgtttctgaccttataggaaaagctttcaattctttgccattgactatcatgttagctatgggattttttttttccccccagatagagtctcgctgtgtcgcccaggctggagtgcagtggtgcgatctcggttcactgcaccctcctcctcccgccaggttcaagtgattctcctgcttcagcctcccaagtagctgggattacaggtgtccaccactatgcccagctaattttcgtatttttagtagaaacatggtttcaccatgttggccaagctggtctcgaactcttggcctcaagtgattcacctgcctcggcctcccatagtgctgggattatagtcagccaccatgcctggccactgtgggatttttatatatggccttcattatgttgtggtaatttctttttattcttagtttattgagtgtttttatcataaaatcttgttgaattttttcaaatattttttctgtgctagttgagatgaccatgtgatttgttttcttctttctattaacatgatatattgtttttcatatattgagccatttttgcatcccaggaataaattttacttggtcttcgtgtataatccatttaataagctgtggaattcagtttgttggttctgtgttgaggactttatatcaatgttcctaagggctactggtctatagttttcttttgtagtttctttgactttgctatcagggcaatgctggcctcattgaatgtgttaggaagtgtttcctcatccatttttggcaaaactttgggaaaaaacgatgttctttaaatgtttgatagaattcacagataaaaaaatcacatctagggcttttgtctggaatttttttattgttattattgattcagtcttgttactagttataggtctattcagattttctttttgtgtgtgtgattcagtattagtacattttgtacttctcgttatttctccatttaatctatattatctaatttgttggcatacaattgttcatagtactgtcttctcttttttttaaacttctgtgcagttgatactaatgtccctacttttatttcagattttagtaatttgaatcttctttatcttaatacaggtaaagctgggtcaattgttaaaattttttcaaagaaccagtttttggtttcattgatttttctctgttatttttctattatttatatcctctctaagctttgttatttccttcatcctgctagctttgggtttattagtttgttctttttctagttccttaagatttgaagttggattattgatttgagatcgttttcaattaaatgtgtacaactacaaatttccctcttaggactgcttttgctgttctgtaatttttggcatgttgtgtttttttgttttaatttatttctaagtattttctaagttcccttgtgatttcttctgcgtttaaccgtgtattttttaatttccacagttggtgaattttctactttttcttcagttattgattttattgattttcagtggcatcctgttgtgatagaagatactttatttggttccctgttttttttttaaaacagagtgttgctctgtcacccaggctggagtgcagtggtgcgatcttggctcactgcaacatccacctcctgggttcgagcaattctcctggtctcagcctccccagtaggtaggattacaggcacatgccaccatgcccagctaatttttgtatttttagtagagacagggtttcgccatgttggccaggatgatctcgaactcctgacttcaagtgatccacccgccttggcctcccgaagtgctaggattataggcgttagccaccttgtctggcccagatcctctattttcttgcctatattctgactgggtgtttttgtccattattgagagtagggtatcgaagtgtccagctgttatttcagaactgtctgtttaccttcaattctgtcaattttttgcttcatataattgggtggtctcttattaggcatgtaaatgtttttgattattatatcttcttgctatattgacacttattgatgtgtaatatcttttttgtctcaaccttgttttgatttagtttgtctaatattaatgtagctacctgcactctcatttggttattacttgtatagaatgtctttttacatcccttatttgtgtctttggatctgaaatgagtctcttgtagacagcatatacaatctcttgtagattgtgtttttcttatacattctgtcaaactctgccttttgattgaagagttttatcatttacaattaaagtaattattgataaggatttaactgctgccattttgctgtttattttctatatgccttacagcttttttgtccctcatttcctgccttactggcacttgtgtttagttgatattttgtggtgaagtgttttaatttccttgttatttccttttgtttatattctgctattttctgtgtgtgtgtgtgtgtggttgccattgggggtcacatttaatgccctaaagttataacactgcaatttcaatttataccaatttactttcaatagcatacaaaaattcagctcataagattcagtccctgctcccttccagttattgatgtcataaaattacatttttatgtattgtgtgtctaaaagcgtagactaataattgttttttaatgcagtagtgtcttaatttgtggaaaacaaaaagtggagttgtaaaccaatgttacaataatgctagctttggtaattgctcatgtatttatcatttctcagatctttatttcttaatacagcttcaagttactgtctagtctccttttatttcagcctgaaagactcacttcagcgtttcttgcaggacaggtctggtgataatgaactctctcagattttgttaatctggaaatgtcttaatgtcttcatttttaaggacatttttgctggatatagtattctcagttgacaggtatttgtgtttatttgtttgtttcctttcaggattttaaatatatcatcccactgccttctgtccttcaagagttctgatgagaaatctgctgatattgaggatccctttgtatgttacaagttgcttctctcattccatgttcaggattctcttttttcatagtttgattataatctatctcagtttttcctacttggatctctgagtttttcctacttggagttaattgagcttcttgaatatttatattcatgtctcatcaaatttgggaagtttttgattaatatttcttcacataatcttttttgccccttttctctctttttattctgggattcccagagtgtgtatgtgttggtccacttgatgatggtgttccacaggtgtcttaggctcttgtcttcaattttccttcagttttttttttctgttcctcagacacgtggtattttcagytgttctgccttccaagtttactgattcttctgcctgcccaaattggcttttgaattcctctagtaaatttttatttcagtttttgtacttttcagctccagcatttattttttgatttttttatgttttctctttattgatatttcaattttgttttttgacattatccatatcttcctttagctttttgagcacctttcaacatttgttttaaagtctatgtctagtaagtgtctgccatctgatcttctcaggcacagtttctgttaatttatttttttccttttggcctatacttaatgttttgcttggggtagtttttttttttggtatgctttgtgatttttgttgttgttgtcaaaaactggaatttgaatcttaaagagtggtaactttggaaattagatttttctcttttctctaagatgtgctattttgtttggtttttttatttgttgtagagtatttctatgctgggtgtaatcttaagatcttctcggcctgtgtttttccctgggcatgtgtagtgactttctaaattgccctatgtatgcagttcttttgcagtagtatcctccttaaatgtttggctcctaaaaggcaaaataaataaataaataaataaaaattaaaaattaaaaataaatcaaaggggtgaaatagctctggatctttaaatccctggagcaattttttcagccaatggcagttaaataatgatagtctgcctctgtgtcacattttgatcagaagcagcaattagcaatcagaacacagattcctgatatttggagggcaaggtctttgttgccaaccttgactcttacaaactgtgtgcagggtgctctgggaacatgtgcatggttgcctgctttgagagtgggtgatgggtagccgcgacggcacaaagagctgaaattgactcaaactaactgatttaccattcaagtctttccttagaaactgaaaacctgaatagactccagagttccagaatcacagattctgcttacagtcgtctaggtggggagatgggttcctggtacttctgattctgccatctttctttgactaattttttttttttgttcttgagatggagtcttactctgttgcccgcccaggctggagtacagtagcatgacctcggctcactgcaacctctgcctcccgggttcaggcaattctcctgcctcagcttcccaagtagctggaattacaggcgtgcaccaccatgcctggctaattttttgtatttttagtagagacagggtttcaccatgttggccaggctagtctcgaactcctgacctcaggtgatcaacccgcctcagcctcccaaagtgctaggattacaggtgtgagccactgcacccagctcttagacaaattttttattccaaactttttttattttatcatttgaaaggtatatgtttattattttgtcaaaaataattttaaaacgtattcttgaagcttatttagatctgtttcataggaactgtgaagaaagtaaagaatttaaaaaatgaagacagattttctcaccctgcttatgggtgcttctcgtgctagccttttgcaagtgtcgggaagtgtaacctgcaggaggcatcagggctttgggcctgcatggtctgagtgctgccctgtgagtttcagaaggcgcagcaacctgtatacctgaaagccatctctgctggggcaggtacctagtgtccccrcctacctgggtcgtagtcaggccctgggcaagcctgctatgcttttccttccctaatccctcaggggtgggatagagagcacagtggcctcccagggaggtagaagctgctccagactaacaatcagagctgccagttcttaatccccaagaccgccagacttcacaaagacataccgaggtctgtgctgtcagtgccccactactacactcccttaagtagccccacattcttgtgcttgtttcttttttctgctctctttccttgcccaggtaagaggtctgcccataaggsatattttgcagcatgtgaagctttttaaaaagttaggcttattgaagtataatttacacacaaagtacaaaaaaaaaaagactgtgttctcaaatctgtgagtcattaatgggtttagatgtttatatattgaaattattggaagtaaggtatgtttatattagaaagatttgtagtctagattatccaagttttgggagtattacctctctgcttttgtttatctacttttttagtctctactttccaagtatctataggcaaattttcccatttccctttggaaagtgctgttttcttgctttttttccgcctttccattgtgtcagacttataaggcaatcagccaactgtgggcatgaaatccttgggaggaaagagaaggaagtgggaggggcagccatggtgaatgtttccctaagttatagtcaagttctttgagagaacataacctcatcccctttttaaactgttgtaatactttcttttaaatagattgtttattctcctgcaagtctcacagttgttcacagtggtaggtaagaaatcataaagttcaaatattaaagggagctcacaaaagagcatggtttcaccagccctcactaaaaacaaaattatgggaaaatgctgtaaaagaaaccagaattcttggttgcaaatgatagaaagtgactctgatttacctaatcagaaaggaatttttaaaaaagtattaggtaggtggaagctaagggaagcaagacatggccccaaggtttcaacaggagcaatctgcttaggactttgctgcttggacacttggtgtaatagctgctgccactatgcctcgaaactggtgactctgctcattaactcacctcctctggtgatctctaggaataatctctgactctcctgtaccttgtcctcactaggattcggtatccacggcaaaaagatctattaatagttggtatcaggcctgtacatgtgttaagagaaagatgaggaaagaagtatctgcttctaatctcttgaaattatctccaaattgaaatggtattttggttgcctaacagcctgaagatgacaaatatcccctacaaatttctcctattttaccctcttcctaactatatctgtaatttaaagtttcacatattcttttgaaaattgttttcattgtttacccactttttaagaaaagcaaatgggaacatactaccactgtttggcccctttcaaaaattttatatctgaggaatcttccatattgttgtggacatctacctacctgattcttttattaactaccttttatttcattttatgatcatgctatcattaataggcccctatgatgaatatataagttgtttccagttttttttttgtcattgagaacagttcacatatgtatcttgttgtcttttccaagtatatctttaaggcaaattcttagcagtggagttgctaggtccattgcgtctatggtttaaactagtgccttcaaaaatggtattttatatactcactgtttaagagtgcttcttccttctatccccactaactttggcaaactgaatagtttcaaactttaactttttatagcttgttggcaaaaaatggtatcttgttatttgatcgtgtttttttaattgtgaggtttagcgactttttgatgtattggtcttatgtactttctggtgtgtgtgtatgtatatactgaccctattttcaacttatttttcttttagtttgtttgtattttccttaatgattttcaggaaaccaattttattctttcttcagacagttgtctaatgttctgcttctcttgccatttgaattttgtgactacaaaattcagatgaaacaataatagcataaagaacttggtgggttatcttttgttttgcattattgattgtttattaagaaatattctttaaaagtcaccttgcttaaattagcaagtaggaaatgctttcaataaagagaactgtcatgtacccactactccttacttactgaatcatcttcttttggatagagaagataaaagtgaaaagggaatttaagagttcctgcctttttccttgtctttagcattatatagctgtttaatgtgtgggagtctaatttcttttttctttcttgagacaaagtctcactctgttgcccaggctggagtgcagtggcacagtcttggctcactgcaacctctgcctcccaggttcaagcaattctcctgccttagcctcctgagtagctgggactacaggcatgtgccaccatgcccggctaatttttgtatttttagtagatatgggacttcaccatgttggccaggctggtcttgaactcctgacctctagtgatctgcctgctttggcctcccaaagtgctgggattacaggcatgagccactgcacctggcctaatttttttattgttctttttggtgtgaacattctcccctcctccaagccttttgtttttactattttcatgttcctttatatgtgctgctgttttgtttcatctgtaattatctctcatccccttttttggctattataatatatatatgtacgttttgaatctgagctttgaaggtaaattcactgcagctgtgttggttgattttagataatttgtgtatttcctcctttgtcttttttaaactggrgtcatttgtagttgtttatacagaattttagtttttaaaaccacaagtctttcattataggttgagttatgaattcatagcctgttatttaaatgaagcttttgaaatctgttttactgatctgtatcatatctaactacgccagtatttccttccttgtctgacgtgaactctaaaattatgtgaacactttctccctgtttcctggcatttccactcaaacttgttcctcattcttagttagaaatatatccagaattgtagtttctttctaatctaatgacagaagcaaattaatcaagcatggcaagaatttattggaaaactgcatgtagttgaaaatatgtttagtatatattttgacagctgtgaagtctctaatttttactgtaccttttctctgttccaattttatgctctattctaaggatgtacccatttctactacctgactagggagcatgtgtattgtatcccagcagattttttttttcatagatagatatcctttagatatctgttatccagtgtaggtagccactagccacatgtagctatcattatgtttaaatgtaaataaaataaaataaatttactgagttgtttttgctagctacatttcttgtgctcagtagctacatgtggcttgtgattactgtattaagacagcacagatacagaacattttcattattgcaaaagttctgttagacagtgctgttctatacagtgtcattctgcctctcattctaaaaagttctaattcctgaagttgatgtactctttctgttgctgtcctctagcttaatcaaaataaatttgagtctttttaaaggtaggttgcattttacatactgatatttctaaatcagaggctatttatattactttttttatattacttttaaaaattagctttattggagtataatttacatgcaataaaatctacccattttaaatgtacggttcattgacttttgagaaatacacacacacacacacacacacacacaccttcttgtaaacacacaccttcttgtaaacacaacaaccaagatttagaacactcgctttatgaaaagtttccctcatgcccatttgtagtcagtccccaaacctggtttcaggcaatctctgatctgctttctatatgctttgcctatactaggattacatataaatacagtcatatagcatgtattcctttttgtgtctggcttctttcttttagtataatatttttgaaatttatccctgttgttactagtatcaataatttgttcttttttattgctgactaatattacattgtatggatatgacatttctttattagtgtggtgggcatttgagttgttttcagtttgggtctgttatgaacaaagctgctgtaagcattcatgtgcaagacttttgtggacatatatttttgtttctgtttattcaatacctttgagtagaattgttgggtcacatgatgtagatcagttgaacagagtagattccagaaaagttcacatacacatttcttgacaaaggtgctgagattattcatgggaaaaggataatcttttaaacaaataatactggaacaatagagaaaacaaagtgaaccttgacttttatgtcttatcatatacaaaaattaatttgaagtggattgttgacctaaatgtaaaagtaaaatttaaaaatataaaacttctagatgaaaacataggagaaaatctctgtgacttttggtttaaagatttcttagacagtacatataaaattaactatataaggaaaaaatggacaaatttgactttatcaacattaaaaatttctgctcattgaaagactcaaaatgaaaaggcaagcagttttggagaaaatatttgcaatacatatatctgaaaaaggacttgaatgtataatatatacataaagatgctcttacaacttcataatgagaaaataaccccataaagagaagggcaggccgggtgcagtggctcatgcctataatgccagcacttttggaggctgaggtgggtgaattgcttgagcccaggagtttgagaccagcctgggcaacatggtgaaacccagtctctacaaaataaaaaaatacaagaaattagctgggcatgatggcatgcacctgtagtcctagctgtttgggaggctgaggtgggaggatagcttgagcctgggaggcggaggctgcagtgagctgtgatcgcaccgctgcacgcttgcctgagcaacacagtgagatcctgtctcaaaacaaacaaacaaaaaaaaaaacaaaaaatggaaacagaaattttacaaaagaagatatatagatggccagtaggcatatgaaaagatgtttaaaatcagtcatcagggaaatgaaaatttaaacgtaatgagatagctcatatttactggaatggctcaaaaagggcttacaggaattggcaaagacatagattaactggaactcttatgcatgttggttagagcacaaaatgatatgatttcttgggagaaatatttggcagtttttaagattatttttgatagccttctgaatttcttagtgagttataggtcagttctgccactgtttctttcttttctttctttctttctttccttccttcccttccttcccttccttgcctgtcttgcctgccttccttgccttgcctgccttgccttcctttcttcctttcttccctttcttttctttcttttctttttttttttaaaggagtctcgttttgttgcccaggctggagtgcagtggcacgatcttggctcactgcaacctccacctcccgggttcaagcaattctccctgcctcagcttccccaatagctgggattacaggcgcgttccaccatacttggctaatttttttaattttggcagaggcagggtttcactgtgttggccaggctagtctcgaacacctgacctcaagtgatctgcccgccttggcctcccagagtactgggattacaggtgtgagccactgcgcctggcctggcactgtttatttcttttccctccagttttatacctatttagagagattagattttcttgagtactaggaatcactatttttgagcagaattattcaaaactgttattattttttctttaacttgaggcaatgtaggagaaagcagtactgtgcaggtgaaagttacaaacaagaacattttaaacaagatagttactttccatgtattggatacgtaacagaattaattctaataaccatcctgaagatggtcaggaggcattagttaagaattgaaatgtttggagcttgcctgtgttgatgggattaaggcagggatgatttatgtgtaaatttatgcgttagtaacagcagtaaccgctgtagttacactagggttctaagagcaaatgttgattaaacatgaatgtagcaggagtgataaggtttggctctgtgtccccacccaaatctcatgtggagttgtgatcctcagtgttggaggaggggcttggtaggaggtgattggatcatgggagtggtttgtaatggttttagcactatcaccctagagctgtctcgcgaaagagttctcctgagatctgcttgtatataagtgtgtagcacctcccctctttgctctctctcttcctccwactcctgccgcggggacgtgcttgctttcccttggccttctgccatgattgtaagtttcctgaggcctctgattaamcctttcttcttctaaaagattacccagtctcaggtagttctttatagcagtgtgagaatggactaatacaaggggaaatatatatggttaccaaatagcgaattagccatgggaaaaagtagcaaataaataattattttactttttcagatgctaatttttcttttcgtttattttaggattggtgggagctgtccaatgtccttaggctgttttccaaatgagataccaaaagctagttctccatcgggtttctcaggctgctagaagcattcattattatggttgtcattacttcgagttctgttgccgctatgcccacagtagtatttgttacataacaggtgcttgataaatatttgctaaatgaatttttggaaaatacaatctgccacacctttcttctacagtttacaatcttctgttgagatcatccgatagattttttttcttagatattgtacttttgaggcctcaaattgctgtcttttgtattttctatgtctgcagagactttccatctttcactcattgtattcattgttttttaacatctttgtacatatttatagtaactgttttaaagtcactgtctgttaattcaaacatctggttcatcttggagtctgattctattgcctgctcttttttctttgtaataggtcatgtttttctgctttgcctgtctagtaaattttaatcgtatgttgaaatgtagggagtttggattgttacttcctttaagggtgctgagtttcattttgtcaggcatttaaattgatagttgatttagtattgtcaggtttggttctctttgttaaagcaggcatttttcagatttgtcttttgtcctagggcatggtttttaacttcaaggttgccctttccaatgtctcagctaagtatctggggtgttccatgaggtctcttccactttgcctaggccagaactccagcttctcccagtattatatttcgttacctctggcgtcatctccgttatgctttcagatcctgcgcatagacagcccagcccccagccaaggacctgagatgaaatccatacaaaattcttagtcccttgctccacaaactccaacagccttagcagtctaatctcttcctgtttacctcagtgaaatctgtgttccacttgagttccatttccttctgtatcagagaagagccaccatgctgaaagcaaggggcactatgtttctttgttcttaaggatggtagcctatctgcaacaactgtagtgtgatataaaaatatataatttatgttgctgacagttacaaatactgcttgcagtactttgtaacataatttttcagattcaagttcatatactctttttttccacatcaccacacacatattttcagacttcctcctcatccttcttcttgccagtagttgtattataattcctgccagtagttacattataattttggttatatcaatattgagtttttatgggattataactagataaatgccattcatagttaagtgatagagtatattgtgacttttttcctgcatgttttattttttctggacttcacagttgtctctcttttttttaaaaaaattagttttcaatgttcttagctttaattcataaactcacccctaattgtataaatctctcaacatgtttaagcacatttggcattatatcaattttatcttttccaggtgccttctaatctgtcccagtctggactaattgttcttcctggcttgctgtatggctgtctactcaagatgtcccttcaccatcattctagggattcccttttcctctcttgtgggttagattcttcagttcttggagactgtcatcttctttcatggtttcccactcttgttttggcggagcacatctttagtaacttcctgacaaagtgtatggtttgagatttcgctgattttaaaatgcccttattatatagtcacacttgatttatagtctgtcttggtatagaattctaggstgagaagagttttccctcaaaatcagaaggttttgcccaattgttttttagctgctagtattgctgttaaaaaggataatgtcattttgattctagattcttttatgaaacctgtttcttctctggcagcttttaggatcttctgtttctttggtattcagaaatttmatgagatatgtgtgcttctattttggtcttattttcatctgttttgccaggtactcatgcaactttccagtttgaaaactcacatccttcacttttgagtatttttcttgagttatgtcttcggtttcttctcagtgttctctgtttctggaactcctaaaatatatttaacatcctgaactcttagtttttgtttagtcttctgattttcatttgtctttttattctgtatattctgttaattcctcggcttcatggtcttctagcccttcttttgcctatcttatggggttgaggattaaacagtttatatacctgaggtgcttaggatatgtctgtcatatagtaagtgcttgtgttagctgtaattgttgtttactttcataactgtcttgagggaaaggtctttggtcttgattctttgacttcttggctgtacatgaccttggacgagttatgtaatctctttgagacctacctccctcttctgtatagtgttaataagctctagctctcagatgtttgtgagggtcgaatggagtatatatgtgaaaatgtttaatacctttgtacagaattaatagttagtacgtggatctttcaaatatcaaaagttttcagtttgatgggaaaatgatgtctgaattttcagggttatttttaagagtacttgattatgactgtcttgtaaatctctatgagctaggtatacttgcactaaatgctaatgctttttaaagaagttatgtcttaatattcagtctcattatgttaggttgaagatagaagattatgaaaatattctctgaaaagctctggttttacttcagattgtataaatctgtgtaatgtaataattatttaagaatgacatgattactactctaaacccatagaaggggtatttgttggattatttattttcacttaaatggtatttgagattaggaaaaagaaaatctgtcttttggtttttcttgatagtattaatgtaatttcaaatgttagctcatttttgttaatggtggctttttgtttgtttgttttgttttaaggtttttggattcaaagcataaaaaccattacaagatatacaatctgtaagtatgttttcttatttgtatgcttgcaaatatcttctaaaacaactattaagtgaaagttatctgcttgttagagtgaggtagagttaaagatacattttaacagaattgtattcctaaaccgattaagtcaagaagtccaagagcattgttagatcatttagaaagtgtagtgatgaggtaaaacattgttggcacagattcatgttacttgatctgctttaaatgacttggcatctagcccatatttgagcccataaccgtgtggtaatttgaagtgtaattcacagtagagcttytgttaaagcactaatagcatcttccatggaggtatamttcagagtgaatataawtttgtttatcctgtgtctytagagctattgactgaaaaagctgttagggcattctctaactgtacatcacctaagttatttaaaattgctgaattaggtggcttgtcttgtctaggacagagttttaaggactgcccacctgattgatagagctagttgaccttatctttaactttttgtttttcttttgactttgggagtagagatgtgaaaaggtaaaaaggaaggaaggaagagaaaacttaactctttttgcccatgaagactgtttttccttctcaaaatattgactattttctgatttgtaaaaatcggcacataaaacgtgttattttttacttgacttttatctttcccatgtgatatctataaattatagataggaaaaatttatctgtaatttagtgatctttctagtgtgataaaacgtcagaagtactgagagtggagtggacattgatattgttactctcagtaagttttcactgatttttctcagagtcatgaaggaacaaacgtttgttaagtccttatcacttattagataacacaaaacatgttgggggggtgtgtacagaggtgagtaagatgtagctcccattctcaagtcgcttacattctaatgtaaaaggtagacaaagcattacagaagaagtaactctgctatagaaggttgcaatgaagagaacattggaaacactaattttaccttataaagaaggtttcataaaggaaggcaagtttgagctggggtgaaaaggaccagtaagggttgactttcaagccaaggagaggaggggaagtgatgttacaggccaaaggaatggcattgtaagaagcttgttggcataaaagtgtttagaatatggcagcgaattcattatcatcagattgtggtgtctgtatgttgggggtgggagagaattgtggtggcaataggcaacaagataaaagaaagtaaaasgtgttatggaaacttaatgggtccagcttacaaatgatctatgcatttaggggtctttctcttttcctgataaacctctcctacaaagagccttgttgcggataccatagtgtttctttggaggaaaataaaaactacaaagctttgtattttttgcacaactggattcagaatataagtaataaaaaaggacaagaactttcaaaagctagaagccattaaactgagtcacttcagggttagactatcagaactggggatttagaaagtctcagaatggaaatcgaaggacaccaaagacaaattcggcctttttcaaaattttattctagtttaacatattcaaagaaagggaaggaaattcttttcattcctgtgtgtagtgacttcctgctttaagaacttaggacttcagctgtactatcagtattgtaggycacttaacattattatggttaaagttggcattggagagagcctaggaacctaactgcctgtttgtttttatatttccaaccattggattcccaagttaatgaagtctgtttattagttgagggtagctcttaatgcatatattttaatgccccttccccacatggaatcataagctttcagaactggagagtacctgaaagagatcatttagtccaaccttctcattttacagatggggaatctgaggcctagagaagttaagtgagttgaacaaggtcacacaggtacatatggtagccgaccatccactgtttatgccaatattccctttacgttttgcttttttgcttgttcgttttaacctctccaaattttactgacttcagaagtttctagaactaagttatagcatgttttgagttctaatgtcactttccgatcttctttaccktttttctacctctgtttgtatttctggttctggttaagtgagtctggtaagcagcaggtgttctattttatttcttttatttttaggatagtattacatgtgatatatatgtctttgcaaacatacataatttgaagatcttaaaatatttgcactaggcatacccacatttaatagtatgttaaatcttttatagcaattatgatatacatgggtgaagaagagttcctaatatggcctttctgattaactgtatctgtttatatctgtgttttcttcaggcattcataacattaagcaaattcaggtgtactgttacttaattgaattaatcagtttgttttgtacaagtatattttatttttgttccttgttgtataatctggtaggaatggggaaggggagatagtgaataaagagatgtatacttcttgcctttgaggaatttaagttttcactgtataccaattttttaaaggtatttactatatttcagtgcatattttatttgacatactttatcattttgtggtaaacctttagctttactaattttcatctattaagttttcttttgtaagatggtgatagcttcatcaaagagagtaaagaagagacctgcctacctagctgattctatggcaaatctcacttctctggaagcttttcctgttaatcttattccttcagtttctgcctcttgtttcataaaaactcattctttaaatgcttattcatttctcttgtctcatataaaccaatatgaggtactggtatcttttgagttttagttataaggaagcataaatggttaaatttaaatggctaaaccccatttgccatttgtgtatctttaattttagtttgttgagagacttatcactaccaaaccacaaagaatttaaaagaaactgtcagtaggtataggtggaaggagggcatttatcagagattttaatttaagaagaaagtcttcatccttatcctaccaacccccattccctgagcatatttatcattactarkcccagcatatttgctcccatatttcctatgcttacctgtgaagattttcataacttttyccttgctttttactgtcactgttggttctgtgatttatgacagatactgyycttgtaggaatgctggctttgactgaaatttgttactgcttttgtatttaaaactttttttttattataagtagaattatggaacagtagtagaaaaagtttgacttttgtaatcagagatactgagcttgagttctggctctttcatttgtatactgttatttggggcaagttttttaatgctcttaagtcttagctttctcatatataaaatggagataataacagttatcacgtgattgtgaggatgaaacaaaaaaaagtggaaactctttgtaaggtgtgttcatctggttgacacttagtagtcattacttccactttccgtccatatagtcctcttaacagtaatatttgagaggcatttttattaaagcagtcttaaggagtgttcgtcaaaccacatgttctgggatcctgagaaagtaggggaagtttagagaactgaagctgcacaaaactaatgtttattttctgttgtgttgtcctgagaccagcttcttagattgtgtttcctagtcctacatctctgattccttataaaatattccattatgaattcttcactattgacaatttctccccttttatcttaaaagtaccaaagraagtgtaaaatgtgrctgtcttgtcagtcctctttttcctgtttttcatgtcartgggtatgaaattactagcaaggatgcatatatgtgcatatgtcattactaaatgcattttctttctagraaaactcaatatactaaattgtactaaaaaggaaaagcttgttttgttttgagtggtagtatgaaagttgttttattttaggtctgaccagttagaaaccaatggattgtagtttatttataattagttaaaccttcatgtgaatttggttttgaattacctttaaggtagagaagaaactatatagatgtttttcagggtttctaaatgtacaatacaggttcacaatcacttatttgaaactcttggggccaagtatgtttccattttcagaaattttagttttcaaaaggtagcacagataaatatacttttacataaacaccccagtggggtgtgggtcagtacctgaaatgaaatgttttactcttcgctctaagtgtattaaatattatgtacaatcttattacttcagatcaggatttgctgtagttgagtttgccataaaacttaagagaaaattttagatgttttgaacttttgggatattgaaattgcaggttaaggagctatggacctttatttgttttaaaatgctaagagtttattttaagtaatttttaaaaaatttgttttgcatagtagttggagttaccagggtactgctaaccacactgatatgtaagatctctttctgagccttttattgtttgtaaacatggcctgttaatcattagaaagccagtacatactaacatatcactgctattaagacaaatattagcatactctagtaatgacaagtcagcattttactattctgtattgattttacttattctttcattactctcatactgtaattaaaacttgcaatctgagagactgttgaaaaaggtgatcgttggcttttcaacagggagtaaggtctggtttaaaaaaaaattagtaagcatttggccaagtagattaacaacattcagtttttctttactgtccttatgcttttactayttttaacatatatctttttgaagaatagtttgagaattatgtatgcttaactatgagatacmgatactattgaaactagtcagttgtttataggtacttgtaaaattaaaaatatatyccaatagcatgcagatttttcatagaggaaatttgaaagcatggaagcacctgaatttacagtactctgtattagtggcatcacaagtttttaagcaaatgtattagctctaattgcatacacttaatcttttaagctttggttttattattataatatgggggtgataacagtatctacttaatagaattcttgttattacatgaaataattaatgttaaacacagcataatatgtgtcacattataaagattcaggcaatgtttgttagtattagtacttttttttcttcctaagtgcaaaagataactttatatcacttttaaacttttcttttagttgtgctgaaagacattatgacaccgccaaatttaattgcagaggtaggtatgaatgtactgtactatgttgtataacttaaacccgatagactgtatcttactgtcataacaataatgagtcatccagattatcgagtgagatacatatttargaattatctttaaaaatttcaaaaattttaatttkactgttgtgttttaggaaaaagtattgcataaagctattaatattgtcaggargactaaagtgcagcatagactaagaattaggaaaattcctagactaaaaatagtataaggagagggtttacctactatttgaggcagttggtctaatagtaagcaatcacagggagaaagcagaactacttaactcttctgtgttgaggaatgacataaaaggtaggaaaggatataacaaatgttgataagaggagtctgatggatgagaggagggaactgctttaamtgagtttctacttcagacataagytaattctcagagcccacaaaaactttcacttttatttgtgaaatacaactcagttctcatggcttaacactttaaaccatgagaaaactgaagagttgagaagcttggcagatgctgctgtgatagtcaaaaagaaagtgggtgccatgagctactattgatgtatttgccattgatccctcctgaaaatctagaatggactttcagacaaatggtttgaaaattctaaatcactaatgattgagatttagtataggtttactaagaacgggttttttttgtttttgtttttggtggatttaggctgttgcttactaagcaaagcaggctttagttgaggtttatcttgctttaaacagatatttaacagattttcctggaggtttttgtgtaccactgggaaaatgaagttaggcagatgactaagtgaaagctgtcctgctgactccttataatgatagtcattgtctaccagaagatctctcctgtcacaccaaaggataattgattatatcctgtaccatattatgagtcacctgattggagatataagacatacttctcacatatttagatgacacaggttagtacattgaatatcagccagggtttttaaggatcttaatagagtggaactaaggtagraactattaagagcaattaatagtgatatatctatagtcctgtttctaaacaagtttttttaaaaacctcaactctgactatagtgaacagagaagtcttggactcttacaattcatgtgagaagacctgaaactttgataacaattatatacattttgtgagtaatttctttggtgtatgccttcacatatctctggtatgtgacctatgctgcagtccattgagcatagattcccagaatgtattctcctgcagaaaatggaggaaaataatacttggcttccctaatgattacatgtgtatacaacactaacatttgcaagaccacctttaaataacacacttagcatttttattttatgaaatgtaatatgtagttctttgcatagtttatcctattagtaatctattctgtctttggaatatgttttgtgatgatgaaataaatactataaatagtattattccttttgcattgagagtcctgacgaaatgtccatgtgacagttcaytttgggtttagctctacctctaatatgtgacctatgctaccagtccgtatagcgtaaattcccagaatatatcctcctgaataaaatgggggaaaataatacctggcttccttaatgattatatttaagacttatcaagagactattttctatttaacaattagaaagttaagcaatacattatttttctctggaatccagtgtttcttttaaatacctgttaagtttgtatgcaacatttctaaagttacctacttgttaattaaaaattcaagagttttkttttcttattctgaggttatctttttaccacagttgcacaatatccttttgaagaccataacccaccacagctagaacttatcaaacccttttrtgaagatcttgaccaatggctaagtgaagatgacaatcatrttgcagcaattsrcygtaaagctggaaaggraydaactggtgtaatgrtayrtgcatattkattacatcggggcaaatttttaaaggcacaagaggccctagatttctatggggaagtaaggaccagagacaaaaaggtaagttattttttgatgtttttcctttcctcttcctggatctgagaatttattggaaaacagattttgggtttctttttttccttcagttttattgaggtgtaattgacaagtaaaaattatatataaatacaatgtataatatgatgttttgatgtatgtgtatatacattgtgaaatgattactacagtcaaactacttaacatattcatcacctcacataattattattctccccccagggtgaaagcatttaagatctacaagctacaattttcaattatacaatgttattattaactatagtcactatgctgtccagtagagcttcagatcttgttcatcttgtgttcctccctccccaccctcagtccctggaaaacaggttttaaagatagttgctaatccttatttcttctaaatttttaaatcagttgctgcctcaatttctatatgagaaatgactgattgatttcatttttctgttcacgctaccattttcatatcatactagcacatgttacccattaactgtattgcagatttggtctcacaaaattcttctaaaataacatttttaaaaagcatattaatcaaaaataagctttatatttctgaagcttgtttgagcatagaatgcctttggataaaataccattacctagtaaagtgtgaacttttataatccataaaaattattcttttataagaatattcataaatgkagttagattaatagaagattctcgattctttgatcagaaaactaaggactatattgaaaaatcagtgacaaatttaattcttatagtacatctgaaagaaaaaagaaaactcttgggagaacttttacagtgatttaattttgctgttgatatatttctttgggtggtaagtatggcaaaacatgttaaaatttaatgcaaagagattttgtacatttttccatctctaagaaggacaaagcctaagcccctccagatagatagaaaaactcatttagagagttctccttcatgttaatctaatttcttcttaattcagctgtaaaacagaaatagaatgatcgtattaatcatttaaagctgtgtaattgcatagattccttgttcctttaccccctcttatatcttgtttcctatcctttgtgactttttttgcattatatataaggatgccgaaatactgtttattgttgatagtttacaaaattgaatcttacattagtgcataattttggtgaatgttgaagattatggtagattgccttacatttctgcatattgtttgcaccttggaatgatagcactggcatgaattatagagctgaggatctaaagatttttactttgatttatcccattatcatctgcagggaaacaattgcttttactgattaaaaatgcaggctgggcacagcggctcacgcctgtaatcccagtactttgggaggccgaggcgggcggatcacaaggtcaagagatcgagaccatcctggccaaccaacatggtgaaacctcatctctactaaaaatacaaaaattagctgggtgtggtggcgcgtgcctgtaatcccagctactcaggatgctgaggcaggagaatcgcttgaacccgggaggtggaggttgcagtgagccgagactgtgccactgcactccagcctggtgatagagggagactccatctcaaaaaaaaaaaaaaatgcagtagcaaaagcgatggtagaaatttaaaacagagttgatgagcagcatatattttggtagtggaaaaaaaggtaaaaaattttttgtaataaaatagaaaaattttgtaatgtggaggcgcagaacactagatttaagccakkgggtcttaaattgtgttacattccttttaaagtctgatggaaggtataaatgttctcccctcaaaaaatgtgcatagtgtacataaaattttgcagtttttattacattgaaatatattcttttagacagaatgtaaaagaaccttcatgaaaactatgtcacttttttatgcaaaaaccagtggctactacatgagagcaatgaataaatctaagtggtacaaattaaccaaaattaagctttagttctgttcaatactaaattttaatgaaaagactgctatttaacttttaaaataacaagttgaaactatgctctttgactttgactttgcaacttttatatgatctttgatatccaatcagtgttgactttggtaaaaagtgctgaaaatgctattttacaaaagaaagaagagtaaatggaatctgtagattctattgcctgatgaaagtagacgtgtcaagaaataagaattctccaaggctcttcagataaattcatgtttcatcattttctttgccttcaagttactgagatcatttttggcaagatctgtatcattaatgctgtgttaggaaagaaaagattatgactccacattttactttcaaggttgaagagttaaactgtttaaaaagagtgtatgttatcctgtaaacagcagtatcaggctgtagaatttgtcttctgaaagcagggaacttatatatagcaaagaacttcatagtgctcccatttcttgacaaaacctctcgagaagctcttgattgaaagtcttggctttcatgaatctggcagctttcacaatagtggatttttcatgacaaatcatcttacacagggaattattcaagggttggcacttgaaacagtagaatactttcacaacaagagataagatttctttcaggattgatgacagtcttgcaccctagcgcatactgatgaagagagcagtgggtgaccatgacatggagagcttctgtctttaccagtgccccaatatcagatgtgttgtctggcagtaaggtgtactgtctgcctacagaatactgaggtttcttcaggagaagttttttggtaaagaaactttaccattttgaaagtgttaatgttttctgaagcttccaaaaagattccaaaatgggaatgtttccttgattgtgtcaccatgcttgcatttgatgaaaacttgtagccggctatactgagaaatcatatctgaagaaaggtggtacttccaatctttttgtgacctactttattattgtttttttaatgtcagggttttttttggaatggagaaaagtatttgatagaggtattgcaacagtcttattcttcttcatgctacaagtatatttgactctttctaagatacttgccttcactgttcaactgtgtgactttttgtttgtttagcattacaatcaatatcctagtaggatgatttaatcaatgatttttaattggaacaaatagtttttgtaatggtctaggcttttccaacttaactgtgctctcacatgtggtctctttttctccctctttcctccttcttatacactctcacccacacacatatgcatacataccctgtctgatgtatctgcttcttcagaatagttggctgtgctctgctgatgatgagaacttgccatttaagaaggacttgggatagtccatgtcatcatgttcagggataaaagtaaaacccaagggcatttaaactttattgtattttattttctgtttccagtccaaattaaatccaagagaaggctccataatcaaaaagtaaggacatattttaaatttgccaatgggaagatattctagtcattacagtctggtaatactatcaattctgtttctcttcagaggtgaggggagactatttgatgaaatcgtaagtcctgtagggtgttgtgaaatagggccagaatgaaagatagcaagaatagtgttatgaaaataaaatgcaaagtttataatatcatgtggtaaaatgtaatagtatttacttcatcagtagaactgctctagtagctgtatattctccatccttgcataggttggaatatcccccaagtgaaaagagattgatgggctaatagttaatagaaaatggagatctgtacatacagtgttaagaatgtagatattaaaattgttatatttagctgttacataatattaagactcagagttaagtaatttcactgaaattgattgctttttgtgtcttggagtcaaaataaataactgaaatctactatacttggctcatgcttaattaatatacttagaccatatttcggatgaattattcacagaatctaaaggagtatcctcgtgttcttaccttctttatccctgtgtttatttaaaaaggcaaaaaaaatggagcagatgctgttggttgaccatattttactgaacagtagcatttgtgtttaggttgaaacagcattagaaaactagatacggattaaagtcagtggtaggtttttttttttttttcttccaggaatgtttcttatagatgatcaaacaggcacaggaaggggaagtgttgtgatcaatattatccagttaatattagcattcagaggaaaatttgagtcctctgatacactgttaaatttctttctatactatcaagtccacaaatcctggaactgcaaaagaattttgagactgttcaaaataattaatctctgtataggctcaggctttcctgcaaggttatgaaatgctgataaaattggtcttattttgaaaggctcctcagcttatacctttccttacaaatgcttccttacaaatgctaaagcatttaatgactcctgacttaaagggaatttggacagattgaggttgttggtcttggaaatataatactgcaggcttctgtaaaatacttgaaatgtaattgttttaaaactttcaaagataccacttgtttgcctgttggttagaatactggtgaaataatttttaatcttttatgaataactaatttcatcataagaaaacttagctaagcatggtaaagctgttgttatacaactgtggaattcttcctgaggagtaactatcttataataaatgtagttgattatctaaagtagttttattcttggaatatctcataataggtttattctcttcttgtcagtatttccttgtagattgagcctgtggatttgcatttttgtaattgtgaatcaccattataggagatacatgcattttatctacttttcagtttgtatggggttaactttattagaattatctttaatgttattttgcttatatmcttaattttaattatagacaaacattaagaagctggagaaaattatgttctagtgacatttatatagaagaagaatcttttttccccctttcttttttgaagggagatgaggcagtcatattttggtaaagaatttgtagactttgcagaggtctcttcaaaataatctggctcagagtcttgacatatcctcagcagacatggtgcaaattagatggcagagtggtgggtacaagttgaccataaaataacgcattaggttagtaatgcccaaataatactttgggttttcagtgttgcagagaagtcagacaactgatagttattataaagaaaaatgttctgagagtgaggtaaccgcttaagggaaggaagcctccttctgtcttattcactaatttacaagaagataattgtgttacacttccttaggagtcattcatttgtatatttgacacttttgctttatgaacatgtgaagattattcaaaagtaagctgttggtgatttttttcttccaagaaagcatgccacagggcaacttctagggttggttctcatctagtcctgtgctccacactatctgcatctgcacttaagtttcaatattagataactcacatgtttaaactatgaagaaagagttaaaacatcctgagaatgctagtaagtatgtatttttgaaaggacttccaaaatttgagtttaaagaggtaaactccttttacatgacaaagttacttagaaacactactgctgtttccctctcccttgccttctccctgtcccatgcatacccccagctgtgttccagaatgatggcacataaagtaaacattcatatttatttccctttttttgtttttttttttttttttttttgcttgtttgttttgtttttttgtttgagacagtctcactcaatcacccaggctggagtgcagtggcaacatctcagctcactgcaacctctacctcctgagttcaagcgattctcctgcctcagcctcccgagcagctgggattacaggcgcctgcccccacgcctggctaatttttgtatttttagtagagatggggtttcgccatgttggccagactggtcttgaactcttgacctcaagtgatccgcccacctcggcctcccaaagtgctgagattacaggcatgagtcactgtgcctggcctcttattttttctttggttaaacttttagggaaaaagtttgagctgcttttaattttctttttgtttttaaataaattattaaagtttctctatgttaggaactcttgtgtacatgagttcattgagcttattcttaataaagacaaatcttctagaaataatagttgtatctttaaatgatctcaaggaaaatgtttggtttctctggggaatgaattttcatgacctaatcttaaatcaggttattttttctagcctgtttactaaatttctacatgttataacctaatgaaattttcttacttcctctttatttaaaacaaactataattactgtctttttaaaaatcttccaatgtggcgttcttatttttcttaacatttgaattttcctgggccaaaccatgttactatgatacacattatttaaggctgttatataatacagtaaaattgtagaactttcataccttgaaggatcttagcaattatttaattcaaacccattctaacatagatgataaaacagatttgcagggttgggcacggtggctcatacctatattcccagcactttgggagactcaagcgggaagattgcttgagcccaggagttcaagaccagcttgggcaacatagtgagaggctgtctctacaaaaaaatatttaaaaaatagccgggcatggtgtcacgtgcctgtagttccagctgcttgggaggctgaggtgggaggattgccagagcctgggaggttgaggctgcagtgagccatgatcacaccacagcactctagcctagagcctccctgtgtggcaggctctacacttcagataggcaacagatcgagaccttgtttcacaaaacgaacagatctgcaaagatcaacctgtcctaagtcatataatctctttgtgtaataataaaaaccccatcttctaaccttaaacctggtatttttttctacgaaactatgttctgcagtccaaattatttttctttattattttgaatcctaaagtagaaatagaaacttagaaaaataaaaagcaactcctttatgacatatgaggactttttcagttttaaataagaaaaacccaactcaaagtagcttaaataaaaggagacattttttgacttacataacctaaaagctctggcctggatctaggtgctcaacagatctcaagagtatctctcttattctctctccctcccttaccctcctcctcttttctctcttctgtatatatgttattttcaaacaggctctcacaagtagtggcaagatatagttcctaatagcttcaggtttgcattctacctactttagcaactatgatgagaagagagctacaatttgagcaaaaatttgtagggtgagttctgatttccctggattgaggcacatgcctattattcctgaaccaaatattctgtccagggaatggaattctctggggcatgtatctaaagctgaagtgtagagcctgccacacagggataataatagttttccaaagaaaaatcaaggaggggaaagaatgttggaaagagaaaaaaatatcagttgtctgcttcacatttgttctcaataattagtttcatagaagtgaaatactgtgtaacaccctaaactttagagattcttcgtagacaggaaaaataagaactcaatgaagttgtgacttcattcaaatcacgtagtttatatacatgctattagtaaaacccaggacagctgagtacaagttttacccttatattcacattgaggtccagatcctggttttgaatgagataattacgtgcagtcggactgttttctgatcctaaaaatagagacaataatatctatcttgtaaagttatggtagtgttaaagatatataaaatgttggcaagtaccttaatatacaataactactgctatatgttgtcattgtaataataatcatatttcttcctttgttgaattgctttcctgtagtaatcttattgtgatcatcctgaaacatagatttccgagcttcaagcaaacactattatgttgaaaaatctacattatttctaagtttagcagtgccagtggaaagtttattgaaatagaaaattacttttttaactgaggagtgtagattgtgaattcgtgattcatcttcttaggagatgatcggaatattgataaatattgatgcatagaatatgaacaaaacattacatatcttgtgctgtgatattaaagtagtattctgttctggtagtagtatggcagtattttaggtctgaaagatgtacataatctgtactttgaagtctgttttttaagagattaatcacaagagatttacataaaacaactaaggttaaaaataaatggtggattagagatacatcaggcaaatttcaatttcaaaagcagatgacagaatctcagtatcagggtagcatttaaagcaaaaagcattaaactggatcaaaaatgtcattttacatcaacacagggtacactccaggtaaagacttaacagttatgaacgaatgtgctaaacatcaaaatgtattaagtaaaagctgaaagaaatgaagaataattggtagaaaagcaatgataggaatccttaatgtacttcaaaaggcacgaagtaagaaggtacagtcatgtaccacataatgatgtttgagtcaacacctgacctggtatacgacaatggtcctataaaattataatggagctaaaaagcttctatcacctagtgatgttgaagccgttgcaatgcaatgtatcactcacatgtttgtggtaatgctggtgtaagcaaacttactgtactgtcagttgtataaaagcatagcacagttatgttcagcacataatactttataatgataaacgaatatgttactagtttacgtgtttacagtactattattttagcatgtgcttctgcttattaaaaaatgttaactataaaataatctttaggcagatcctacaggaggtattccagataaaggcattattgtcataggagatggcagctccatggatgttattgccccttaagaccttccagtgggacaagatgtataggtggaagacagtgatattgatgatcctgaccttgtagaggccaaggctaaagtatgtatttattagtttttaacaagagtttaaaaagtaaaaaaaaaaaataaatttaaaaatagaaaaaatcttaataaggatacaaagaaaaaatgtttttgtgtagctgtgtaatatgtttttgttttaagttaaatgttacaaaagagtcagagttaaatttttttatatttataaagtgaaaaagttataaaatgctaaggttaatttactgaagaaagaaaaaatttttaaacagatttagagtagcatgtttataaaatctacagtagtttacagtaatatcctaggccttcacattaactcaccactcacccactgactcacccagagcagcttccaatcctgtaagctccattcgtggtaagtgccctatacaggtgtacaatttttatatcctttataccatttttactgaaccttttctgtcttttagatacacaaataacattgtgttacagttgcctatgatattgaatacagtaacttactgtacaagtttgtagcataggagctgtatcatatagcctgggtgtgtagtgaactataccatctaggcttgtgtaagtatattttatgacacagtgatgaaatcatccagatacagtttctcttaagcaacacataactgtatatatatatatataggtggctttaataataaaataatgaaatatatttctttttttctgtcattgacaaaacaattaccagtcttactaattagatcaactgcaaaacaaaatctcactcaaaaataaaaatatgtaagtcccattccttgattacaattcattagaactggagatttttaaaaatgtttaaatttatatggaaatataaaatcatgttttaaataatttttgattcaatgaggaaatgtaaatttagaactaaagattaataactagagatttataaaggcaaaaatgttaatgaattaggaaacagtaaaccatttgaactaatctaaatactgattgcatgaaaatgccaataaaatcaatacatatttttaaaagccagtcaaggataaaagaaaagagggaaactaaaagtgagacattaagtatgagaaaggagataaaactaaagtgtggaggtgatgttaaaaattatattcaggtctgtgctaatcattttggaaatttcagtgagaagtgggcaattttcagtgaatatatcattgtaaatgctttgaggagagacaaaatctgaatagaccctgcaataatgaaaatgtctaggagccctcaagaaatacctggtttaaattgcatttcaggtggctggttatcacaccttgaagtatcaagtaattatgttatctaaattggaccaggtgttagaaaaatatgtgagacttcacaggtggctgcttatgtagcccttataccttaatctgataaaggtagcatatatttaaaaagagagaaaaccagaaggtacaatttagggaaaattaaatacttctatttggccaaagtaagagtacattcaagggaattgtgagaggtaagagtggaaacagaggttggagctgtatttttatgctgtgattgaattacagtgtgtgataaatattgctcttatttgggtagattaccatttaacattttgaattaattggtaattggattaatcttaacttttaaaaaactaatctgagagtggtataaaggatagattacagaatggataaagggtgataaatcagttggctatggcaaaattgcaggaagaaactgaaataggccacagaaaactgaaactgacattttgagtagtatttcagaatcaagatctggattttggcaactgaatagatgcgtaggaatcaaagatgagtatactaaatgaacttaatctatgatttgtctgtcattttattgtgtaccattagtgtgtatgcatgtatgtatgtgccaggtagttaataggctgactgtgtctcttagctccactctgctgcctgggcctttgccatagtgctggagttccctcacttctcttttctgtaaccctattatattactgctgtctctcagctgtgtttcattcctcaagcagaaagaagatgggaggatcatatagtagttgactagaagctgtggagtttgagtgctgggattatatctagttccattacttatgaagattatatctagttccattacttcacctcatctrtaaaatggtttaccaatagtacctaccttacatggttttatgagtattaaattatgtatttctaaagacatttagaacaatacaaagaatatagtgtgggctcaataagtgacgatggtgttagttattagaaggccatcgagtgctggagaaaataattgaatatcattgatggaaataaaggaagttttccacgttaaaaagcttcggtttttggaaatgtgtgttttcagtatttctgagattaccaggtagaaattccagccagatgttggaattctgcactggcagttgggaataaagtcatgttaaaggagataagttttggagttattgtgtaaaattggtaaagcactggaatagattggtttgacagaggggaaactctttttgagataggcctatatttagggacaagagaagagacaaccaataagggttgaaagaaaccttgagagagtaagtcctatgacagaagcagggaagtttcagaatgattrcagaaagatcagccaggctcttcctgttctccatcgtggtgcaggatcaaggtgaaaaggataaccccatgcaggaattttgcatctgcaggctccgcttcaacatctgtttaggagaaagtggagacagactgacctgagtaactaaggtsttggaacagcttacaggtcagaaccaggtgttttccaaagctagatatactgttagcscctttggcaacagaagaaatgaaaagactgttgtctsctgcacagttcgaggggccaaggcagacgaaatcctggagaatgatctaaaggtgcaggagtgtgagttaagaaaaaataacttctcagatactggaaactttggttttgggacccaggaayacattgatctgggtatcagatatgacccaagcattgatgtctacagcctggacttctatgtggtgctggaaaagccaggtttcatcattgcaggtaagaagtgcgggacaggcttcattggtgccaaatagaatcagcaaagaggaggccatgcgctggttccagcagaagtatgatgggatcatccttcctggcaaataaattctcatttctacccaaaagggtaataaaaagttttcagtgaaatgtttaaaaaaaaaataaaaaaaagatcagccagcagccaggatgggattgtgaaaacagcaggaaattagttgttgacaaagcattaatgaccattaagaaatcagcctcggctgggcatggtggctcatccctgtaatcgtaacactttgggaggccaaggcagatttcttgagtccaggagttgagaccagcctaggcaacatggcaaaaccctcgttcctccttaataaataaataaatgaataaataaacaagcaagcaagcagggcttggtgttaggcgcctgtactcctagctactcgggaggctgagggggttgaacctgggaggcaaaggttgcagtgagccaagattgcactactgcactccagcctgggtgacagagtgagaccatggcacccccctccccttcaaaaagaaatcagcctcataatcaatttctctggattaaggagtaagagcgtctcaagatttgctgtttatagagagggaggctaatagtttgagagagatacagaatctagggagagtgtgggtttttggtctttcagttgtttgccagccttggataaagaatgaagattacttgagcatattatttagagacaagtggagagaataaaggcacatgccagataggagataattaataaagcacttgtccaaaatagaaacttgttgaacaggaagagacgtcaagtataaggagattttaagatgggagaagggaattttgagtgtttgtattggatgacctcagggttcccagtaaagcaggagctgaattcatcgaaggtgatgtgttggtcaggatcaagagagaggttgggagaacaaagtgctaaaatcgttgtggtcaagagtttaaaaagtgtataccagaagagttattgagtgataggggtttgaaataggcaaagctgtaggaaagggggctggaaggaatattaggaggaacactaaatatacttctgaggtctacctcctggtctgtgaacataaaggagctgaaagagtaatggctgaagttctttagtttagctaaagttttttagctaaagctagaattgttgaaagttgtatttgaggaaaaaaagttaaggatacagttgaccgttcgataatgtagcccactgttgaccagaagccctacccacaacataaacaggcaataacacatattttgtatgtgtattatatagtatattcttaacaataaagtaaactagagaaaagaacatgtatcaagaaaatcataaggaagagaaaacacatttacagtactgtactgtatttattggtaccatacatttatgttgctgtttacaagatgaagcatctgtctgaaatggccagcagctacagctgtacctatctactgtacatatcaagcaagtcactttattcttataatgtctatgacttctytctttgaaagcgcttccatcatcactgttggcacttcatatgggtctcatggtgttaaggtttacggcattgcactagacacaatgaaaactacacaagagggccgggcacggtggctcacgcctgtaatcccagcactttgggaggccgaggcgggcggatcatgaggtcaggagattgagaccatcctggctaacacagtgaaaccctgtctctattaaaaataaaaaaattagccaggcatggtggcacgtgcctgtaatcccagctaatcgggaggctgaggcaggagaatcgctttttcccagaaggcgtaggttgcagtgagccgagatcgtgccactgcactccagcctggatgatagagggagactctgtcgcaaaaaaaaagaaaagaaaaagaaaagaaaagaaaaacacacaagagccgtgagagagatagcttttgattgcaatacacaatttactggagagatgagctgatcatacagagatgattagtgtcacacagtgttttaaacagattcttgcaaccctggagttcactgcagtagcaacagaagttagctatgagattttaacagtagtatagtatgtactacagttaatattaggtagctatgatttaatgctgcatctttgcatttgtttacatttatcttgactacaagtggtattatgtctggtcttaaggtttgtgtgcatatgttttgatgaattttaactttttataataggtttgtgtatattttatggcagtaaatgataaaacagactaatctacatatattttatgtagtcatgacataaacctaactttttcttaactttttgatatttctagtctatgtgtttcatctgcaggttttttcaaattgttgaaatctctgaaaaattttattgaaaaaaaatccatatatgtaagtggacccacacatttcaaacctgtgttcaagggtcagctgtgtaaataattttcctcaaaattaaagtggaaaaggagagttactactagtagaaagtagaactgtacccttgggcaggggtgtgtgtgtgtagttaaagatcaatttaacttaaaaggtcttggttagagaataaaactggcccttattagctttaatttacatgaaaaatgaaaaattttaggccaggcacagtggctcaggcctgtaatcccttaactttgggagaccaaggggagtggatcacttgaggtcaggagttcaagacagcctggccaacatgctgactcacccttccctactgaaaatacaaaagttagccaggcgcagtggccatccctacagtgctagctactcgggaggctgaggcaggagaattgcttgaacccgggaggcaaggttgcggtgagctgagatcgcaccactgcactccagactgggtgacagagcgagactccatctcaaaaaaaaaaaaaaaaaaaaagatttgaaaacagagtattttttaatctgcaagagctttacagccttttattcatatgtataagcttttaaagatgactaaaattttagtgtggactttccactcattggaaatcctatattgcaggtgttaattcaattttagtgagtgtgcatcatggctcagagagataggactagaatgaggaggtcacaytggagactctgaaacagatacatgtsagcctcccaactttttaatatttgttaatctagaagtgttgaattttgggtgctgacaaggcagcaggtagataagaattgcaaagttaagaaaatagactgtaatattgatggtaaactaattgattaaattttaaaatgtacttttccatgtttttctttgaattgtcagtaattttgtttcaactggtattcatacatagattattcacccaatgttgacaactagtagatttatatattttttatgttgcctatccttttttgggtaaggattaacagaatgtataatcacctacattataggtacactactaatcacttgctacttgaaaaaacctaaagctttgaaatctttttattattgcacacaaacttatgccaaaaatggagataaagagaaaaatgtcatccactaaaccccaacaaataatgttgacaatgtggtctactcgtagactcgcattgacttaatttttttaaatcttattgcatattttgactagataataaatgcatatggttaaaaaattcacatggttcaaaaaagtacacctcccactcatcttccatgtgatatttcctttctgcttagcaattctgtatttatcttgctaaacatgaatgacagttgtttgctgaaattacattaaatgtgacgtaataaaatcattgtaagtttacattttttaactttaataatttttaatgttttaatgaagagtatgaagagtagtagtactgctcttcaaagtactactactttaccttaccttttactgttttgttaagaaaattaggccgggcgcagtggctcacgcctgtaatcccagcactttgggaggccgagacgggcggatcacgaggtcaggagatcgagaccatcctggctaacacggtgaaaccccgtctctactaaaaatacaaaaattagccgggcatggtggtgcgcgcctgtagtccyagctacacgggaggctgaggcaggagaatggcgtgaacccgggaggcagagcttgcagtgagccgagatcgcaccactgcactccagcctgggcgacagagcgaaactccgtctcaaaaaaaaaaaaaaaaaaaagaaaaaagaaaattatatagaaataaaattccagctattccaaaactgcaccttgaatacaggtacagaattgctaaaaccgtgtaccattttgtagttttagcatgcttttgtgtaactgcatctggtgtttgatcctcatgagagccctgttaaggaagggtacatattattgtcctcattttccttcgaaaacacatcagagtttgtattttgactgtcagcattcaaatacaagtcttttatttataaaattttggtctttatactgtggctaaaaatcttaaatcacttgtcatgatttgaaatggtttataccgattttttttgacatttatacacacatacacatatttttaaattgtctataataaaatcatgctcatctttgaaaaaatattaggagtactacagtggatacctacatacttgctattcagcatacctggttttttgtttgttttttgagacagtcttctctgtggtccaggttggagtgcagtggcacgatctcagctcattgcaacctccgtctcccaggctcaagtgattgtcctgcctcagcctcccaagtagctgggactgcaggtacacatcaccacgcccagctaattttttgtatttttggtagagacggggtttcaccatgttggccaggctggtctccaactcctgacctcaagtgatcagcccacctcggcctcccagagtgctgggattacaggttgtgagccactgcacctggcctgtttttaaattcacataaatatgttttatatttttcattagggagaagaaggttgtgtctacaatttttaagacattggggagatttagatgccagtagtaacttaaaagagaaataattgcaaattctttttcctcttgagtatactttcatttaaggtacagtgttctgtaagttacttttaccgttaaacttcttaatgttgcttattgtttgtcttacatttttaggttggatttttcttaagtcacatgtctaataaaaaaaacccttaaatacctcatttattcgtcttcgttagtgaatgcattgttgtacatattagatttttctctttagataactcagcttcccctattaagtgccacatgtattacaaaattttatttatgttttattgtttaataaactcttgagaactagatacattttaatcatttgtaatacttacattttctaaaacacttcatttttccctggtttcttcaacaaagagatgcatgtagtacaaggatagctttacctgtgttagaagattgtttcacacatttacatcaactgcatagtcctgtttttgttgggccctaatgccagcatcactttttgctactgctgtttctgccttaaaggcaatatgcctctgtctagtttgctgattctgatactctttcccctggaaagtaggtaatcaagtttgtgaggagctgtgtgtttaaggagtccataaatccttgtggggagccctaggtgtatagagcatagctgtagggcagaggcctttgacacttattctggatatgcagtggcctttgcctatggggttcatgggtcagagcgctgttgtgacctttgaataaatgggttgttatgataattgttttaagggaggagagttattctgatatcctttgtattgatattgctcttatttattattgagctggatttaagtattaatcatttaaggtcaaatktctaatgtatatatgttcttaaatggctacgacccagttaccatagcaatttagtgaaataactataatggaacattttttttcaatttggcttctcttttttttctgtccaccagggagtaactattcccagtcagaggcgctatgtgtattattatagctacctgttaaagaatcatctggattatwgaccagtggcactgttgtttcacaagatgatgtttgaaactattccaatgttcagtggcggaacttgcagtaagtgcttgaaattctcatccttccatgtattggaacagttttcttaaccatatctagaagtttacataaaaatttagaaagaaatttaccacatttgaaatttatgcaggagactatatttctgaagcatttgaacaaattaattagctttgttgttcaactcattgggctaaagaagccaaaagcaatgggttttaatgtagtcgaagccaaattatatttatgaaagaaatattctgtgttataaccaccaaatacagcccaattctgactagatgatggaagaacctgtcccatcagaggtccagcatgaggtccagcagaggtccaccagaggagttcagcaatttgctgctcttagggcagggatcaattccttaatatcttaggaagactaggtattgacagtaatggtgacaaagcaatgaaaaggaaaggaagaagtgataagacrtggcagcaagctgaagtatgatgagtaaagaataggaatcaaagtatgtggagtgttagagaaaacctggatttagatccagattctagtcctatctctgtcattaatctattgcgtaaccctgagcatatcatctacctctctttgagtttgcttgtcaataaaatgaagagactttgaaatctgagacttcctggataagtactaaatacagattatgtcactgatgtctgcctctatttatttctcccttttaccctaatctctataagtctacctcagtcatcctgatcctattctacttctctgatgttgttgtcagataggtgtgatcatcctcatcagatcttttctgtattcttagagacagataactttatcaaagaccacagatttattagtatagcatgttaaagtcttctaaagagtctcattgatgctcttttcatctcagtacaatttttaaaactgctgaatgcaaggtactgagctgttggaagtgactgacagatgaatgtaacagattcatagagaaggaaaaaggaagaaaaactcatgctcttcctatagtattgatatcagtgtaagagccaagagaaaggtataaagtatcatgcagatattaagggaaagaaaacattcactttagtaatctttcctcattttctagtttcctcttatgtactatgatttaatactgtagtaaagttttaataaaatatgagctatatgtaattaagtgggaggttgtggggctaggcacgaggctcacacgtgtaaccccagcactttgggaggctgaggcaggcggatcgcttgatctcaggagttcgagaccagcctggacaacaaggtgaaaccccatctctactaaaaacacaaaaattagctgggcatagtggcacacacctgtagtcccagcttcttgggaggctgaggcaggagaatcgcttgaatccaggaggcakaggttgcagttagccgagatcatgccactgcactgcagcctggacatcggagcaagactttgtcttagaaataaataaataaatataaaataaaataaatgggaagttgtgtatataaattataaatgctacattcagaaaagcttttgaaggttgtcagacagtttcttaaaggaagttcaccagttctttattgaacattgaagaaaacatacagtttagactggcattaaaactgaaagaagtggccagacgcagtggtagacgcagtggttcacgcctgtaatcccagcactttgggaggtcaaggtggatggatcacctgaggtcaggagtttgagatcaggctggccgacatggtgaaaccctgtctctactaaaaatacaaaaattagccaggcatggtgatgcgtgcctgtagtcccagctacttgggaggctgaggcaggagaattgcttgaagccgaaggtggaggttgcagtgagccgagattgcgtcattgcactccagccagggcggtaagagtgaggctccgtcttaaaaaaaaaataagtaaataaattaaaaactactgaaagaagtattacaggcaatgggaaatagcttgagtggaagtgcagcagaaggaaaaagctggacaagaatgtagtgtcagagaataggtatggaacgtgtgagtgactgttagaggatcttgaatggggataacagacttgatttcataaatactgagatgtcatgataatacttgaggactaaaccatgttttaaggacagttgtatgcaaagttgtaatcgcaagaggaaaaaatagtggaaaagaaaccagtaataaaacttgccttaatgcaggtatgctaagacaatcaaatgggatttcattaattttttatttgccatttatagccaaagattttgtaaaagttttgagcccagtcaggtgaaatagtctcagaaagaaagaaaagtgaatctgagacttggagacattaatgttgatattttggttttaaacgtgttttaaatccggtaaaagtgagcttctcacatgacaatattcagtgggtacttgggagtatgggttcgaatctaggtaggagatatatcgatattttgggcatcatcaggaaagggagagtagttaagcctttcatataaataatggtgtggcgtttgkgcatgggaagtcttggaggaaaggaagaaaaggagagggtgaggactgagataagaatggcaacttgggtttaggaagaagaagaggaatcaatgtagagaacagatagtgctgaaaaatacagcatcttctgtagggattggcagctttttcttgatttttgtcttaatatttctaagagatggaaaaagctactatattctagacatttaacagggttaaaaatgttactaaaagatgatcaatgtggttttcattcaagactataacaatatgtatatatccaaggaaatttaattctgacttaaaaaaattgttttgcttgtatagatttagggacacaagtgtaattttgttacatgcatagagtgtatagtttcaagtcagggcttttaggttgtccatcatctgaataatatacattgtacccattaagtaatttctcatcttctactcaccgtttcaagtctccactatttatcattccattctttacattctgattttcatttactaggtgtattagtctgtttttgcattgctttaaagaaatacctgagactgagtattaaacaggtttaacctgttttctttatgaattcttctttaattggctcatggttctgcacgctgtacagaaagcatagcagcatctgcttctggggaggcctcaggaagcctccaatcatggctgaaggcaaaaggggagcatggtgagaatgggagcaagaaagagaaggagtggtggggagaaggtgccacccacttttaaatgccagctcacttaccaccaagaggatggcccaagccattcatgtgggatctgcccccatgattcaagcttcttccaccaggccccacctctagcactggggattacaattcaacctgagatttgggagggaaagatatccaaactatatcactaggtctggatcttgttatttattttttggaacatagtcatatatatccaaggatatatattgtagaagtccacagaaccatactaatattggacttctgcttagytaggtcttatctatctgaaacatgatattcatattgcagagaagattattttctttagtgattgaggaaatctttactacttatacatttttaatataatactataatatttgaagatgcacattttagatgtagtttaattgaaacctggaaatactattaatttgctttttaaagtcctaaaatcaggattatcagattctgaattaatggagtttaaatcaaaaagattacaaggcagtttttcagttttattctggttaattttatcacagctttggrawcctactttgtttatttgcttcttgaagttagatttcccagtgaaatttcagtatcacataaagtcttatgaaatggctcattgcactttgaactttgagtcaaggaagtgaaatttattgatagattgttggtgtaatatttatcctgtttgtggtagcttttttgaataataagtgtcttagaagaccatgttggagtagcctgcatgcttttatcaaacatattaattatgtgatggctgatactgctttagatattacatagaaatagtagtaggtgtttactaaactggaaatttcatttaacttggtttagctttgccttgttctcagtcacattgataaaaatgtaagacttttgtttatcttttagaataatgacaccttttggtgctgagaattttttgttttatatatatatatatatatacgtaatataaatacaaaatatatttaaatatgtataatatttctcatacactttatgtaactttgtgttcctgtttctctattatcttggcatgttttcttcaaatggcacttcttaacctcctaaggttaataaatttctttgtaatggacttttgttttctaattcctcagcgtatgacaaatgaattatactttgtcaaattatttaggtaactttcagtttttgaagtcctgggatcataacattcatcagtctttaatttctgtcattaaggtcattagctataaatgaatttatgagtagatttaaaaaataaaacatacaatccttcccttaacacactttcccaccatttggttcaactgctagtgtaaaagcatgatgaattttgagaagttatattttaccagttactttattttttaccagttatttaaaacagacatgagccaaagccagaatacttgttaatgaaaatgaggtgttttggaggaaaggaaggttgtgctgcagtttttacttgaaatctgttacatttctttacagaaatttcaaatctcttgtttcctgttatgatggtggcattatatacctttaaaatgtgagctataggaaaatgaatgatggttaattttttaataaatatttagacttgtgkttttgaaattttttataacattgttataggttttatcctctttctcttgtgaacatgtagtgatttgtattttgtgatctttgccgcatgctagagacttaagaatactatagcaaatatctgtcttctttacatttaaaaatttttcgtgactactccctgttgatatctgtcttaaaagttacttttgatgtagttcacaaatgtaccagataattatttcatcgtttttaatgcttaaagtttttatttgtattaggatttttagtatgattttaatgttaaagttttgaagttactctgccactagaagtctaattttgggacttactattcatgaaataggaattgacttttatataagtaataggaccttattttgaaggttcaaactggagaaaatcttacattgtttatatttttatttcatttatttcagttgatttgcttgagatcaagattgcagatacagaatccatatttcgtgtatattgctgatattaatcattaaaatcgtttttgacagtttgacagttaaaggcatttcctgtgaaataatactggtatgtatttaaccatgcagatcctcagtttgtggtctgccagctaaaggtgaagatatattcctccaattcaggacccacaygacgggaagacaagttcatgtactttgagttccctyagcygttacctgtgtgtggtgatatcaaagtagagttcttccacaaacagaacaagatgctaaaaaaggtttgtactttactttcattgggagaaatatccaaaataaggacagattaaaagctatattttattttatgacatgtaaggaactataatttgttttctattagatctgcaggtgttttgcttactctggcattggtgagacattataagggtaaataatcctgtttgaaggaaaaggccttatggcattgtaacatgagaggaatttttcttaacaaggatggttaactgagaagaaattagcatgggaccaatattttaaaaattttggtctataggtagaaatgagatctgttctgtggtcttatgtagtgacacaaaccactttttctccattttggcttatgtttctttttctttccttttttttttttttcctttttgttagagasagggtcttgttctattgcccaggctgagtagctaagactacaagcatgtgccaccacacccagctaattttttttatttttatttttgtagggacagggtctcactatgttgcccaggctggtctcaaactcctgggcacaagcagtcctcacgctttggcatcccaaagagttggaattacaggtgtgcgccatcatgcctggccttaacgtttcttaagacttgattattttctatttagcttctgtggatttactgattaattttttwamtaggagagaaatcagtatgaagaggaagtaataaagaatgaaaacatggtatttaaatgtgcaggtttagaaagttaatgaagtttgaatttgattgatctgtatttagagaaggcaacgtcttattattttaaaaccaactatccgccctgtgcggtggctcacgcctgtaattccagcactttgggaggctgaggtgggcagatcagctgaggtcaggagttcgagaccagcctggccaacatggttaaaccccatctctactaaaaatacaaaaaaattagccgggtgtggtggcaggcgcctgttttcccagctactcaggaggcttgaggcaggataattgctgaacccgagaggcggaggttgcagtaagccaagratgcaccattgtactccagcctgggcaacaagagtgaaactccatctcaaaaaaaaagaaaaaaaaaacaacaactatcttcatttaaaatattaaatgtgaatatttaaagtgagactaaggtgcaacatttttagatagtaatgaagaaaaggactaactttgtagtgttgctgccttgttaaacatactagatagcatattgccaatctttaaacattctcaatgataggatttatttactttttctgatttttagcttttcttttgaaagaaaataagaggaagtttcatttactgcaaaattttaaatgctgctttgatgtatcagtagagatataattttcctttatccagaatccaagtagctggaaaaaaaaatcaaaatatgctgaacttttttttttttagccagaaacccatttcctatcgtctgtacaaataaaagttaaatatatctcaataacttagaaaaattattttttgataatccaggaagtattagcaactgttttaaaattaagataactagtaagttttatttagctttcaaaaataggcatctacatcatcatctctgcatacctttaggaatttcctaattcttatttcccttcatctgtactttaacacatgcaaaattgaaggttagattaaatatttatgatttatttgtttatccttgactacataaattyccattttattgattttccctgccttatttaagaatatgctatgattaaaacacaaaaaattttagtataacccatatatatatagaattcacctttttgttatttaaatattattggcttattttcttctaagtaaaatacaattactggctaaaataattgaaataagcaaaaaaaaaattttaaagaccttgtatacaagattactttgccaggtactgttaaaagatgcaatgacatttaagacgtaacatccttaaggatcttattttctgggggataaaaaactttaagrtaaattagaataaaagatttaaatggcattttaaggtaccaggtaccagataagatgtcacaaggctgtatatcattaattgccaaatgatttatacaggccagatttctttgttggtcaatagaggtttaaagtgatgaacttctgttgtgtttttttattaagaaggtattatcttattagtargaagtgattttttttaagaacaagcattttataacatcaaaagaaatcagtagtactctttcctaccccctcatatttattctgaaagtattcaagcattatattgtcatgtaagaaactggagcttctcatgtttgtattgctgtagaagtaaacatgtatttgccatgcgtcatcagggaagttgcactcaccgtccaagaacttttgttaaagtaaatcttggaataggtagctcatttgaaatgtagaaaaaattaaatccatatctgaattttgtttatatgtatgtacacgtaaactaaaaacgtatttaaagctagtattagatgagaaaagaggtttttttacttaaaattttaaggcaaaagtagtttatcttagatcttgtgagattgtatttttggtttaaaatttgagaatttgagtgaagaaaaatcatgtgaatgaaaatgcaacagataactcagattgccttataatagtctttgtgtttacctttattcagaatatcaaatgatagtttattttgttgactttttgcaaatgtttaacataggtgacagattttcttttttaaaaaaataaaacatcattaattaaatatgtcatttcatttctttttcttttctttttttttttttttaggacaaaatgtttcacttttgggtaaatacattcttcataccaggaccagaggaaacctcagaaaaagtagaaaatggaagtctatgtgatcaagaaatcgatagcatttgcagtatagagcgtgcagataatgacaaggaatakctagtacttacttwaacaaaaaatgatcttgacaaagcaaataaagacaaagccaaccgatacttttctccaaattttaaggtcagttaaattaaacattttgtgggggttgktgacttgtatgtatgtgatgtgtgtttaattctaggagtacagctgatgaagaacttgcttgacaagtttttaacttatgtattatttcgaagcagtgtttacgtagcagtaacatgaaagtttctaataaaatacccaatgtacacagcgtcaaaaaagctgcatttttccttttcctaattcttygttgtttgctgaaatctggggcaaaggtgcgggagggggctaaatgactgggatatgaagtaggaatgggagaggaaagaaatagatgggaactcagtcatttgggaatgattcatatggaatgtttttactgcttccactcctgtctgccttccaatttattctcaatccctcagagtgatcttaaaaatagacttgattgtgtcacttctgtttacactttataaggaccttgtgtttttttttttaccatgacctacaaggcccagcataatttagcacagggctacctcctacatcagcactagtcaccttctytccttgtttcttgagattcagtcatactggtctttcttcagttcttcaaaatgctaagcttctgcctcttctagtctttccagttattttccttctccctgtaccttttcatctcagccttttcccctgaccttccatagctatcttcatatttccagccttagcttcaatctcatattctctgaagtcctttgattgtcctcccgttattctttttttaaaaatcctatttccttatattgtatcttakaattatttggtttgtttcatttttgcctatgtgtgatatatgtatttcyacataggtatatatatctacttatagacaagaattcttcagattaaaaaaatctgatttgtaaacattcccaagtggttgtttaccatttttttcttcccccttcytatttcttattctacctgattttcccctgttcattcaccacactcgtttctttctcttttttactctctcttaatttttcattcaatttttataacatgtaataaatctaactgtagcgtctgagtattaagaatattgctagtaatacttcacctgtaatcccagcactttgggaggctaaggcaggcggatcacttgaggcccaggagtttaagaccagccggccaatatggcgaaaccctatctgcactacaaatacaaaaattagctgggcatggtgtcgcacacctgtaatcccagctacttgggaggctgaggcacaagaattgcttgagcctgtgagatggaggttgcagtgagccgagatcacaccagtgcacgtgcacttcagcctgggcaacagagcaagactctgtcttaaaaaaaaaaaaaaaaaaaaaatatayacacacacacacacacacacacacacacacacacacactattactaccaatatacatacatatatgtatgtatgtatgtatgtatattggtagtaatagtaatacttgggcccctgcacgttttaagtgaaaatagatctaatattaaatgtctttagcccttaaattttttttaagtgttcagaagtttccctttaaaaaaatttttaatatataataattgtacatatttatgggatacagagtgatattttcatgtatgcagtgtgtgatgatcaaatcaggataattagcatatggatcacctcaaacatttgtcatttctttgtgttaggaacattcaaaattctgtcttctagctatttgaaaatatacagtaaattattgttgactagttacagttctatagaacactataatttattcctcctgtgtgtaattttttatcttttaaccaacatctccctatcctcccctcccactccctttcccggcctctaataaccacactcttatgagctcaacttttttagcttccatatatgagtgagaacatacggtatttatctttctgtacctgacttattttacttaacatcatgtcctccgggctagacattctctttagaatccacaggtttcctttcttttctctaaatctgcattttgctcagccattaacttttaaaatgtctttttccctttagttttattgttttctattttaatattgcaagatgttttatatttgtgattacaaataaaaactccattattagtaaacaaatacaatgtcatatagtagtaagtgctataaaaaatagacaggatagaaagtaatcttggtttgtatgttttttgttttttagcaaagatgattagagaaggcccaaccaagcagataacatttaagcagaggcctaaatcatataagtgagttatacaaatatctgggaaaagagttaagagtacagatgcaaaagcccttagacaagagaatgagcttggtatatctgaagagtggataagtcattttgactgaaacagagtggacaagaaaaccagtccaagtgtaaagayactagtgtgtgttcagcataggaaggatgtaatctgaattttgtgtttaatattccctgtgttcatgctttcaaaatacagatgagtgaggaaagtagggagaaggggtaataaaggaagctgagagatcagttaagaggtacttgaatagtttagtaaagatgagagaagatgtttgcttcttgttgcccctcactgcttagaatagtggcagtgaagggtaacaagaagctgtcagattaacttaaagagtttactgatgcagtggatgttggttgtaagagaagaattgataatgactcttggataataggggagggaggggctgtcaatataatataatgaagaagggatttgaagtcatttctgatttaaatctcacatccactacctacttttaatagatatgtagcctttaacaagttccctaacctttctgggccttagctacctccccttggaaatggaaatacctaacatgtaaggttgttttgacagttattttcactaggcatgtaaaggcacttgactctctgttatagaccactgtattatgttaatgtccctctccttcctccctttaggtaaagtttttagggctaataaatcccraatatcaatgttgatcagtagtttgtgtttgtgtagtgttgtttatatcaaaaactacattgaagccgggcacagtggttcacgcctaaaatcgcaacactttgggaggccaaggtgggcctcccaccttgaactaaggagtttgagaccagcctgggcaacatggtgaaatcccatctctacaaaaaatataaaagctagctgggtgtggtggcatgcacctgtagtcctagctacttgggaggctgaggttgatcctgggagtttgagcctgcagtgagctgtgaagatgccactgcactctagtctgggtgacagagcaagaccctgtctcaaaaacacacacacacacacacacacacacaaagaaatacattgatttttcacataggtagtaagagaaacattctttttgaactcagctgtttgtgaattgaattttgtaattcaaatgctatattatgtaaactattgatgactttcaatctgcatttattttgtataattatttagttaatatttgccacttatattccttaaaaaataaaattgaggttgggcgtggtggctcacacttgtaatcccagcactttgggaggctgaggcaggcagattgcctgagctcaggagtttgagatcagcctgggcaacatcatgaaccccatttctactaaaatacaaaaaattatctgggcatggtggtgtacacctgtagccctagctgtttgggaggctaaggcacgagaattgcttgaacccgggaggcagaggttgcagtgagccaagatcatgccactgcactccagcttggcaacagagcaagactcttgtctccagaaataaaaataaataaattgtattaacatcctgatagtttatctgtttagtacctagcaagaaagaaaatgttgaacatcttaagaagagggtcatttaaaaggcctcttaaagatcatgtttgttacagtgcttaaaaattaatatgttcatctgcaaaatggaataaaaaatctgttaaaaatatatttcactaaatagtttaagatgagtcatatttgtgggttttcattttaaattttctttctctaggtgaagctgtacttcacaaaaacagtagaggagccgtcaaatccagaggctagcagttcaacttctgtaacaccagatgttagtgacaatgaacctgatcattatagatattctgacaccactgactctgatccagagaatgaaccttttgatgaagatcagcatacacaaattacaaaagtctgaatttttttttatcaagagggataaaacaccatgaaaataaacttgaataaactgaaaatggaccyttttttttttaatggcaataggacattgtgtcagattaccagttataggaacaattctcttttcctgaccaatcttgttttaccctatacatccacagggttttgacacttgttgtccagttgaaaaaaggttgtgtagctgtgtcatgtatataccttkttgtgtcaaaaggacatttaaaattcaattaggattaataaagatggcactttcccgttttattccagttttataaaaagtggagacagactgakgtgtatacgtaggaattttttccttttgtgttctrtcaccaactgaagtggctaaagagctttgtgatatactggttcacatcctacccctttgcacttgtggcaacagataagtttgcagttggctaagagaggtttccgaagggttttgctacattctaatgcatgtattcgggttagggsaatggagggaatgctcagaaaggaaataattttatgctggactctggaccatataccatctccagctatttacacacacctttctttagcatgctacagttattaatctggacattcgaggaattggccgctgtcactgcttgttgtttgcgcatttttttttaaagcatattggtgctagaaaaggcagctaaaggaagtgaatctgtattggggtacaggaatgaaccttctgcaacatcttaagatccacaaatgaagggatataaaaataatgtcataggtaagaaacacagcaacaatgacttaaccatataaatgtggaggctatcaacaaagaatgggcttgaaacattataaaaattgacaatgatttattaaatatgttttctcaattgtaacgacttctccatctcctgtgtaatcaaggccagtgctaaaattcagatgctgktagtacctacatcagtcaacaacttacacttattttactagttttcaatcataatacctgctgtggatgcttcatgtgctgcctgcaagcttcttttttctcattaaatataaaatattttgtaatgctgcacagaaattttcaatttgagattctacagtaagcgttttttttcyttgaagatttatgatgcacttattcaatagctgtcagccgttccacccttttgaccttacacattctattacaatgaattttgcagttttgcacattttttaaatgtcattaactgttagggaattttacttgaatactgaatacatataatgtttatattaaaaaggacatttgtgttaaaaaggaaattagagttgcagtaaactttcaatgctgcacacaaaaaaaagacatttgatttttcagtagaaattgtcctacatgtgctttattgatttgctattgaaagaatagggtttttttttttttttttttttttttttaaatgtgcagtgttgaatcatttcttcatagtgctcccccgagttgggactagggcytcaatttcacttcttaaaaaaaatcatcatatatttgatatgcccagactgcatacgattttaagcggagtacaactactattgtaaagctaatgtgaagatattattaaaaaggtttttttttccagaaatttggtgtcttcaaattataccttcaccttgacatttgaatatccagccattttgtttcttaatggtataaaattccattttcaataacttattggtgctgaaattgttcactagctgtggtctgacctagttaatttacaaatacagattgaataggacctactagagcagcatttatagagtttgatggcaaatagattaggcagaacttcatctaaaatattcttagtaaataatgttgacacgttttccataccttgtcagtttcattcaacaatttttaaatttttaacaaagctcttaggatttacacatttatatttaaacattgatatatagagtattgattgattgctcataagttaaattggtaaagttagagacaactattctaacacctcaccattgaaatttatatgccaccttgtctttcataaaagctgaaaattgttacctaaaatgaaaatcaacttcatgttttgaagatagttataaatattgttctttgttacaatttcgggcaccgcatattaaaacgtaactttattgttccaatatgtaacatggagggccaggtcataaataatgacattataatgggcttttgcactgttattatttttcctttggaatgtgaaggtctgaatgagggttttgattttgaatgtttcaatgtttttgagaagccttgcttacattttatggtgtagtcattggaaatggaaaaatggcattatatatattatatatataaatatatattatacatactctccttactttatttcagttaccatccccatagaatttgacaagaattgctatgactgaaaggttttcgagtcctaattaaaactttatttatggcagtattcataattagcctgaaatgcattctgtaggtaatctctgagtttctggaatattttcttagactttttggatgtgcagcagcttacatgtctgaagttacttgaaggcatcacttttaagaaagcttacagttgggccctgtaccatcccaagtcctttgtagctcctcttgaacatgtttgccatacttttaaaagggtagttgaataaatagcatcaccattctttgctgtggcacaggttataaacttaagtggagtttaccggcagcatcaaatgtttcagctttaaaaaataaawgtagggtacaagtttaatgtttagttctagaaattttgtgcaatatgttcataacgatggctgtggttgccacaaagtgcctcgtttacctttaaatactgttaatgtgtcatgcatgcagatggaaggggtggaactgtgcactaaagtgggggctttaactgtagtatttggcagagttgccttctacctgccagttcaaaagttcaacctgttttcatatagaatatatatactaaaaaatttcagtctgttaaacagccttactctgattcagcctcttcagatactcttgtgctgtgcagcagtggctctgtgtgtaaatgctatgcactgaggatacacaaaaataccaatatgatgtgtacaggataatgcctcatcccaatcagatgtccatttgttattgtgtttgttaacaaccctttatctcttagtgttataaactccacttaaaactgattaaagtctcattcttgtcattgtgtgggtgttttattaaatgagagtttataattcaaattgcttaagtccattgaagttttaattaatgggcagccaaatgtgaatacaaagttttcagtttttttttttcctgctgtccttcaaagcctactgtttaaaaaaaaaaaaaaaaaaaaacatggcctgagagtagagtatctgtctactcatgtttaattaaggaaaaacacttatttttagggctttagtcatcacttcataaattgtataagcacattaaatagcgttctagtcctgaaaaagtccaagattcttagaaaattgtgcatatttttattatgacagatgtttgaagataattccccagaatggatttgatactttagatttcaattttgtggcttttgtctattattctgtactctgccatcagcatatggaaagcttcatttactcatcatgacttgtgccatataaaaattgatatttcggaatagtctaaaggactttttgtacttgaatttaatcatgttgtttctaatattcttaaaagcttgaagactaaagcatatcctttcaacaaagcatagtaaggtaataagaaagtgtagtttgtacaagtgttaaaaaaataaagtagacaatgttacagtgggacttattatttcaagtttacattttctccatgtaattttttaaaaagtaaatgaaaaaatgtgcaataatgtaaaatatgaagtgtatgtgtacacacattttatttttcggtatcttgggtatacgtatggttgaaaactatactggagtctaaaagtattctaatttataagaagacattttggtgatgtttgaaaaatagaaatgtgctagttttgtttttatatcatgtcctttgtacgttgtaatatgagctggcttggttcagtaaatgccatcaccatttccattgagaatttaaaactcaccagtgtttaatatgcaggcttccaaaggcttatgaaaaaaatcaagacccttaaatctagttaatttgctgctaacatgaaactctttggttcttttatttttgccagataattagacacacatctaaagcttagtcttaaatggcttaagtgtagctattgattagtgctgttgctagttcagaaagaaatgtttgtgaatggaaacaagaatattcagtccaaactgttgtaaggacagtacctgaaaaccaggaaacaggataatggaaaaagtcttttaaagatgaaatgttggagccaactttcttatagaattaattgtatgtggctatagaaagcctaatgattgttgcttatttttgagagcatattattcttttatgaccataatcttgctgtttttccatcttccaaaagatcttccttctaatatgtatatcagaatgtgggtagccagtcagacaaattcatattggttggtagctttaaaaagtttgtaatgtgaagacaggaaaggacaaaatagtttgctttggtggtagtactctggttgttaagctaggtattttgagactacttccccatcacaacaacaataaaataatcactcataatcctatcacctggagacatagccatcgttaatatgttagtgactatacaatcatgttttcttctgtatatccatgtatattctttaaaaatgaaatttatactgtacctgatctcaaagctttttagcttagtatatctgtcatgaatttgtaggatgttccattgcatcagaaaacggacagtgatttgattactttctaatgccacagatgcagattacatgtagttattgagaatcctttcgaattcagtggcttaatcatgaatgtctaaatattgttgacattaggatgatacatgtaaattaaagttacatttgtttagcatagacaagcttaacattgtagatgtttctcttcaaaaatcatcttaaacatttgcatttggaattgtgttaaatagaatgtgtgaaacactgtattagtaaacttcatcacctttctacttccttatagtttgaacttttcagtttttgtagttcccaaacagttgctcaatttagagcaaattaatttaacacctgccaaaaaaaggctgctgttggcttatcagttgtctttaaattcaaatgctcatgtgacttttatcacatcaaaaaatatttcattaatgattcacctttagctctgaaaattaccgcgtttagtaattatagtgggcttataaaaacatgcaactctttttgatagttatttgagaattttggtgaaaaatatttagctgagggcagtatagaacttataaaccaatatattgatatttttaaaacatttttacatataagtaaactgccatctttgagcataactacatttaaaaataaagctgcatatttttaaatcaagtgtttaacaagaatttatattttttattttttaaaattaaaaataatttatatttcctctgttgcatgaggattctcatctgtgcttataatggttagagattttatttgtgtggaatgaagtgaggcttgtagtcatggttctagtgtttcagtttgccaagtctgtttactgcagtgaaattcatcaaatgtttcagtgtggttttctgtagcctatcatttactggctatttttttatgtacacctttaggattttctgcctactctatccagttgtccaaatgatatcctacattttacaaatgccctttcagtttctattttctttttccattaaattgccctcatgtcctaatgtgcagtttgtaagtgtgtgtgtgtgtgtctgtgtgtgtgtgaatttgattttcaagagtgctagacttccaatttgagagattaaataatttaattcaggcaaacatttttcattggaatttcacagttcattgtaatgaaaatgttaatcctggatgacctttgacatacagtaatgaatcttggatattaatgaatttgttagtagcatcttgatgtgtgttttaatgagttattttcaaagttgtgcattaaaccaaagttggcatactggaagtgtttatatcaagttccatttggctactgatggacaaaaaatagaaatgccttcctatggagagtatttttcctttaaaaaattaaaaaggttaattattttgactattcggttttaaactttttattcaacaaataccaagtccctgctgtatatatgggtttggaatacattagtgatcaaaacacaccctctatccctgcccttgaagagtttacactccagtagaggaaacagaatttacattaacaattataaattgtgatacatgctgtggaaagtgaggtgcatgtgataatggttatcaaacattatgctccccaaaatttccatcaccttgcagttgaatgaggcctatgtaactagtttattctaatgtaatacagaaagtagtgtgacactccactttctgtaaaggcaatgaaaaaaatttaccatccagtttctctcttcccctactgctgtgattaaggattttgcatgttctagatggtgcagctttgtcagcctgggtcttgagtgatactggagcagaactccctcaaattgttccttctgccacgctaaacttgttagatattagcataaataagaaataaaccatttagactgatactttgggacaattttttatcacagtgtaagttatatcctgactaaaacagtgctttggaaagatcagggaagggtttcttgagctacaaaagggagttaagaatgaagcaaaatgaaatatggcatctttaaatgacatgatgcaataaactctaaattgcaagttattcaatagttactgagcaccagatatgtgtcagacactgttctagatgcttgggatacaagtgggtgaacagcaggaccttgccttcatggagcttacattctagcaagggaaaatagtcaacatactatatgtaaggtaatgcgtgctatagcagaaatgaaaggtaagggagctcaggattgctgggtggagagatttcagtgttgaatggtgtagtccagaacaggcctcactggg

SEQ ID NO: 93702 - DNA, 176807 bp, Homo sapiens
ttaaaaaaacaagccaccagcctgtaactctctatcaaccagggtgttgtttttaagaatcttccacatttaaaacatactaactcaaaaatcccagatctttggctttgctttactctgtatttcaggtaaaccagatcattgatactattaaaacagaatccctgaaagaggcagaggatacttttcaggtttatatcttttgaaagaacatgaatcacacatttcaacattcagtataataccccaaatattaaaccatctaaaacaagcattcctcttaattaggagtatctaaagaccacaaaatgtttaattgtacttacatttgggttgcagaaaggaattctgttttaagtatttgaacaaactgaagctattgttttccttagtatgtcacataaagtctactttttaaccctcacaccatagtatactaaagtaaaatccaaggacccaaggcaatttgatcgcttgcaagcatgaatctagataaaccttacagtagagagaaacctccaggttgtatacctattgacattgcttaataaaaacttctagaataatggtgcttctggttgtttttccaatagcaatgcgattgcagtgcactgtggattaagttactgatcctttgaattctgaccttctgtctaaaacagctttagaggttactcttttttttttttttttccgatttgggagactggaggaagaaaaaattaatactgcttgaaggaagaaaaaaattctataggttattaggtttgggggttccctttccccagtctctggcaattcctttgtagtaataatagagcttcttgattctgaatacttaaaccatacatccaaatgcatcaggaaatgtgaagtgcacttttaatataattatttcctcagtgaataaatcaagtgtttatgatataataactattaaaactaaagcatatcatactgggtaactgaaattaagaaaggtaaaatgtaagaaattgatataactatgaaacaagacatgcatataattgcttattgtaaactcagactctttgcttttcctttttaatataaataataagttgggaatatttataatctctaggaaaataattaacctttttgaatatgtaaggagaaaaaacccacatctcctgatttgaccacttcaagttcaaggattttttctctattgaccatttaatgtacttttatttttgcatccttaaagtaacttgcaatatgttttcagaaataatcagctactatatagtgattttttctcttccatattgaatatattattttgctatatatcaatatgtatcatttcaaatatcacacacttttctggatttttattaactttatgggctatcaccttgcgtcaaaatgatgatacaatgaggagacattaatgtcccattgctccatctactgtttagaagtgactttgatggtgctagaaaaatgaggcaggttccagaaccaatagtgagggaaaaaatcactcatatttaaaaaaatcaggattcataaaaatataaaatgcctagcacagtgcctggcatgtagtaagcacttcataaatgctaattcccttctttcctccatgagctattcattgtttccgaagaatttaaaaactgtgaactcagctgtcatgaaacctgaaaaacacaaagcaaatttccagatcctcttacatgttttgggaggtgctgacaagattggttttgcccatggcttagagggaaaaatcttggcgaagaaacaacctgggttttctaggttgcttcatgtcaacagaaacccatttcacagcgcgagaaagcaaaataacttatcgctgagattaaacatatgcttccaggaccaattatttatatactttttggcaggaggaagaaaaagtaatggtttgccattttggaaaatcagttgattttaaaataggaaatctgttttatcatttttttaagcacctgcattatctcatccccctttcttaaaaatctgccactgcccttgctatcactattagtttcaagaagtgctgcttaaagtttctattaagaataataatttaaaaaaaaatctgataggcagccattactacataggataacaagtttcacaccctacataaataaatgttattattaatatataataatcaacgtgctctttaggaagtcaggaaataggttctattttcatattgtgttgatataaagactgtaatatgtattaaaataattttccatggtacagctaatagttaattacctccttagctttactgttaaaagctaatcatgttggagtttgaatggaaaacatttcacaaaatactggtagacattcagtttggcagatataatatcattcttaaaataaatagaggatgttttacttggttgcatttcagcagaaggctcctgggagcaggaccctcattgtaggtctcatgctggtggggaaagagcaggtcatggaagtgaccattcagaatgccaacaaggatcatagtgtcagccatccagacacggttccaaaggctccataaagaagccagggaggtagtgccatggcatggaccataagaaaaataaatttatgtgaaaccaggaagactggaagtatagtattttggaatactctatttgccattctactttgaacagtttaaattacaaaatgttgaatacttccacatattgattttaatcatgtggaagaaataatgagtgggatttcgcttttttaagaaaatgcattagtctttaagtgctgattatattttgcaacttactatactgttatttttgaaaaataatcatctcataagaagcatagaaacaaagagattagtaaacttttggaccaggtaatagcatgcatgcttctaacgttatttcaaagtaaacacaaatagaagaaaaataacttcaaagtgcatcatttattgacaacttcacaactgtaaaataattttattttcattattggaattaaaagggaaagggacacctgtattttatcctttgttttctcgtgtttatttgttatacttaatttgattaatcaactgttaactcatgaagttttagaaaagcccaagttaccttttagattgttgtaatgagtttcttgtatctgtccttgtctctctctctcacatatatatacatgacatttgtaatatgtattgaatattacaaatgtaatgtaaataccgtgtgtgtgtgtgtatatgtgtatatatatatatatatatatatatatatatatgacatttgctttttttttgatcatgcccttaacctaaaacactaaactcttctaccaaaattgaagacttccttcatataaccaggcaggtatctaggcaacagctggctctgtcacataaaacctgtttggtgatacagcatatgaaagatcaactgtctccttgagggttttcaaacatttcatatcagttgaatatttcaagtattttccctttccagataaaattatgtattttttattgaggaaaaagcatattggaaaattttaaaattcctttccatacatttatgtattgagatttacatggcaaatatgaaatagcaatgatttcttctatcaccttttactagtagcaatgttcaacaaatttccctaaattttgtagttatatgtatgactgtatttagggaacaatttagtccttaaagtatatggttacgttacatactatagttatagttggtgaagatttagaaataagaggctatcaataaatacactataaactaggtgttgttaatagcttaaatgtggctctttatcatagggtaacttacttttggtttaaattgtatgcaatagtaattattacatattggatattcaaaagtagtaaccatacmcaatttatgggtaaacgtgattgtttttaatccatctaattttgcttcaggaaaatgaaactctttaaaagtagtaaatatgcacatggatattacttttagtcagtgactaagctctttgttacataattatgaagcatgagctataccatatcaattagtggtcacattacattcatcatgattttactaattttcttcataattatatgcatcatttatttaatatttcatttggttatataaataaaaattaaatttcaacataaaatatgtaatatgatacatttaactataatgtgggcaagtaacttgtatataaatgtgacatactttacataatattcccactgttttgattttatatagttcatatattctggatttgtcaatataatctttcatggattagaaaaataatttcttactctcttatgtctaaaataattgttaaacaattggaagcatgaatacaatagctaaatgtaaaatttcaagcattgtttaattctccaacatctcaaattttagattttatagagcttagaaataaatgtggttgcaaaagtatttactgtttgatatcagattgaattaccacaacattacattttatctgacaatgctagaaatctccattacaagctgtattttattttctgcatatatactttagtatattgaataactgatacttctggtctgagaaagtgcagtaggtggtaacataattctatttctgctgcatatatgaacagatccaatagcaatcaactgtgttttgacctggcttcccaaatatggtagatgactagcccatgattccttgctggtactatacaaaatgaaatcctaggtgagtttgcagtttaaactgtcgtttatgtttgacaaagtgttcttttctgaggaattcagattggcatactttcggtggttggggggaagtctgtaataaattttggtcattagcagctttttattttttgtttgcatcggaatggtgctttcatttacatattagcaatataaagttatgattgtgtctatgtgttttattagttgacgatctggaaatgtattataaagtcatgcaaaaagttattgtgatttttaaaatttttttcacatctatcaagcgcctaaaaaatgaggacgctttttttttccttaaataaaagacctaatcagcagaatagtattctatgggtgatgacaaaacagttttaagaaaaatccgatgggcttaaagattttattttagagcacaaaattggttacaacgagtgactagtatcaaaataaacatttgtatttgaatgttggcacaggtctggcaaattgagatacaatcattagtcacataaacgatgccttctttgaatatttgaaatcaacataatggttaagtcttatcaccaaagtcatgtatctgtataaaacatatcttaactgaagctcagctctttaggtgagtgttatagactgtcatgcatagattccgaggtcagtaagaatttttttttaaaagaataagctgtaaagaaagagttctagataacatgaatcttttccaaaaaccatttaaaaatattaacactgaaacattatctggttcatagccaaggaattgttcacagaagatttgccattctagaaatcatttcggattcatccttcaggctttcattattaaactgataaaagcttgcacgtttgctttttcattttctacttaaagggaaatggccattctagttttttatttcccccagacctgtttcagtagtaggtacgttagttaggaaataaattatgaaaagtagtggattccctaagtttcagggcctgaaaaaagtttaggaaaagtgtaaaagataacgtgtaactactccccaaagatcttaattggtaactactgttgcaagaggacgcgtgtgtgttgaccacgtctcagagaagttattctcacacagctgtttattcagatagcgtggggcgcgttcatttacataatttttttttttttaaacagcaaggttgagtcagacagagcagtgctcctttcaattgttgcatttaaaccaataaggttaggacaagagaatagctgtggtttgcgttgcaaaaaccaaaaaaaaaaaaaaaaaaaaaaaaagaaagccccgaggctccatgggcagacctacaaggctgcgcaaacaaatcgagggatgagattctgctgtttctttgtctagggttctcagatgctatctgccgctgctgtttggtggggaaggagcgctgggcgcaaagctgttaccaaacagaacggtgggagctgatggctccgagtttggggcgaggtagaaactctccagtgccacttccgactttaagccttcctgttgccgtccactgtggcgggtttcttcctggggaacacgttttcgctcagtcgctcggcagcccgagcctgcggcagcggccaggcgcctgccccctgcgccgagctttcccctgcagaggcgctccactcccagaagcgccgcggctgcaccagagcgcctgagagcccccgcgcgtacccatccaggagcaaaactatgtcaggaatggaggtttgctaacccagaaaattcgaaggaacacattaaactggtggatgcagcagatgtaagcgctgtaagtacaagctgactgtttgaaaaattgtagtgactgacaacagctgtcctgtgggcaaagcccaagctaacaggagcgcttttattattgttttgatttgttttcaaagaaaaacattatggcatggggaaaattatgacactttgtacctagtactttatgagccacagggtttcatcctagaagtagaattcccaacctccaaattatgagcgatcaggatcattaagaaataattacaaattaattgttaacaattacttttgttatgctctagataaatgtaatgcaggaccatattcttgcagggagatgacttcatatctcttttctgaattgctgcacaaatctcaaatatatttgtgtggtattgaataaagcggtacatatatgttcattgcaatacataagtaacttttacacactttgatatgaaaaaaatgaagcatttaacatttgaaaggacaacagataacaacattaaattgatagcactttttaaggaagaaaatatttttgctttaataaatttcccaaacgttatattaaacaaacttatcttcagaaggtgatataacaaacatttacccaattaatatatttttctcttattgacactttgtaaggcttgagtggaccttgaagtttaaaacaagatctgtaaacttttgaattaccatttaaaatatttgccattcaaaatmagtatatgaattgttaatgactcatgggtttatatttattgggaggaggttttgaacacattagagcatagcatttgcaagaattcaataaattcagagctgtcattgaatttaggcaaacgtttttgttttatttcttaaaatggcaaggggtrcaaaaggtcgatagtaagcacatagtgtagttttataggtttgggattgtttttataatgtgtctttcaaagtaggttttattttatgcttgcatgagtcttttcccccacagtctggggtctgaggacatgcacacatgtacagtcatgcttttgcattatcaaatatttgatatttgactttctgcatgcttgagttctcccaaggcccaaagtgttcagtaagtgagcaagcagccatggattttcaatctttgaacattctttgcggtgacagacatagaggcytaattgagccactgttcagttttagagrgccaaatggaagtccactgctgtgtgagtttcatagacatgataaatgattttctcaaaagaaaatttccatttgtgaaaatcgtattaagaatacattgtaaagaagaaaaacacttgcagcaagaataaaaccacttgtttatcaaatatcaaaagtrtttcattcaacattttaagtaaattgatattgaaaacaatcctttaaagctattggtagcatccatgtggtttaaatacttatttttgttttcatgcggactctattttgtcattttctttaaacgacgcattgcaaaaagtaatgtactatactacttgaaaataatcagcagtagtattaaagcatttattttatggagtctttgataaagaaggaaatatagtgttaacatttaaaaaacattgacgtctccctagaacttcatttcaattttaggtttaggtttttatttttaaaatttaagttttcattacaacaatgatgccatagttggagatatcgattgaggagaaattttagcaagaatataccctaaaacacagatttatggctaaggaaaattttttttacataaaatacattctgatgagaaaattgccattgtctttcaaatttgggagtactcaggttgatctgtggttggacaaaactagcttgcctgccaactctatttatttagataagctcagtactttcactttgaaaatttcttttcagtttgaaaaaaaagttttaaattatagtcattttataaaaattgcttctagcaagcaaaaaaagcctrtggaaaacccgtaatttagacaagtacctacattttatttgctctgtgctgctgagatttagaatccctttccatttacagtttacttttcacagaacattattaactttttggcttcatgcatgatcttctgtcagatgcttttgatttgtaatttagcaaagtataataaacagtgcaaaagtcatgaattttgctctgcatcctgagctctgtggtagggaaaatgtgataaaatgtgtaccttaagtcttgtttgatgatctctcaaagcaagtttgccttctggaaataatttctggggttgaagagcatggtattaacagatttaatgtggctattcaatggattggcgaagtactatgtgaggtttaacaaaatgagagagacaaattgaatatcaacaaaagttacatctgtgaagaattataaatttaattagaaaaaaggcaaacttaaaagacctcattaactaatcagaagtcaaagttactagtttaggattcttgaatttgaattctaagaagttctgcttgttgctatttgtattttcacaactctgtcaatatgctactatgggtattctatacaatgagttttaaaaagcattaaagtgaaatgacttgattgtaatataagatgaccatttgttatgttatgggaaatatttttgcactcatagaagtatttaaattaaaaataccagattaggagaagacaagaaacatgctaagtttatgggtgtaaagcagaaaatgtgaacttactgaatgcctcacatcacttttctagaaacaataaaaaataatatttttctcttttgaatggaaatatccctaattaattattttcaaaacacattatggttttagacctttacaagacagaaacttccagagatattatcaaacatgagaggaaatcaacagcaatcagaaataggtgttctttttagataagtcattrtaagactatgtttccttctgcactgtaatcttgtactacacataaaaaactaaaagcatgtgaagtgtagcattttgtaaactgtaactaattttgctcacatctgtgtctaattgttgtctgcattcgcattcttgagagtagatttatttttcctggaccacgatgtggattcagctgaccagcctaagtgaggattagttgttttaaagttattttgattaaagagtcatttttaaatacagtaacacacaacacatggtttaaataatccctgagacacaaaagagtatatctgaagtatacttaatgaaatgtagatcatgcatatggactttcaaaagttgtagagtatgaaaatacagtagagtctagttgaaccagcataaaagaaatgtgttgtcgtgaaaatgcatgttttcactgaaatgtggtagactaattcttgttttgaagttcactttttctttattaacaacagtttgactttgaaatttaaatatgattggttaaagtacaaatataaatctaaccaaactttcaaagtgtatactgaaactaaaattatatttccaacattgtactttccagctaatgttaaaatggaaatgtattttaacatttaacagaaagaatgctttaaatactctttcacataattaagccaggagagttcttaaaactaagttagttctcacctataatttattccaggtgtataaaagtggagaaaaaaaaaaaagaaaaaggaaatttatccttgaggtatattgctggactttctaaaggaaaccacttaaacttgtgtgagaacattaatttttaacaaaaatcgcagaaggttgttatcacggaatgacacatctgtrggcattgaaatttaatttttatcttatactcaagcgtcttttaaaaattgtttttcatcctgcacgtattgtagaaacatacctagaaattttacgtaacattataccaagacagttggactttaatgatgctttattcttgctagaaaggtagtatttcttatttcataaatcataatttaaaaataacaggacttaacagaagacgtttggttggataactgtaatgccattcgagatgctttagttctcatctttgttctgtaaccctaattgatgtcagttcaggttgaatgaaaatgcacatcaaagatttggaattctgagccattttaaacgttttgcagaatgctctcctactgaggcgttagcctgagcttacaagccagcagcctggcctcacctgagctttatcacctgctggcagtttgagctgcttctggaagaagggcagtgactgtcaaagcctgcacattagttaagttgttcagtgaagtcctgaagtacagattcatctagaaacaagagagactgaaatgtaggctgactaggatggtgaattgattattaaactttccattttcttcctcggtttaaaagatggaaaatccaccaaaaaagctaactacattttctggtttaccaggcagaactgataagaacccattgaattttaaattggcgagggtaaatgagcacattgttcartggagtgactttgggtatgaaaacttgcctttgccttatatagttagtccagcattgtcaggaagttgcccagaagctgttttagtgaatgttaaatgacaaatagtaaatgtaggagaaaaccattatgataaggataagaaactgtcaggagtcaaaggggtgggcgggagctctatttcagctggtgataacagaagatgaaagatcttctgaggatgctggaggattactgcttgaactattgctgttaaacacgatcattttgtcattcgctatttttttccaagcaccttttccaagctgcctgggcaaggctgctttgcatgttgattgggggaggggtaatcccatttgcagctgtcataggccagtgatgaatcactatcacgtcatttggctgccttccccccctgacaaggggaggaggaggatagacctgcaggaggaaacaacagttgagacctcaacttaaagacaatatgcctttcactgctgcagtatcctcctttttctcttttggttaaaagagagcattgtcgttctcagccatgtgctctgtataattaagagctgacactgaagcagagtaacaacatcttctaatttttttacccctgatcacaggtgcaaacatctcaagccagttcagatgttgctgtttcctcaagttgcaggtaaggatattgttgatayttgacatttttggagattacctttctgtgacccatatctatttttgtctagtgtttcttaattatttctattaatagtaacagcctctgttggaaattacttaacagtttgtgtgtgtgtgcttgtaaaacattttaagtatgtagaaagggaataggagcctcggtttgaaaataattatgggctatagtttctagtgttaggaaaactgtgaatgtgtaatgagaatcaggagagaaaaattggattttagaccatttctagtttgaattcagaatatttggggaagtcaaagctcactttagaagtaaaatggttcatgttaagctgttttaaaaactgatacccatagtcaatgtaagtgcgacctctaaattaaaatgactgtagcttttattgacctgatagggtgaggagcaaatagtattaactttatatatgtaaacattaaacctcctcccatcttttttcttagaaaaacatacaaagtttaaaataaagtaaatgggccctaaacttttaagaaattggctgtaagaaaataatggaatctaagtgtgtttttagtgactttaaataaattctctcttcactaatagggtattaaatataaatgtatagttctgaaattgtgaacatgagtagtggcttttgtaccttttatrgaataagtaactgcagagtctaagaactttcagagggcatttaactggttttatatggtaaaattgcaaaattatagcactaaagtagaattgttgttatttcccagagtaagtgacagctgaggtattccgagtgctaatgcttgcagggacccactgtatgttggccttatcctttttcaactgggcacactgtatgtaatccacaaagcaaacaagtgagccgacatcataatgttttaatgctgcatttgtttcaagggaaacagaggaacaattaagtagtttgccagagtaaacacatgcatcaggactatctcattccctgtcactagactataggtttyaagtgttttatttggtttggagacccattaaattacaactgggtggtaaattataagggagtacctagtgctaatttattagatgaaacagattccacagaagagtgatctatttccattttacttctttacatagttgccttttcttttagaaaagtaatgcctttggtcctttttaatataaaaagacaacgatgactgtattttttctttgaaaattataayagatgtcattgtctcacattagaccttgtgacttgatgaactgtgtaagagaaaaatgaaattttaaaagcttcatgtgactggctgtataggtaaagcaagtgacatcttttgatagtgcatatgatgaagggatacctgaagtcaaaatgtgagatgaattattttgagtctaagaaatagatacaatgggacttttgtgcaagtgtgtttcaaaggtgtcaagtcattagcgcattaaatggtggtgttatgaatttggtacatctgtcaaatggaaggcttcttgtctttaggtctatggaaatgcaggatctaaccagcccgcatagccgtctgagtggtagtagtgaatccsccagtggccccaaactcggtaactctcatataaatagtaattccatgactcccaatggcaccgaaggtgagtgtctgccttctcactatttactttgcaccttgtttcttcatcagtatatgctttgttattaggtggttatgatttcagttgtcaaaatcataaaactactcttatatttcccctttaggtaataatgtgacttaccaatcagtactcattgttaggagcttcatgtttccagttattgtaacattgcgtagattggtttcgtttcaccaaatgcatatacatatatacacatgtatattatacatatttgtgtgcataacatttttaacctttgagtgtgttttatcttcttattgatcatgtacacactgcagtatcaatttgtgttgttttgttgtgtgaccagtgaaaacttggaattatttcctttattttcccttttgttgttaaatatagccgaatttgtttaaatgtagacgttggactggattgtttgtaaatatcaatgaaataatttgtgtgcctagtgttcttaaggctttggctatgaaaatataaataatttttaaaaagtattgtttatgaaatatacacagcatttaggtgatatacacactatttatttacttaaagattagtrtactttaaatgtagaacaattacaattatttctgtgtaattaatacatatgaatatttatataaattttatataagtcgaaatacctactttgatccacgtatacttaagattaaacatataaggttatatgtatttttgctacctgttatacagtcatttaggtactatgcatatttttagaacttcaacatatggaaagatatgttacatattgcattatatttatttctactctagtctattgaaaaattatttcttcatagattaatattttgcttatttattcgttactaagccttaggaccttgatgactcagagcatacctttcactagaagttcaataaattatccatgttagaattccatccatatacaaaactcttaaccatcatttcccagtcactatggtgatctttcattacacaattttttaaaaaaataaacaaagctaaatgctgtaaaattattgtgttttttggtgtgatattccaatatgtattagtgaaggcttttgaaacttacaatgttatgtaatttttaataataggaaagatataaaatcagttgtttctgatatgagatgctttgatttttattccaacagtgattcttttaatgtgtaaatattctgcatttttcttttagcataaatacattcatttcaagtgtttatgaaaatgggtactatcaaaaattgaaattttgcggatgtagcagaaaattaatctctgaatgaggtgccttttcctctgaaacttttttcttcccattttgataggcaatcagagagaaacttaaattatttataggaaagtagttctagtgtgtaagtggattttatagagcaaataaaattaaagcaagcagtcctatttcctctccttttgggctttgacttcaggtaaagcatgcctactgcagagtacagactgggtgtggatatagtcacccagactgccgcaggtccctgcgccggcaggcctcatgcaggagtcagcgtgagggcagccactgacaggagctgcagaaggcccgtaggtgacctttaacaggcatttccatcattgtgaagtccagataagacagtcattcaaattaacttaaaaataaggaagactaagtatgttaaaatattttgctcaatagaatatacgagtacatatatggaagagcaattatgaaatactggtagttaatttttttgtatatgaagaaatgagtaggactaagaagttttcattttctcaacattttattggcaagttgtctcctacaaaataagaaccatgcagtactgaaacagagtgtgtgtttagggttcccccttagatggctttgtgtgagtaatgtgtggtttgttttctaagcacatgtggagtaataatatatttctgaatatttactttttatagcttgatatcacattcatatttaggaatactgcactttgttggatttttgcataattaaaataagttgaaactattaaaacattttaggtaattatgtgatctcctcaaccaaactggaaaatacatagaatttgttctttatcttaaacttaattgttttatgtcttggaaatgaattttttagacttgatttcagacgaatacacaattactcatctcaccctgtttcaggcaatcttcattaatgtactttacaagcatggtggtggttagcaagtgaagttagaaggtatcaatataaatgagaataaatgaagtttctcagtctcctgagatattgttttattttagtactcagtttgaaaatgtggacccaaacttccctcacgatcggtgttacatgtccgtttagatacaaacaatattggaaagttctaggtttttattaagtgtgtgaatcagtttatcatgctacttatatgtctcataatatatctatttcattcctctctgtcaccactagaggagttaagcttaaaattagtgaattcattaatgtctgacaaacttctctggcgtgtagtcattatagattttcctatttcttctttgaaatcttatttagtttgaaaacagcagtgtttaccgatgaattaaaggaatgaaatcaagaaattcattacaatttaagagtctttaaaatgtcaatcacctcccctaactctacaatgaacattttcagctacatatgccatgatttatatttaagtgacttctccgcagcccaattgaaaatcatctcagcccaatagaaattaattaggtcgacagaacttccatttagtttacacagttgttggctttgcctgcatttatataggttgtcttttttcactcagagttattttttatttcctgccaccacttgttcctataatcaggctaagaaaacaagaaaatctcctgtatcaaaaaccataacttcatctgaagaacaaacaagaagggaatggaatggagaggcagagaatattaagtttcttcttaagtctgctgccarattatcctaagactcaatgtttgtaggttctgtactcacaggctagtgcctattttcatggttcatctaagggataaagacagaaagacactgagctacagcctcaagtactgtgcttttttatttcctayatgaaatgttcttcagttataatagytgtttgaatgtttcatatttcaaaactttcaactattcacatttttatacatccttccaacccctctgtgaattgttactgttgaagttaactgttgattggtttcacccagtttatacatctttgcaatataaaaatataaagaggtaaaaatagaaaatagtagcataaatgaatgcttgacttgcaatgaggaaagcactgtaagaagtgatatgtttccaaatgaattaatgcatatttttgttactattaaacaactcaagcttgacctggaagacactaatggatgcttatgaaaacaccaatcatggcccgtctttcaactgttttccctcttcctttggacagttagtctgaaaaacttgtcttgaaacacatagatttgtctttaggtgacgtaaaaccagatgcaattggaggccaagatggaatagaaattctattccacgtattttattgttaaagcatagcttttaagaaataggcttcttggtgatacttctattagatgatcatcaaatctgagaggatttgtaatgtttgggaatctgtgcaagcctctgcgtggcaaaggctttgtgttgatatttgtgttaagcatgagaagtagttgggaaaggttctttcgaaggattcagggctgtggccctaaaaggatttttatttacgtatgtaattaaggccttgtttgcaaagcagtgattctttccatctttgttttcgctggttgtcttaagtccatgggagcttaagattggtcagttcatatattgctggtttgagtgtttatttttggttgtcttggagtaaggagtgaggaaggccaaaaaagtgtgagcaagcaaaaatcagagctctaattttgagttttctctattgtaagcttagactcaaactcaagaagaagcttaaacttgtcttgaaactgatagatttgtctttaggtgatgtaaaaccagatgcaattggaatcttcactgcacatagggtttcaggaattctgatggtaattcaaatagtaattttgaattggtatatcagatttccaaggtgggaacagatactatcttgaattaggcagctaaattttctgcatttaaaatttactgtgtattacatattttaggatgatagattcagttttataaattatcagaatctatcttaagctgtttttatcatttttacaaagcttagaacactagtaaattatctggatttgtttttcttggtgtaattttaattttgtaaaatatagtgctatccaactagrttatttttaagaaacctgatttacaagaaatatctaaactggagcaaatgtgtataaaattatggtttgaggctgtattttataggctatgtttatatatttgtggttaaatattctgttgtcaatagaaacatggtaatataactttattattgtttacattctgcacaggatttagtttctggaagattaagggacattgtgaataaaggagtttctaaatgacatttttagtttgtctgtaaccacagaattggcctcttataaattgtccttaaacaaaagccataaaagaatgaacaaataatttgttaggatttaatattttcctatgttgtatatatgggaataattttcacatgtctgttgctaataaattataataatgctggctaatacttatgaataacctattattagtcactgtgatgaccattctctatgttttgctttattaatctttagaaaaaaaaatttaaaacattgtcaacaacatagctaagagtctgggcttgaattccagcttcactatttgctggctgtgtgaactcagacaagtcagcttctgggtggctgttttctcatctgtaaaatggggacttacatcagactttctgtgaggacgtaacatagaatttgcagcataattggaacttataagtgctcagtattaactgctataccgtatgtaaataagtcacttctacagtgtgattcccattttatgcacaaaaaaaatccaagacttagttaaacatgaagtttaaaggcacatggcttgtaattagtaccagtggcatctgagtgggtacttgaattaagttctgagtccagagcctggatttttaaatcaccatatttttctctggagagaatatgtgatttgcatcatctgcagatggcttttctaataccttttactaaacattggtgctttcattgccacattggtgccttcatggctgaatgatgccattccctagcaaacagcagcgctgtgcaagaaccagtggcagaggctttgatgacaaggacttcattataaggatgactcctcagggtggttatagtccggtcttgaagttctggtgtgcgtgagtgtgtgagagtccttcctgtggtccaggtgcacattgtattgcatcattaggttaactttaggggattgttttcaaatccttagacttaattataatttcatcagctgtctgattgttaagcctctctgagatcaaatggagatgggaaatcatctctgcttttcattataatggttattatatgcacatttggattggggcggtgttactgtgaaatttaaaaactggttgcagttttgctgctgctcagagtaaatgttttctacctcacaaaatatttctaagtaggtgataaatttagtcacacttttcttgactttaagaactaaattataccagccaagcaacactgttggcatttgttgggggctccattggaatagtaatgaccaaatctgagagtcgagaacgtgcctgggatgttctaggatcagcaaggagtccagtgtggctggaggagagagaatggctgggagtaaaagaggtaaagttagaggaatagaggggtggcccgtgtgagccttgtagggtggcagataggctctagcctctcacctgcagctaactgtatctttcataataagaataggaaccccagtgctgattgcctgcaactaggctcagggtttctagagctaggcttgctgataactaaggtctagatgtagacagcttttccctacttccaattgctaatagtgcagagaatcacagttctgtggcatctctccgctggttgggccagaactttggtatgagcagaaatatatctctctgagaacatccaattttctgagagaaacctctggttccctcctgggagatatgtgaaccttagtgaatggtagtatttagtcaaattcatatgcctttggtcatagattccctgcttttaagtaattcctgatttcttatgatatccaaggatgccttggtgtgagcagtatataaataaagtggggtctgttacatttcttctcaccttgctaacttggagtaagggtcaagagtaattcattctcctctctttcactctaagcgtacaatataatagaaaaaaaatacatacatgttacaaattttccatttttggtttgggtaggaaaaaattatctgtcatatgtcagtgactgtcaaatattgcctatactatagtagagagaaagcargtcttcataagcttatcaagggtttatgttaacgtttaggacccacaatttataagtgagagcttattatgattatgttcatggtaatttgctagttttacagatttggggttttttttttttttttttttttgcatgcctccagtatcccattacaccaaaaaatggtagacagactctaccaaacacattccaaagaggtatgtttatgtactcctcataatacaaattgggaacttttttcttaacattgtaacatgagtcaaaatctatgatgcttacccatttcatcattgtatttattactaataaggggattttaagtggaaagaatcctttttgtcaaaataaagaatatgaactgcattgactaagtttttgagtacatcatatgccctctacatacatttatcctcaaaacaatctttaggcactttgggaggctgaggcgggcagagcacaaggtcaggagatcgagactatcctggataacaaggtgaaaccccgtctctactaaaaatacaaaaaattatccaggcgaggcagtgtgtgcctgtagttccagctactcaggaggctgaggcaggagaatggtgtgaacccgggaggcagagcttgcagtgagccacattcgtgccactgcactccagcctgggcaacagagtgagactctatctcaaaataaataaataaataaataaataaaacaatctttagggtaacttttaggcacctcattttagagggtttaagtgaccagtctgtgaatacaatgtgttactgtgttgcagaagagatacaaaggcctttcaggctgatttcaaagccacattctttacactttaaaacatggactccccagtagcagtgcttaggtcactagccaaaaagctgagttcttgctgaaatagtttatcttccctaagaagtgtttatgttaccttatctaagattgtggccaagatgaaagatatacaacattcatttatatgtgtgtttcacctagaagagtttctaagtttctcgaagcagggacacaagtgttcactctagtgtccttagcatctaatgggaggattggcaataaagccaaataaaaaaaattgttaaataaatgcctcatgttactaagtatataatatacatgaatgattataagagcattcattaagtttacaatgcattaacagattcaataagtatctagagcctgtttttcaaatttttgaaattgatcatttcagacagttcatatagttgctatgggctgtccatccacaaaacatccacrgtcaacattgttgcctgttttgaatttgatctatagtgactgacttgcttttgacccatagtaaataactgcttcataaatagaaacttcaactgttagtatattaatrgtgataaagcaacttccacatagtccaagaaacaactgaatgatataaggataaggaagttagtacacttagggttagtgtgtagatggtaagatggtaaaggaataattggaagtaaacattttgaaggtggggaaaactgcagggagaaggatatatatakatatatatatatatatatatatattcactgcagtaaaaaaataaaagtgtgtatgtgtgtgtgtgtatgtgtgtatacatgtagtatatctatactgtatatccacaattacattgctaatttgagagctgtttattaagtgattctatctagaaatataccaaactccattctggccaaagagaagttcactattaaatgtgatttaccaccatactttaagataaggactatattctacagaggaggaggacatctaatcatgactgaagtgattgtggattgtggggacgcatgctggtgatgcttaacctgagtcctgaagaagaggtaggagaatattgagtgccatgccaggaagaaagagagagcttgagctttatagctgtgacgaagacattccgaatggcagaagagtgagtgtgtgtgtgtgygcgygcacgtgtgcacgtgtgtgtgtgtgtttgtgtgtatgtgtaagatgaggagcatgcacagagatggggtttagacaccaaagatgatgatgaagggctccagatatgaagttcaagaatttagattcaactgtacaggagctgtggaagctgaaggcttgtaagttggaaagtgatatgattgggtttgtgttttagaaatgcacttagggagtattttgaaactgtattcaaggggtagtgggcactaagaagggaccccaggtgagaagaaatgaaggcattttatctgaaatcatgcgcttatttacatattattatctttttctgaacaaatctgatacttgccttaaagacagtgatgtggaaaatgagtaatattagaaatataggaagaattgcatgcttgtgagagcagttttgtagtcggacttacctaaactaaaaaaaacacaatcacaattctgctgtttattcacagcaactaacatatgcattttgagaacagagcagggagccaagagtcctgaagcctgcctgcctctgtttgaagctctgccacttactagttaccaagtatgatgatgaatacttacttaactgctctatgcctctgcttcctggtctgtaaaatgaagatgataatactacatgcctgtagtgttgctacaactgttagatgagttggtaaagtgcttagaacagagtctgactcctcgaaaatgctcaatgtccactggctattattatctgttatttctgagcctctgccttctttgctgtagaatggcattgccccttcatcacaggtgctatgacagtctatccaaaatattaagtgcacttactggtatctactacatgctcaaaacatagcagctattattaaataatgttatatttttaaaaagaaacatatcttctgggactggctactgtaatgtctccaggtgaggaaaagatatattctcctcctttgggatcctgcatatcaagcacagcctttgcaggtatttggagtacttgaggtacttagtaattactatttccattaatactcaatgtggttagggtttatgtctgggtgctcctgtgagttggtgaaggatgagaaaaacatatgatctgagatgtacatttagtagattgattgccttttaggcaagtaagccattttcccacattgatatgattgaggttgtgagtctgagccagctcatctgcttccaatcttcatgcactagtttattttaccacccgctaatttgcaacatacactgatatacttttattcagtgccctggtattcttaaaccttcttattgccgtgccattcactgattgtccagatctatatcaaaggaatgattaaggatgataaaaccatattcataaaacactgggctttttggctgatttacaaaagatatggcaattaaagaaacgtgaaactgtgtgatcatggactatgtatttagcatttgaagctgcagtttcctcatctatgaattacacaataataataaatatctcataaagttgccatgaggagcaaacaatgtactgcttgtaaagtgcttagcaaaatgtatggcatatagtaggtcctcaataaatataaactacagttaaaattattactcttccattctaaaagtctactttaatattgcctgtgtcataaattgagaacgttgtattgctgtctgcattttttttattggtacaatcttttcatactgttgtgccatgcttccattattataataagctaaaaatatttcaatctcactttgttttctgaatataatatgtatctgttgaaagtcatcgaatggcacatttaagatttgtacatttaattatataaaaattttactttataaaaagtcaaaaataaatatgaactctagttaatgatatgaatgctgaagtgtttaggggaagtgtattatatctgcaacttactttaaaatatattaaaaataagatggttttttgaaggatagacacagaaaagcaaatatagtaacatgctaattgtagagtccagatgataggtttataggtgttcactgtgtaattcttccaactttcctgtctgtatgataaattttatagcataatattggagaaaaaaggaatctaatatttatttagtttttactgtatacaaataaactctgccagattctagaagaaatatgaagaggtatatggtactgcccttgtgtgaaagttgatttatgccaattgggtcattttagttatatccaactgtactagtttattttctgttgcttatgacagaatacttgaaacaagataatttataaagaaaaggaatttatttcttacagttatgaaggctaagtccaaggtcaagggcctgtatctggtgaggatcttcttgctagtggggactctctatagagttccaaggtggcacagagtgtcacatggggaggccatggagcatgttaacatgctagttcaggttcctcttcctcttctcataaagccgccagtttccctctcctgataaaccattaatccatgaacccattagtccatgaatggattaatacattcgtgagggtggagcgcttgtgatccaattaccttttaaagttcccatctttcaatactgacacatcggggattaagtttcaaaatttgttttggagggaatacatactcaaaccatagcaccaactaaatcagttgaaggagaagggggagaaagcacttggggaatatagcaccagctccaaaaactgaattttcttcaagcccagctgctgaaatggcctgctgtaaccttcaaaccagtttacctagtaactagtgagacaacctgccatgactccatgactaattttacctactgccaccagtcaccagtcagaggttggcagcctcccaaagcttctctagtgccaatgagcttttcaaaacaaaatgtaacattttctaataaaacctccttctctttgttcttaggacatactgaagaccatcctgctctgtgtatatgttctgaattgcaattctgtgattttcaaacaaaatatttaatttagatatttatctctctattttgtgatgactatgacacctgtcttaaggagctcacaggctggttaaggcagataagactttttaaacatttagcaaaaactaaaaggtaatataccaaataaattatggagactaggattttcagtctgtggcttacacttcctcagtagttggagagcaagtaccaaaggtccgcaaattcaaaaggtttgtctgtagggtgaggaaattaacaggccacatatatatttaactctttcacatatggacattctgttatgtttattaaaatacacattttttatctacaaattcatagtaggtttttgtcatacactttgggttctgaaatgttttggtgttagagggcttcattctcaagaaggttagaagccacagatctgaacaaaagtgctctcagagtacagaagaaagagctcttcagcttgctaaggtctggcccagcttcaaggaggagatggaatctgagctgagtattgggaaatgggtagaatttgaataggtggagaagagatggaatgcattctaaatgaagaaacaatacaaacaaaggtaggatagtttgggagactgtgaggagaccagtttagctgaagaaggaattgatagtagataaggttggaaggatcagttggagccaaactgtggaggaccctgaatagtaagctaaggaatttggacttcatcctggagtcggtagagaagccactgaatattttgagcaaggggctgatatggtggaagtgttttaggtgttagtctggcagcagttgcaaggatagattggattgggggagagatgagcattagtatggaggctcatgtaatcttctcagattgcatatgttaggaaactgagctagtgtggaagaatgagttgcaaaacaaaaaggaacatggagttgtaaaagacattacaaaggagcagtcgtgatttaccatatattatttcttttacaaaaaatttaaattagtctagaccaacccataagtaattgcacatgctgctattgatatatgctgtactttccatgaatagcaggttttgaaatagactaatgtttctttttggccatgtatactcttaaattcaagtttagtctggatgtgtttatttggttttcataagattgtaccaggtgtaccattgaagagctaatgttttttcctgccctcctttaagataaagaagatgaccttaactttactttttggagagataatgatcatatgctatatagccaatccaaacataaaggaatgtcttgttttctaaatgggaattaactaaagaaaacacattgagttcatggatatatgcacttttaggtgaagcagaaataatcaaatgggtacttgtaatattgartcaatcatgcatttagagtgagatgtcaaatatataaatttagcaatgttgcttttttccactttcatactttatgcaacaattttattctcttcacatctcccttgctgcccctttttaaatcatttgacacagtttctaaaaacacatttctatttctgcctcatggtttgagaaagagactcatgaaatctgtgagtgatactgtcattgaatccaacccgtaacataacgttacatggttgtgcttttgtgatcctctacagcataattgtgttgctttataaagggtccttttaaggcttatttgcagcaatacccaacatttacttttgtgggtcatgtcccatgaattattacaaattcatggtaatttatttacctttctttttactgattcgggcgggatcctctctaaacatacaaaaatttcagtaattgatagtttatgctaatgtgtcttctccaaatagtacacttttcaaaataacataactgacacatgtcctgtaaatgagacactttgcaaagcctgcatatcagtagactgagtgatgatttggagggaataaactgtcatcttgtttttagcataaacagtgttttgaattgtcctgtgcaatgtgtctagtagtatgaagtcagttgtaacctgtcttttaagtcagtttatctttatccattccctcaataaatattgaatttcaacgcaagccaaacgttgggctaagtcctgtagagatacaatcatgtaaattaaaaaaaaatgtagctgagtttttttggtcttagaggatcattttaggtcatgaagcagtttattatatattgaaatgcataagactttccaatataaaatgaggtagaagagaacatatattctaaaggagtcacaaacacagacatagttcaaggaataagaaaccacccctgagtactagatcacagaagacttaaggaaacaggtgggattttagttgaaccttgaagaaactgtgggatttagtcacgtgtaaaatttgtagaatattcaatgtcagagggaagggtactacaaagctgtagacttgaggaagcattaaacatcttaggatgccagttggtttaaatgatgtccaacttatggatatatggttctttatctataaatggggataatagtgccacacaggaaagttgggacaactagatgagattgtgtattttttcagtactcttgtattcttgcaaattactatttgtcatgcaaataaaaagtgtatgaaagaaatgaaatgaaaagtaaagcaaagaaaataagaaaaattctgtgtcagagtatggggggaccttaaatacatgattagagattgggaacttaattcagaagacagtgaagaacctgctgaagaccctacagccaggagcgactcacgcacatctaaattatgaaaatataaatatttgtttccaaagcagggagagtagaggctgaaagtccaatttgctaactttcataagagaagaggcagaaggtaattaggatagtggctgtgaaattagaaagaagacacttgtaaaatattagagtggtggaaattatagagtgtggccaggacagaaatgattgtgagagaaaatgcagacaagaaggagatgaaattttagaaccacagagtagtcaaaggaagaaaacctggagaaaaagcaatacatgggggagaagagaactattgctatgttatattgaacaatgataaaaagaagtatcaaggaatgaggctcattctataccatggaggaaagttaggattaagaagagtttgaactgggcaattgggaaagtcttcttggtaaaataggttaaaccctgctcaaggaaaggaaactttcattgaaattaatccatggaaaactgggaaatgttgcaggaagatgaaggatttaatgcagcatcaacattctttagaaaatagttggtgtggaagggaaatagttggtgtggaagggccaaagatggtgagggatgaggtatgtctcgggagcgtaaggaacgtggaaaaaactcagtggaaacagtttcagacagttgtcaagaggtggaaaagggggtctggcaagcaacagggtgactcaaaagaataaagacagaatacaatgaagtggacttggccagcatgtatggcacctgttctgctatactcatccatctggaacagcagcagaacagtgaacaatgagagattgcccatcctgagattaaaatttggcaaaaagagatgctaggagaaatgagaccacacagcatcctaggatgggagctagacgtggctggctctgggtttcaggctaggcaagggaggctgtgaagcaggagtcggagaatagatagggatttggaaagatggcttgttctgatgaggggtaatagcaactaagtgaatgaatgaggtcaaaggtgatatttcaaggaggtaatgcaattccaggcatgggtgcagctgaacattttaataaccaatatggaatgaaggtaagtcttgttgaagtagaagagatgaaggactcataaagagtgggagagggatggtaaactgagtttttgaagtccctgcataatatagtaggaaacaaaactaaaaggaagattgagtttgtgccaagcaaagacaagctgtgcttactgtaacagtttgagaaaagttgtgagatgagcttaggtgctgctggggagggcctgcagctcaccaaggctgctgccttccctgcgcgttgcagygtgaattatttgtaacacacaggctggctcctagtccagcaggcagtactgtcctttgtgggtgaacttgctttattaaaacagcccacttattttatggtgaaaaatataactaatcaaatggacgaaatatttgtttcttctgaatggtctgacatcttctgcagatgtagaagtcttctgtacgactggaaccttcaaggtataaccagaagttgcttgataagcatggaatcatggtatgatgggttagtggcatgatcttgatagctaatgtcaccgagctccaatggtctgatagatagatccacactgaaatttatgacgaaggaagatggttttctcatttttatgggccagcctcccctaaaaaatgtcagaaaaagatggccacattttctcctggaattattgatcacaattgccatgtaaaccattctccttctattagcctgtttcttcagaaaatatacactgccttttaatgatcaaaacataagttttcttcatataatcacaatttggtcctgccttcttgagttatttccaagttaccttgatttaattttggctctcttgaagtgtggcctcatggctgatcttggatacatccctttacttcggattcttctaactttcttttaaaggggaagcytaactttartgtgaagttcatgatacatttggacccagttatctatatcttaagaaagactttgatttgtcrtaaagagacactatagtgatagagtgactataaaagcatgggccctggacctagcacagtgtggaatgatttagaagcatttatctttttttattctcacctgagtattcacccacacttacagatgaggaagccgaggcatacagaagttggctaacttccagattcatgctgttagatgcaaagctagattgaaattcaactgatagttccaaagctggtgcttttaactgttctatattgttcctggtattactccacaggagaaaggaggaaggcattcagcccaacagagaatattgctactgctacttttaatgatgatgatgaatatagttttagctcctactttatatcaggtactttatgtacatttttatgaattcttattcctgtaatacagatataattttaaaacatttgtatatggagataattaagatcaaggagattaaatcacttttagaaagtcttatagtaggtaactggattctctgacttcaagaccaaaactcaaaggcattggtggagggaagatcatttcatatctagagagtagcaagttgcccagcattgctcaggcctggagtgcatggccaagtgaaggagttggaggaacagggagatttaagggataaaagggaatttttgaatatttttaaaggatgaatatatttttaaggatcagaaggaagattggaaacttagaatggtagaaaaagagactcgtgtgggggcaaaagagaacaaaagttgctattttctaatagactggagtcatataatgaagagtatggtggagataaactaatcctagttatttaaaggggaacagatcattcatagtttttcctttttagatgggtggcttagatgggatagttgttctcagatgttacagtaccttaaacctctaagaccaagaaaactcagtgtatgtttttaaattcaaagcgttggagagatgccgtattacatcatctacagcatatttataaatgtggtggtgctagtgggaatgggatggataaaattttggtggccagagatcattctcatctttttaactctctggtggatgtatgtttggctacaataaagccagaagtagtctctgtttctttggctttcattcagaaactattttacattacaataaatcaccagtctttagcatcaggtccctggtgatcaaagtattcaattacagtacctgataaaatcatgaatatcctggtggttattttatgtacatcctcttctcttcaacagtgarccttttaaaaaactgggttcattgggaaaagggagtctttattccttagtgtatagatgggtatgtttgaacaatggtgaaaagcagtgttattggggcctaaaagaaaagtatcctcttcctttcctttctaacctttttgcctagttttaatggatttcaagtataattgaatgtgcctcttgggagtgaaggctacattcgattaagctaatcatatggagaatagctggtgtcaattttaggggtacagaaacaggagtggttttggtgtagtcaagcrttcacaaagtagttgcatctatagaatctgttgaatcatagcccttagatttgacaaagacttggaagtaaccttgattgacatctcacgcagtggaacaatttttttcttcacatcttttcctgacagttgggcatgaaacttctatgtgagaatttccagcaagttcactaggctaggagccctaagaccgtaggagagcagggacttcgctttccactctatccccagtgtgtggcactgtgccccagcagccttgttgtggagtagcttgtactattggaaagtcccacttattactatttcttcaagctttagtcatgggccttggagtcaaaaacatcccaagttaaatcttatttctgccccttactgtgagtctttgggtgacttcctaacccctttggttttaatgtgtgcatgggaaacaagaagacaatactgactagggagtttgtctattctgagaactatttgtagagttgtttaaaaggatgaattataatgtctataaataactgacacatagtaggcactttacaggacctgtttccatggcacctarttctaatcttttgcttagtatgttgtatttgattctgagttcagaatcttagtggtgatctgtctggcagagagtgaaatagaacgattgctttatgtgtatggggcattatattaggttttgtgtgtgtgtgtgtgtgtttttaaggaggtaaggtatgatgtggacagctaagtaagaaacttagaaactgtgtgctagcaatgaaatactgcctttcctgaaacgatggcagtgtaatggtgatgaaaagcaaaatcattaggttgtctggtgtcatggagagggaagggaaatacaggcttatgtcagaatttttagcatcaacaaagacttctaaacccaaaacaactggcagaaaagtgaaaacttcagttacaacttcagttacaccattgtttggtctacattaaaacaatccagcagagtgatttccattagtctcacgattgttgttttccaaagcttgtttagaagccatctgaaaaattatttttttaaaaagtgactatccgatgcatctatttataatgcttatttttaaactactcattatgcattaggagaatatttgaagatccaggagttatgtgaatgtgccttttccctggtgtttataacagattggtgatgttgagaggaggaaaagctgcattttctccatcatcttttcccgcttcaaaatgtatttgctttataagagaggcctccccaaatattctctcatgggagcctttgttttaggaagcatgttaatgatttttaggtatcccttaaaatattactgcattctttctgaaaatctgttactaagaaatgaataccttccacaaagcagggtaggcaaattctgatgatggcacttcaccagtagtttctaaggaaaacaacgatgctacttcttcttttaaaaaaatgtaaaactagagagaacaaaggcagatgtgctgaagttgttggcttgcctctttggtaggggaacaataacactgtcaccatatcaggggagtggattgctttagagaatctgtagcataaatctaaaagttatctcacagcacaaagggacttgaccaaatatcatgtatgtatttcacaaactgtctgctatcaatactgttttgaaatagaaaactttgtttctgcttcatttacattcagttatgtttttggtacgaagcatacataaaatattggtgaattggcagtcagatatggctgggtggtaatgatggtgcattaaatcaagcccttggttttttagccatgctggagaacccagaaggtgtgtgtgtgtgtggtgggggagaccttgcccttgagcatcaggaagacctgctggtgtcgacacccacttacttcctgcttccccacatctttctgttctatccttttgactctgaccraataacagattttttccacaaccccaggaaatgattttatatcacatcatgtagattttgagagataatttatcaataagtaattcagtaaatatgtaaaacaatgatgaatttaattacttttacagtgctgcttttaaagggtaacttgtgacaatagattgtttcctaaggggaaagaacttaatatgtgaatttttttaaaaggagtctatttatgcttatgatatatgttcagttagggaaaatgttttttgaaatgattttcttgtcattactctgaatgttatatcttctcttccatgtctttacaaataactattaattcaatatcgatgtatgttgtttatttttgtagttaaaacagagccaatgagcagcagtgaaacagcttcaacgacagccgacgggtctttaaacaatttctcaggttcaggtaaggaataaatattagattttcacatcaacaccaagcattttttctagtttattcatgtaatgtccctgtgtatgtatatgtatacatgtatatgtgtatatatgtgggtatatacgtacttatgtatatatacatataaaatagctttgctcagagtcacatattaccaattctgtttttattcattgtgaagaagtggttgctgaaatgttgctatccaataaatggggtataaaaagggtgttgttcttctcctttcttctactaattatatttactgtgctggtgactcctcccccgttctctcttagatgtattatttttccaggtcttcaaatttggttaggcaaaatttggtgttttacgcttctaagcagactcgccaagtcatcttgctaagtaactgtcatatcaactatagatctaaattaaatagactctgtaaagcagcattaagttcttcagttagtttttaatctccttcacattaataaaacctgcctccaataaacagaatatccaagtttcacaagtgtcataatgaaattactgacaagaaagtgactgtgatcataaggtggttgtgagaatgtgattatatgtttgccaagtcacccagcccagtttggaatatttcatttaaaaattatttatatcagaggtaattcttagaattttgacttttttttaatattgcctgctataattttagcacctctctaytggaaatgctataattccataaagttgtgattgatttactcaagctctctggatcatttatttaatacataccacaacaaaaagaaattataaatacaaaatgaaatgcaaacacacaacttcgatactaatgataccaggtgaaagcgataaaaattaacaaagggtgtaatatccatttgttctttcctaaaacatttattagaatttgacttttgcttggcaatgtggttggtgccatgctgacttcataggtgtatgaaaatggtcctgatccagggcttagtgggatgaacaaatgaacagaccatcacagtacagtttgatgatgcagagggaagcccagagagcccaaagaacacccacgaagggacctagtggagaccaggttggggtggggtgatcagggaaggtgtcttggagtggatgctcagtcttaaaaaatgagtaggaaagaagcactgagagagagatgctggacaaatggacactccatgaaaggagacagcagcacagagrgcgtggatctttggggaactgttaatggttcagggttcctggtgtgtgtacagtatgagagcaagggcatgttgcagagggaggcaggggccagagtctaaagaggcttgtgtgagcttcatggaatttgtgttttctcctgtgtgcaatgggaggcatcaaaggaaaggggtcgcatggtcatattcataggacagaattatggccaccatggcaggatgaattaggggcaggtgagctgaagtggagaaatcagggagagatttttttgtattaatttgagcaagaaatattgaagacctgaaataaagcgctggcaatgggtatgggaaggtgatggatttggtgcatttcatttacgaagtagaatttatagtgggcagtgaccaatgggtataggggtaagtgaggcagagaaagaagttaagagccaggaaatgcaagaggagcacrgttgacaaaggaagacaggaacctcagttttgggcatgttgactgtgaggcagcatctacctgcagatgccaagtatattagggtttggagctcagaggagatttggcatgggaaatttgaaggtatacagggagttaaagctagtggggtaaacaaagttgaagacagaactcacggaaagctaatatatatgacatgggcagaggatcaaatgaaaacaggtaattcgggataaagcaagttttggccaggcatggtggttcacacgtgtaatcctagcactttgggatgcagaggcaggagaatcatttgagcccaggagttggaggccagcctggacaacatagggagacctgtctctacaaaaaataatttttaaaaaattagctgggcgtggtggcatgcgcctgtggtcccagctactaaggaggctgagactggaagatcacttgagcccaggagttcaaggttgcagtgagctatgattgcaccactgcacttcagcctgggcagcagagtgagactctgtctcaaaacaaaaacaaaacaaaaacaaaaaagcaatagtgttgaactggaagcaaacacagggaagaattttaaggaagcactgtcaataatgtggatctgtacacagctcttgagaattatttttaaaacgtgtcttgagaaaatgttaactatattaagagaaaaagcaagttatgaaagagtcatattttcagtataatcacagttttgctttcttaaaaaggcatctgtatgtacatatatgggcctgtgtatatgggtctaaaaattaacagtgattctctctagatggtggaatataatttgaatattattccttctgcttttgtcttattttcaaaatttttacattatatatatgtgtatatatatatatatatataaacatttatacttttaaaaagtaatacttttaaagtccaagttaaaaatcatgtgctacaaagagataatctttttgaaaatatctgtggaaaatagtattgcatcactatcactgtttttcctgattttgataactgtactgtggtaaaagaattctttgtttttaagaaatacacatagaaatatatatatgtatatatatatgtgtgtgtgtgtgtgtgtgtgtgtgtgtgtgtgtgtatttatttatttatttagagacagagtctcactctgttgcccaggctggagtgctgtagtgtgatctcggctcactgcaacctctgcctcctgggttcaagtgattctcctacttgagcctctcgagtagctgggactacaggcacgtgccaccatgcccagctaatttttgaagttttagtagagatggggtttcaccatgttggccaggatgatctcaatctcttgacctactaatccactcgcctcggcctcccaaagtgctgggattacaggtgtgagccactgcacccggccagaaatatttataagtaaaaagacatcatacacaaaactccaacagaatgtgaggtatatatgcgtatgcatmcacacacacacacacacacacacaagaaatcaaggataaagctaataacatgttggagaatttggatgaaggatatctgggaagtttttgtgctgttcttgcaacttttctgcaagtttcaaattatgtcaaaattgaaaattaaaaaattacaagcatcaatggattagcctgtggcagtttcagtagatggatgaactttatccttgtccctgctggaccacatgaccaacttctgtgtctccagcatagctcttagcagatagtatgtgctcctaaagtttattgaatgaatgaatgattcatgaataatgtgggggagtgaagatgaggaaaagaaaaatgtctttcaagtacatagtgctaaaaagaagggaaggaaaggaaattcgttagagagagggatggcatttaggaggtcagggtggtttcatacrgctgacacaaactcaacagaggcagaggttagaggtatgggtaagtagggggataattgatagaggaargcccctgatgggacagcaatagcacaaatccaaaacagaagcggatcaggctagaaaaggaataacttttccactgaaacattggggaagatgcaatatgaagtggtgcagatgaatttgaagtggatgaggtggcagtatgttgagggagttcctatccgattcttcagttcagaccctccaaaggctcccattcggctctacgggtaaaagccaaatccttaaaaagcccacaagccctatcatcatctgcctcagagactgtctgaccttgttgcctgcccgccttgcttactgttcttcctcccatgtggtagacatgctccccacacagtgtgttttttgctggcagtcctttccctgtacacctgccttactctccctaacttcgtctgtgttcaaatctcacctcatcgaggcccaccctgaccacttgactcggtgcagctctcctgttctacttctgttctaccggatcaggttactccccactctttcctgccaataattatgagccttttgcaaatgctgtcattttcttgtgtattatgtttagttttggactctcaccccaccaaaacataagcttgtgttggcagggattctgtcttgtttggttcacttctatatccctgacacctamaacagtacctgccacatattaggcactcacatatttgcctaatatgtgccacatatttgaattaaagaaaacatgaatgaacgaatgatggcttctactttttcctccgaagtgactcaaaataagagtagtgataggcatgtgagcttgaagagttggagaagactgaaattgatgtagtggatgctggggaagtctgaggctgcctagaaacagagaataggatggacagtagagctgaaggttgaacaaggctggagctaatgaagatgggcctgtatggtagagtgatttttctctacaagggcttagcagaccatgtgaaaagatgctgggcttgatccagggtcaagggtttgccagatagagcatgagagaatatgaaattaagaaaattgagagtatcagtaaaggaatggtttaaaataatttttcatgtattcaagacgggtagaaagaagaaggtaggggctaataccgtgagaaaagatagggatgtcaggggttcttcatctcttgatgaggttggagaacacatgaaatgagaacaaaggaatgaaaattctagacagaaatgatattccttacttaaactcagtgaggccttcaccacatgcctctgtagttagttccgcacccttcatcactacttatgggattaatcctcggtctctgtcttcctgctaaactgtagccctatgagaacagagattctgtttgtattattcagttgcagtcctgatggtcttcatggcatcaagcatacaggagatgctcagtaaatgtttgctaaggaaattaatgaattgatcaatgtgattgtggcttgagaccatggagtggggaaaaggggccaggatgtggtcttgagcttgatgactgaagtggaaggccagggttgaggcctagacagactgagaaaagcagtggatgtataacccagggtgatgttggggagacatcaccaaatcctaaagtttttgataaatgtaggcagtgtccaggatgtgggtcattcatggaagtgttgaagatctgtcatcaaccccagagaaagaaagatttttatgggagagtagaaaaccaatggtttggaagaagcaacaatgaaaatatgttttcaggtctttgtgacatctggaatctgaaagagcaagcagcctcaacttgaaaaagatacacaggagaagcgagggccttggagaagggcttagctgaaggtgaaggggtaggtggtggagaggctgaagctgtaaaggatcttgttttccatagtttgattctccatgttgaatacagcggaaagaatcaggagagctgagggggctgggtgaaggcataggaagcacagagcaccccggaatcggtattctcttgttttacattttcttttctctctcttttataagtgatgaaagagacaaaaatcaacatactggaatggctatgaacagggcttacggtttgtaaaagaaagaagtttctaagcccttaactccaagctgtcctttagctctgtggccaccactcctactttcttctccacaatggcttaaaaattcacatgaacttggctgggtgcagtggctcacacgtgtaatcccagtactttgggaggccaaggtagagagatcaccaggacaggaggtcaagaccatcctggctaacatggtgaaaccctgtctctactaaaaatacaaaaaattagccgggcatggtggcgggcacctgtaatcccagctattcaggaggctgaggcaggagaatcgcttgaacccaggaggcggaggttgcagtgagctgagatgcaccattgcactctagccagggcgacagggtgagactctgtctcaaaaaaaaaaaaaaaaaaaaaagaacttaaagattcccgccctaactattattagtgtcttaacaaaatagacagtgaggataaagaagaaatggagccactctgatgttggtgattgctatctccacctgtctttcaaggagccctagcacctgcaagccttgaggacatagtgactcactctcactcttccagggaagccctcagggatcttggcgtggggagaktgaaagaaaggaagaaaggggaggctggttttccaaggcatgtggctgagttgaaaattgcagcattgtttatcatggtttccaaatatcgtaaagtgaggcccatttactctttatcaatgaaaaacaatactttaatgatttaaattttaagaacaagagggattgcaaacaaagtgttcttaatatctttactgcctctgccatttctacaaagcctaaatttgttaagttgttaagtaaactgctagttgatgtctggtgatatttgaaaattgaaaatagaagcaggaatgcttctggaggagaaaaaatattgtgtaacaaatatggtttctctttttaattgttcataaaaggtatacccttctaggtctgattcgttcattcaacaattatttattgagcacctgctatatgccaagcaatgttctaggcagtgggaatatagcagtgaagtggtagacagggtctctgccctcatggagctttcattctttgggagagacggataatacatgggtaagtgttaagtgctggtgtatgtaaatagacaactaaaactgctaagaagaaaacaaaagctgatcaaagaatttagtaaaggaatgaatgggagtctcttttagaggacagggcatctgagcagagatcttggtgaagggcagcaataagtttgggttcaatgaaatgtgataggataatggagggcttggggttgagggtcagggggtttgtggcatgacttaatttatgtttttgagaggtcactgtttgatgcatggaaggtgctttatggggtgaatggtgacatggaaacagggagaccaacgttttcctggctcagaagaaagatgactgtgttagttcacatcttcctagaagagccaccaaggcaggattaactgtgccaggattttgttaagggaaaggagagagggaaggaagggaggttaagttaggtgggagtgcagtctcaggacatttcagcaaggccatcagaggagccccagctctcccaggaacaggcctgccttagtatccctggtgcattgtcactggtcgggttaagccctttgaaagtgtcccctcacccccgccctgcatggcatggatggattgcagagcttaacagctaggcccttgttcagcttcatcccctgcagcagaagaatcaggaggtgcttcttctgtttgccacaacattggtgactggaacagagtgataaatgagaagtgagaagttgtaaggtttggggtatattttgttgggaaaacagactggacttatgataaaagggtaggtggggtttgagggaaagagaagagtcaaaacttacttctaggcttttgacctgattggctgaatggtgttgacatgaaggagcctgggggaggaatgagctgaggacctgccaatttcgagagttcttttgctcttcccagtggtcccaagattgtaattattattcatttttgattctcctctcccttcctacaaaaagattggaggagattctttctatgttggacagagaatggaataattgaaacagatgaagagatattggttgtccgtatgttcccaaggctctgtggcatatgtaatttggagtgttctaagggtaaaaggaccatttaatttaccttgatagatgatctggggtcattccctttgttttagatgattttggtcctgtgaaattaaaattaatctgaattcctgggttactgtttagaaagtttaaagtgtttcatgccattacagaaaaggtacttcaggtataagatggtagatttttgactacaggccacacagagattgtgcgagccatacagaggtttggatttaaagaaagcccaaaagatatgacttcttatatggcctttgacacattcagtaattttaagcacacctaactaggtgagtagttataagacagcattgtgggttcttcacatttatttcataaggtatactacttactccaatctatattgccamagaactaagttaggtttattatgtatgtttattaaaaaaacttaaaataattgaaccattcttcacgttattgtggtttgaaacatctactttgcttatgacctaattctcacattctttttaaacaaatagtgtgtgttgattccctctaccacataccaggccctgtcaggtgctgaggaaataggataataagaagaccctggccccagaagcccatagttagcagaggaatgtaaccatctatacactacatacgctagttataatgcaatgttgggggtgctacattgccaaggattgcaatgttccaagaaagtacagagaaggaagacgttatcctaaagggaaaatgatgacttagtctctgtggtggaatgtttgtcaggcagaggaaagaagagctttacaaggaaaatgagtctagtgtgaacaacaaccaaatcagacataaaagtacatgccatggatgggcagttctgaagtctgggagcctagataacctacccaggagggagttgaagcttgaatctctttgtattctgtgccaaggaatttggaatttatcctagggataatgtgcactgtcgaatgattgtgagctagagaatggatatgaagaagtttccatttaagaaagaacatggtgttgacagtattgagagtcagaaggcacaggtggccatctctgagtgggacaaagggacagtggctctgtaactgttgcagtagtccaggtgagacatcattattgggacctaaaccaggacagggatcctgagagtatggatggagtatgcaggacagaccaacaggcaattctggattgggggtcggggagccacctgagtcatgaaatagaggggaaaacaagatggctgtgaagttctaatttccacgcagggggtcggaagacagtatgctttggtgggaaaagttaggcagacctgggttcaatttgcttagatacgttactttacttctatcagcccttagttccttatatgtaaaatggaaacagaaaatccaaccttgaagtattttgtgggacagatggtgatgcagtccactgagtagagttgaaaacacagaaggaaaagacaagtgtggggtaaaagttagtgggaatctgggaaaattatctcagtcttcatgacaatcctatgaggtgtaggtagtattactgccatcattttataggagaacatatggagacatagagggaataacttgactaagcccacatagaagaagtgggatttgaatctgagctgaaattcaattctgattccagaacctaggcttaattcccacgttctgcagcctcctaagtctttcatcatatgtatatacacacatactgtgcatatcctctaaatcaaagccttatgggacttcctgtactctgtgtagtaacccataaccctgatatcttttattctgttgtttgttaaaaagaaagaaaaaagaaaaaaattgttgggtacaacctattgagtttatgaacttttcatgagccatgacccacaattcaaaaaacatagacatagagctaggaaagaataaatggggtttctgtggcttctgtcagcaagtagcattgcatttttttgttgtttggtttttaaccaattattttgaactccaattgtcccaggaagagattacttctccaataattctgctgggtaagtccatgttacccttggcctgttttctgtcttagaggagcagaagaggttttagttgcagatgacctgggcaagtggtagtgctcatagtccaagtgttctctcactaatccctctcttctataaactgcagtctttaactgaccatcccacagttctttatgtgtcacccttcccatgtgtatcagacagatctagtctttgcaccttcgcacgtgcagcatctagcacagcacctggaacagagtagtggctcagtatgtgccagatgatggggtataccagctgggccggcttgccatctcttcagtacagatgctgtctctgccaagcggccagccagatgtttgaagtctgggagcttgcaagagtggtactaatctagatctactgttcctggacaggccttgtttgttttacaaggaaaagattactcatagatttgaagactctagtccaattctaccattgtcatcccaaacacaagctagaaaattaaatttgagaaacattaatgtaccagtgtgacaatgggaaaactatatgaaactttgagtacatggaacctcctaaaaggattttagtgtagaatagaattaataaataatagagcctccgaagatagtaattattggtagaagaataaaataaacattacatcttataataattgcccccaasgaatatgcatcttagcccgatagagattagagaattggaggaaaaaaatatgtacatgtatacccataaacgtaaatatgtgtagatatatatgtatgtatatatacacacatatatgtagatttatatatatgtagattcactgtgtwtacaatgaaagaagctgaaactgccattttcaggactttgttaacataggtttttgcttcttcagttcaaaattagagcacaagaacatttgcttggacttcagtgcattatttaatcaagtaaacgtgattaagaagtaaagttctgcttgaatgcttaaatacctctttaaaaaataaaggcaaacctttttttagttgaacattgaagttgatcacatataactaaaaggcaaaggaagacccagatcagcacaggaaaaaacaggcttagcttgcaacttgagaaatttaagatagttataggaacgcatttttactaaaaaccattgctaaatcaatgcaggcaaatgaggatctatcctgtttcttctcacccgagagaagattagaccatgtttcttggtaatacagcctcaggtttgtgtgttcttgctgagcacaaacaataggccagctgacctttcacattctcacccaatcctgcaattcagcttcatacctcccctttcagcacagctttccaaacagtagccaggactccttgtactctttaagtattgccactgtaaaaactcacagcatgccagcaggtatttgcgaagattgtgatgacgttttctaagagttcatttaaaactagagcccttaatcagtttctattcattcctctttatagtttaactttctgttaggtggaaccatatgaaatttccatctccgcaggtcacaaagaccaaatatctgaaatttcatatggccaacctatagttgaaaatatgtcagtgctttctatatattttgtgttttgcttggattattgtgcattattttgttttgtttttgttttccagcaattgggagcagtagtttcagcccacgaccaactcaccagttctctccaccacagatttacccttccaagtaagatgtattttctcttaatcaataaataacttctctgagtagacttttatttatttaaagtcatgtctgtgcccacatgttccatcttaatttaaatgaaagtgcatttcatagagatgtaaacatattgatacaaatttattttgagcatcatgtagtggagacactgaagtatttcagtgctttgtcaattctgtgtgaaagttttactttaagatacaatatttagctggaatttgtgatgtggttgttaatcggtttgcatgtttccatctaatgcatgggctttctattttctgtcatttctgacaaatagcagaccatacccacatattctccctaccccttcctcacaaactatggctgcatatgggcaaacacagtttaccacaggaatgcaacaagctacagcctatgccacgtacccacagccaggacagccgtacggcatttcctcatatggtgagtaacctgcaactgtagtggtggcgttatygcatgggcatgcrtgtattaacatgtttgagtggtacttaaagacccaatctttggccaatttagaaygtgttgtcaccttctgtgtctaaattcttagtatgattgtttctaaagagcattataagaactggtagctccttatcttgaggtcagaggtagcgaaaagattatgtggttcgtatgccttcytgctctcatttttctcgatttacatctcaaccctgaatttgccatttgagcactgggctctggaatccaaaatatttttgtgcatatttgtgataaaacgtctgtgaatgaagtcttttggggtacagattcatttcctatttatcagatgcctagctgtgattaggracgtacaagtagaattcaacaaactcttgctttaaactcgagggtggtaatagtctcaaatttcagcattatcaaccattaggaaaagtgatctatatatcactgcctggagtgtactttgaagaggcaaatcgggaaacatttaaggctcacatggacatttgttccttcccacctggagattatctttatcttggtgtaatttaactcactttttatgggtcaatacctgtaaattaaaaataaatccaacaaaatcccaaagcttaattaaaaaaatttcagaatttcaaaataccttttcttccattaaattgtcattgcaattctaagtagattgaactgaatagaaacacttgaattattggcattttattaagaaaagaataaaaactagtgatcaaggaatagtacatggacacttggaggaaaggattgatagaataagtaattctgtgcaacaagtacagaattttttgtgaccagtattctaattgtgcttctgcttgatactgttttgtagtattcttttctgtggtatataaaaagaattaatgctcttctttaagtatttcattaataattagraggtaaattactttattccttttaattctatctcaaacaaaatcaactgtatatgaatttcttataaaatatatacaaataatctaaattatgtacgacttcagcatttatagttttattttaaaaccatcagaaccaatgttttctagataggtatttttaaagtagactttagagacagccctaaaatggaatttttaaaactatctctcttttccataacttttattcacagtttctcataataatattagctatggattaaatttagctggaatttactttcaaactattcttggactacaagaagaaaaaggatcagctcccattctataatagaagtcaaggcagtctttgatttacgttctcaaaatttatttgtgagatggttatttgaagtataaatgtattttccagtccacacagttctaaagtactgtcagcctaccagtgctgccattggaaggtgccattcccatcactgccctggctaccagccacacatctttcttcttccttctcctccccattcagtcttggtgggacctggacatctccctttgccaatttctgagctctgggttaggggttcctccagttctaaaccattaatgaatgtccttgtctgaaatagctgttcaaagagtgtgagatgagcaaaagatctgggaatagaataagaactagcagagtgaggatggggattttaatgggatagatggggataagggagggggagagagcgaggctcagtgtgaagggctttgattccagagttttccatggttataaattcccagggaataattttcagttcttagcattttcctaataacccccatcttctcttttgggaacttgagtagaaggagatgccctgcgtacttctgatccaaaagttctattttgggggccagtgcattgaaaaatatggcatccttctcccctttgctcattcatgaaggaagagcacatagcttgggttttaactgctgatagtcaaggctcagatggtcttacaaaactttctccaaggacttgtactcttgactttttatttagaccctgtaagaaaaggttggtgtatctttttatcatgagaatgatagatcagtggggaaacacaaattcattctgtttttttgctggatctgcttggagtctgccagtgaaatgagtttgccaccttgtaggtagaagtcacagagataggtgtggctatgggtgctttctacctctttctgcctttccttacatgttcttatcacaaagatccccatctggaaccaataggctagaaacagaataaaaatacatgacttaggccaggcgcagtggctcacacctgtaatcccagcactttgggaggctgaggcgggcggatcatgaggtcaggagatctagaccatcctggctaacacggtgaaacgccgtctctactaaaaatacaaaaaattagccaggcgtggtggcgggtgcctgtagtcccagctacttgggaggctgaggcaggagaatggcatgaacctgggaggtggagcttgcagtgagctgagattgcgccactgcactcgagcctgggtgacagagcgagactccgtctcaaaaaaaaaaaaaatacatgaattattggtattttattggtataggtgaaggctggaagcagatcagtatagtctcaaatgcagcaagaggtggaaaatccctaggggtgacaacatggaaagaaagggattttctaaagccatcatgccacctgtctggggcaggtgtatttccagggaccatttctatgtgtgggttattcattggtttgggatcacctttacagggaaaatcacatttttaaaatgttaaggttgtgttaagacttaaatgttaaggtcattatgaagttatttagagatactgcaggaattaaagtaggcactctcagccaagagtcagattctcccactgccttaaaacaattacctagctgtactctgctgatgagattcccctaaaatggaaataaacagtaagactactgtgtattctagatcctaaagatatcatttatcttaagtacgaagcaaaattattaaaaaatgtgaattccctcggcagaaatttttcttccctccctctgtgagaatgaaggagagttgttaacatgtatgactgtctttaattgtaattaattaaagacagagctgagccccatacctcagtgctgccaaatccaagtcccaaaattacgatgttagcctggtgtttggggaagtatttgggggccacagatacatcatttttatattatcatatgataaaaacaaaggtactttagactacatcgaaaacaattatagtcaaatatttcacactaacagggacaaaaggaaactgctggtcaacctcacttgtttataaatcactgctgttttataagattcagctcattagtgttctgcttcctttgtgcttattttctgataggacctagatattcaggaaaagcctttccaccatgttgtttagttctgtgcccagtattgcttctttggacttcaaaatgagttggtactgaaatcagctttgtagtagaaagagtaaaggagggaaaaatactgtgatggtataggatctaattaatatttttaatataaaaaaggattttatttttaacactagtcaatatagcaactttgggaacatttagctaaaatttaattatggctatttctttactgtgaaggagatgatcttcaactcttacataattaaaacaacaaaattaagtatgaaaatatatcactggagttacattttatagaagggatatgtcttgaagtgcaataaaacaagagagaataatgtgaatagacattcaaatctgtaatcctggatttaaaaaactgaagttgtactttatggtatttcactgaatgcatgtataccctttatttttgagataagattggggaagcatttgtagttaaacggttgtggaagtgtatgtttttgtatatttaccagcttttgaaaatggacagatagataagctatcactaactgatttaggtgcattgtgggcaggcatcaagactgaaggtggattgtcacagtctcagtcacctggacagacaggatttctcagctatggcacaagcttcagtacccctcaacctggacaggcaccatacagctaccagatgcaaggtctgtatatacacattkctattttccttaaccctgtaggttgatagttaacttctaaagtagaacytgatgttccatgtaaatagtaaatgatgatggcaactggattgggcttagaggcaggacacctgcttctagtttgattcatcacttacctattttctaggcctaaatttccatatttataacatcagggggttagactggatgatctataacattctttccaaaaagcactaagattttttgtgaagttgacatttttgcctttgtgtcttctgtcagttataaaagaaatgaaaaagtcaaaagtcagccacgtaggaggttgtgatatggcatgtactaaaaacttacgcacttggtattaccatccaacttttccaaaagggctgtattctttattttcattatgaagtgaagcttggggagtgacagtcatagctgtagaaataaagtatgtgataagtgttgaataatgatctcccaaagaacagcttgatcagatttacagacacccagtgaatctttaagaaaatgcttgtaagaatcagtccctgggttctgtttttgaaaatatagacaaaacataatgtaagtacaagtcaaatggaatgacagctgtcattgtcaaagctggtctcaagaatacatagacattacttaaagttagcacattgytatcttgcaaatagatctttaaagtgcttgagaatagttctcacataatttaaacattttcctaatatcttgtctttactacagttcagttcaacgaatcatatttggcctcctaatagtgccaatccatagttgaattaaatccctgatgatctctttttgattgaaggggttctttttatagttgttattgtttttgtatattttagcttattcttcattacattaataatatttgtttatcacagacaaattagaaaatacagagaagcaaaaatataagtctcatacatttattattatcattatgatatatgtttgtctagatatacagcatgggctcattatttaatacagtattgcagcctgctgtttttagtaacaagtacattttaatcatcttttcacatcaataagttctgttctatggtatccttttgatggctacatggaattagctaaataggtatatcttacttgactaattccctaaatagatatatcttatttacctagttccctactatttgacatttagagcaatgctatgcatatcttatctacacacctttaattatttcctttgaataagtttaagtatagaatttctaagtaaattgttttatgctcctttaaggatttcctatatatttacacaaggaagggctgtgtgttaaagtatacacatttgatacctttctttgaaaaaagtgtcattttggtaggtacaagattttgtttttacacacatttagaaaaaacataaaacgttttttcttctcttcagtggttgtcatctttatcttattatttttcacattaaagatcttagcctttttaaatgtcttattaatatgtttccttaagaatgatttttttttatttatcatttttaagagtctattttcctgtatggcaaactacaattttagtggacaagatcattaaccttttcatatttgattttgcatttgattcaaaaggcctgaactgtaaagttttgacatattcagtgattataaaataaaaactattttataacagatagcatttattggtagaaggatattatttatgtgcctcattccaaaacttttatgcagccttggaaaagaactgttctgcacatgctgaatatcaattgagtaaaggaatataaagaacaaaaagtgatggaaagactttattaatgaatttaacagtcctaggctctagtaataaaatggatcataaggcagacaaggtctgtttgctcatagagctttcattcttgccaaagagagagacagtagacaagcaaccaactaaattatgcaattgcagattcctccgggagacatcaggaaaataaagagtgctggaggggtcccagggtctagcagggtgcccgtggtatccaggtctccttgaggagaagtggatcctaaaagtgggaaagaggcaagtgaagtgccctgcccagagcagagctacagaattgtatggttctgggcctgcgyccatccacagccttgccattacccgtccaccaaaagctaaagctaagtacagaaactgagagttagcatctagaaactttcatagtcagtcaataataaattttatgtttattgaatcaaataataattttttaaaatgagacttatactgtctctttttttagaaaattttttttcttttagaagtacattactttgtattttgctcagttgtcagtctgtgaaggattggaggaaaaaaccaatcctggacctcagatagtttgagaaatattgtgcttgagagttactttcatcttgctcttctcccagatcaaaacttatgcagcaggaacaattcagaaaaagacaaaccagccattacagtatagtgcataaaaaggggaaatgaatgagtagaaaaggaaatgaatttggaagaaaataaaattatcatttaaaagaaataaggacatgtatagcaccaaattaggcactgcttttctagccatagatttattatcatctgggcttactggatattgcattaaaactttttgtgtgtttttattcatcccttagttgaatggcctttctgtgggacattaggacccatttcccatgactgaggcattatttcacatgactatctttataatgataatttactcagttttagactattggatatacaggttgagtattcctaatccaaaaatctgaaatccaaaatgattcaaaatttaaaactttttgagcactcacgtgattctcaaagaaaatgcttataggagcattctggatttcagatttttgggttaggaatgctcaaccagyatataatgcaaatattccaaaatttgaaaaaaattcaaaatccaaaacatttctggtcccaagcatttcagataagggatattcaacctgtaatatgacttccacatattaagccagatgatcatatamtattaatttgaaaattaacttgccaaaatgatgatggataatgctatataatttgctacagaatgtatatggccagatttgggtacttaattgtgattaatacgtagttcttaaatattaaatgcagtatgtatactgcttctcattattcaatgattttgtgcacctagttgcgggagtctgttgacctttgagtgtctttttaatacatgttttttaatatagcaatttctacaatgtctaaaattattttcaaaattcyctcagttcttttaatccttaatgaataacagtgattatttgcttttatcaatttcatcttatagctattaaaatgtatttgaatcctggatgagaatatattttggcaatatgggggatatttttgcctagctttatttccgggaaatcttttcaactttaaaaatataaggtatgatgactagttattcagagatttacctgttcaaatttaatatcagaattttacaatgatagaagaactattytagtagcccaggggaaatattctagtagccccaaaaactgaagtgtgacrtgtatgcatcctctaagtgttttgctgattaatttaaagaaaacttatgatgatcagctctttggttctatcagacttagaaagactggagtaaaggtacagtgaaatctggcttcctggttagcagtatgggttctggagtaagattggctgtcagcagttctacctttgctttctgtgggccttcagcatgcaatgactccttcacatgtgtttccttatctggaatatgggcatgagatctactcccacaatactgttgtgagatatcattgagattgtctgtaaatcactctgaccaacctgtggtacatagtaagaaytcaaatgattgttgtcaattttactgctctcattgcartggtgatgtgattactattattttcattattatcattatggtccagctttctggaatagttccagattaggtagcattacctaaatgctccttctcttccccccacaacacacaaagtgtaattaaaattttaatatgtgtaataatatatataacaaaatatattttagmcatgaaagagaactttaagaaaccaataaccaaataagcatagcaaaaaaggagccagatgtaattaatatgctggcatggaaggaaacttactatcaacaaaggtcaagctttttgtacatgataccgaaaaagygggggagaaacaacatgaagaaaaaaatcaggagagaggaaaagctgtatggcagcagtggtgaatggggtgttggaaaatgagagtgrggaagcaaggaagagccgctggcaaaaaataaactcagctttgcagtggtggtgggagagagacagtcatcaaccaagtccttgttggtcatrggccctgcagtcacatctctgagtgctaagaatgggtggagaaagaggtctccaccagtcattgaagcatcaaattgtttagttcagaaaattagggaagaagatgggaatgtgataagctgtgctatgtagagatggaaaactctagtgcccatacaacaaaataaaataacagttgacatttattgtttactttttatatgccaaggactaacctagttatttcccttgtgacatcttatttaatctttacataactctgaacagtaactttgaaaagataagaacctatggctcacgcctgtaatcccagcactttgggaggccgaggtgggcagatcacccaaggtcaggagtttgagaccagcctggccaacatggcaaaaccccgtctctattaaaaatacaaaaattagccaggtgtaatgtcacgtgcctgtaatcccagctacttgggaggctgaggtaggagaatcttgggaccgtgaggttcagtgagacaagatcgtgccactgcactcccgcctgggcaatggagtgagactgtgttttcaaaaaactaactaaataataaataaataataagaacctgaaaatgctaaagaatgcataaaattagtaatttagtttgtatgatatcaacagttaagaatggctactcaaaacggagaatggcttagaactgtcagacctcrttgttgtacatacacctaaattacagagctcacagsagtggcttttaaagaaaactacaaaaagccaaaatgttgttgcttggtctttaaatttttctgaagggcaggcttgatcgttagaactaaaccattgcattacatacttagttatataactagtcaaacaccaattcatgaagctctaaaaaaaacttcttagaaaactcatttctgagcactgtcagtgctttgacacttgcacagccttttaagagcagatttggcaatttacggccattttgccactgtcaaaccttgtgaactgggccagccttacttggtgccctcatttgctccaagtgatccttctggaatcaccctttcagctccaactttcaacacttctgtcctgccaagcaggcttctgtgaatctgacacatgccattttaaactaaacaaggatcagattttcgtcgtgcatgctctaatactaaaattccatgaaataaaacctcagtgattgggaaatctgattgttttcacctttgctgtaagatcactggaaaattctattcatgctttaatttttcttttgtgcaccactaaaagattagaaacttaagttcagctgagaaagacaaagtgttcttcttcataaacaactgtagagttcaacctgaggaggtgaaatctttgcttattcatttttgacattttcctgttccgcagtgttagctttggtttttctggaagaagttttggaatggtctgagggggtttttcttcacacaccattgacaaagctgatgcagatgagttagctgaatgggtgggtgtggatggacagagtgtgcctggagacccttgggtcagttctgcaaacaatatgtttttactgctgcttaccaatcaaagggcactggccacaatagtgaaacggggtgttgtgtgtgagtttgtgcgtgtgtgcacgcatgcatgaaaggtaagaaaactgcttagcagaagcagcttcggcctctgattgctttcacagaatatctccccagtgtgtcataaataacctttattctccttttatgtaaaagaaacaactaacttgaaatcaaacctttaaaaatgcaaggtctgtacctatcactggtgtcgctatccatttaactccacatataatatagatttatggttccatctaatacagaaaacaatgagctatctttataatggtggtgcccaatcatatgaggaaaataaaattttgtttagcaatttggctgaggtaaggcagtctgtagttcacgtgcaaacaattttcacacacctacaaaacaaaaccattaaaattaagttgttatttaactggttaagcctcagctctgtggaaaacccagctttccataatagcttagttctagtgattctagaytattaaaggtaatgaacatctttagtcatattttaatctccagtatctagtattatgtctaaaatatacaaatgtttgttagaagtggagaggtctatgtcacaatgaatgttagaaattaaggttcataaaaaactctgattttcttcatttggggaaatgaatttggaatgtagcataataaaaattcagttaattcaccatttagaagagcaaagacaaagttatggaatcaacctaaatgcccatcaatggtaaactggataaagaaaatgtggtacatatacaccatggaatattatgcagctatacaaaaagaatgagatcatgtcctttgcaggaacatggatggagctggaggccattatccttagcaaactaacacaagaacagaaaaccagctaccatatgttctcacctataagtgggagctaaataatgagaacatatggacatgtagaggggaacaacacacactgggacctgtcagagaacgaagggtgggaagacagagaggatcaggaaaaataactaatgtgtactaggcttaatacctgggtgatgaaataatctgtacaccaaacctccatgacacaagtttacataacaaacctgcacatgtacctctgaacttaaaagttaaaaatatatataaaacataaataagacatttcagctaatttattgtcatcgtatgtttaatgccatctttccttgtgttaatactcgtagatagagctggttggagacatcacagaatcatcacgatggtggtatagaatgcctttctgagtgttttatygtcccagaatatcaataatggtataggrcattcccatcatcccacaccagggaaggtgtcaggatctgccatgatagatcgaaggggctgcacagatgtacatgtactaaactcagagggccctggaaaccctgctttgtttattttcctttaggttttattgctctcacttagagaagaaaataacacaaattctcactccctctttgtgtataatgttgtttgttctgctaaagagattggggttcaaactastaaggaaagacaataaatcagggcagaggtttgttaaagggtacgtggaagaggcacagctctgcggccatcacacctcatgcatccctgcctcattatgaagtgggaatgatccagtaacatcacccttgtttcctttgatctgcctctctgtagcttttcaaatgtacgcctgaaccatttaagtttattagtcatttataacctaaaaattgcttaactaaatatgctgttatgctttaaaatttttttattatctatagaaaaggtatttttactttaaaagatagtggttttaggaaaatatacattaagcttaaaaaagtaatctgtgataaagcatttgagatttgtactttctgacgtaaaatgaaattgaagaatagctrttgcagcttgcactgatgtgcagaattgccccttaattgctttgccactcttctcatatttattttttagttcttggcattttatgttctagatttttttttttgcttaaattgattgtataagtaatattttgtttcacttcttttggcatcttgtatatttcaggtgttaaaaactggataaaaatttcttgacatctaggcacagcaataattagtgacccataccaayattgttttcttcatgagttgtttttaattaaaatatatagaaatatatcaagacaggtaaatgtaaaggctttgcagtctttataacctgtgttaaaagttctctttggaaataaaaactattactgggacaaaaaggaaaacttggtcatttaaaatctatcttctaaggaagggggaaaatcctggttttaaatagcccatctggccttcgaaagcttttccccagggagctgcactaacttctgccacatagatcgtgcttgatgatggacatagcccatggcaaagaggccagagatggaaagcaaatggacttctgtgaaaatacacgagggacaaacagcatcctgcttgcccagtaagtgctagaaaatgctctaaaacatggcaagtacagacaggccccagcaggttccagcattcttatgttggctgggattctggtttttaatgtgagtccttgttctctgtgaagcagacctttgacctacttgttactccttttttttttttcttaaaaaaaaaaaaaagctttttgaagttataactgggcagtattatccaggttaaatcatacacagaactttgatttaatattttaagtaatgtttaaatcgacataggctgtgttcttaactacgaagaggtagtgaagatgtattaagagaagttttgagggatgggtttgttttaaaactaaaattgcttagcacttacagaactgcatgtcccatataggatcttcaagcaagactgtttcttgtttgttatggttgacaaggccaccactctttctctgtaggaagccaacattgataagaagaaagcaaagcaaaatctttgtgatgcactgtccctgggacactttatgtaatttacttttaaatttactagcctaaaacggagttacaatgaagaagtcctttaaaaatgggatcmtttgattccaaatgtatttattaaatgtcttaggtatgattatttctgcccttagtgtgtctatgatttttgtgtagccaaaaattaataccacttaataccaatttgctttcaacattaccgattcagaaaatctaaaaggtagatttggcatgacagattagaaaaccataacctggcaccagagataatggtcaccttatccatyctctactttttgaatgaagacgaggaccctgcctcagccatctcacatgatgatgttggaaataacctcagaaaatggatgtggaaagattgaactataaatgtactctaaagccataggatgttattgcattctgaatttgaagtttttcttacacaagcaagacttgttttcattaatatacctgtgatatgccaatgtctgagctatgagagtgagtagccttcttaggagggcagaayctggaccatgcgtcagtgttctgttaggatcctgacagctggactaacaaggttaacatcctagcggcatgctccgatggtatgtggatgcgaagttcttgtaccatgtctggggtccagtggtattcatcgctcaaataggtgagattttatgaggtaaaaatccatggatacttaatcaacttaaaattttatttgatttaaagtctgctggactatttactggagattcaaaaatattttaactcctttcagaaggtgcttacaggtccagaatttaactttctttatataatttaaatctatagtgattataatctgatttctaagataatcctttatacatcatgtagtttgaaagaagccagtcagccgagtgyggtgggacggacacgcttgtaatcccagctactcaagaggctgaggcacgagagtcgcttgaacctgggaggcagaggttgctgtgagccaagatcatgccactgcactctagcctgggtgacagagtgagacattgtctctaaaaaataaaaaaaacccagcaaagtgttcagataaaatctgttaaatatcaaagttctccagataaagtctgagaaataagctcaattattatttatcttttctttccctactcacttttttaaattgatggaaaaagttgagagaccttcttttctctcttaaaatcttttgtgggccttaaagtcattcttccaaactgtccccctccccaccaacaaaaatctatggaaaggtcctcacctgtccccacacctaatactttatgacaatcgtgttctcactaaatcctttagtcacttaccacatggattgaaattatcaagcaacagtacagttctggctcccactccagcctagatgaagcccttcaaaggcatgagtcagacayggtttatccatctctatgtgaggcagacaggataaatatagaaaatgagcttaaggaacttaggtcagaatgaaaacaagactaagggrgacttgcttagtactggtctaatggagaggtcaattacctgctatcaattattagggagctcaggtttccagaagataaacycagtacaaagagtaacagtcaaggaaaagcttattggacagatgagacttgggtgaggccttgaaggatggaaaatatggagtgagggagggaagcattaagaggagcaagactgagcaaggtgagtttccgatatagcagtgatcacatcctaaagtaccatggtgagctgtgcatggggagctgtaggcaacagcctggttataatattctcctgagcacccccatcccaaaccccgagtggcatctccaggcccagataaacatttgtatccttgcatttgtaagggttctctagcttttcccccacccccggcaattcagaatcgtaacatttcactggtcccagtatactaatgatgatttgttggacattcggattcttgcattttgccattaaaggatgccatttcttttcctgagctgtttttcttaaatgatcaagaaacttccatcacccacgatcagtcacactcctcacccaacttcccaaaaactttctattctctgatcttctttggatagtttattctcaccctgtgccaggagtgagtacacttcttccctttttggggaagcatgtgctttccttcccagtctaaccaggtgtcttcatgtcattttgctgagcacctccttagcagggctgtggcacccaagtgagtaacacagtgagagctgtgacacctgggtgggtgatgcaaggtgatgttctttgtgtcatcttcatgagtgtgtgggattttcaaactttcttcgagggataggttcatgatgcccacttcttttgcatcacaacaacctctagagttgyacctataaagaatgccagtagatgctgttaatgaaactaacttgaaaagctgtgtgtgtgtgcgtatgcgtgtgattagagatatagtatcttcccacttagaatataaaaataatcaactttaaaagacagcagtggaaggacaaataatgctgtatcttaagagatgttgtgaagggaaaaattttccagtttcctgttgtggaaatgagtgtctcccctccatgtcaaaaaaaaaataataataaccatgactatgattgttaacaattatttatttatttatttatttatttgagatagagttacactcttgtcacccaagctggagcgcaatagcatgatctcggctcactgaaacttcagcctcccaagttcaagtgattctcctgcctcagccacccaagtagctgagattacacatccggctaatttttgtatttttagtagagacagagtttcaccatattggccaatagttatataactaggtaagcttttccttttaaccaatgagtaagaaggtatccccactcccaccccaaactctattgagaattattgaagtttcacatgaagcaatctctgccaaacttattgattgagaaataatgggttataatgggaattctttctactttgaggaattttcatgatataatgtgatgtaaaaccttgcattataggatgtagcggctctattttatttatctggaggtgtcttttgatgtaaagtcatttgtttctagaaaagaaaatacttctatattattttgattaaagaattccaaacattacaaataattctgtgaccaaaagttgtaagtgaagacccttgcaaatccaacagaaactctcagtggattgatgttaagggaaggaggtctgttttatcctggtcatgtcttatcctgtctctctctagcatccaggttcaagcctggtgtgtgacagccttctacacaaatgtgcctctcttgctaagcctgcaagtgagtctagcagcccatacactgaagctttctggggagcatgagcattgttgttttgcctttgctttgtggcgttctaaacttcagtgaaatccatctcgtagtgttggcactgaagtctccattgaattagctatcaaagtggagccccttaytccagatgatctttagctcagctcaagaaccagaaataccccacacagataggctctgagaagcttcagctctgaatgcttgaagagaatgattactttcttagtgtataagaagaaaggttatactagttacatatttttgaagcaattgctataacacctcctgaattggtactgaaaatcagacacttataggtatttggtaaacatgtggattttcagatcacaccctagtccttctgcctcagtgagactgatttctgtgtctgaaagggaagcccaggtatttgcctaggaagaataagcacttcctaatgactctgaggcagtttgtcaggcatattttggaaatggtcataaaaaagggaaataactcacagacaaaaaccttgccattctgagatgcaatttactatagagattaagagcgtcagttctggagccaggtgcctgggactgaatcccagctctgccacagttgcttattacctctggcagtttcttcgtctataaacgggatgtaacagcatccacctcctggggtggttgtgaggaatcggtgagttctaataggcaaaatgctttatttgggctggctcartgtaagcactcaaaaatgtttaagtattattatttgttcttgtcacttctattttgcttctaacactttttaatataattataaaataatccctgagattatttacaagatataaattattttaatataattgttttataaaataatgcctgggaaaactttagtgtatatcagaacttcccattatacaatatagaatcgagcaagaggaggcaagacagcattgtatagaccttaaaaccagacagatctgtgtttgtgtttcaccttcattccttggagctgtgttactgtaacctgaccctccrtttccttatctgcaaaatgggaatgatcatacaccctgtagtatcaagttgttgtggagtataggtgaagcatgtacgggcgagcctacttcctaacatagagagagtactcaatgggtattttgttttattgttattatattttgcactctggggatatttgtatgttccagtcttggaagtagcatttagtctggaaagtcacttgggtgccatttggagtactgaattgtgatttacttggtcaggccctaagtcctatgtgaaggcaggtggagcggccctgcgaacttgattctggtcgtgaaaaattaatattgcttgagcctgcttctctagtatgtacacctctagtattgttattatattttgcactctggggatatttgtatgggttaggtgtaaatatccaattttttataggaatgtcgaagtttttttagttgttttgtaggggaaggactagtttacatataattagtatttgttagtttacaggtcaattagtacttggcttaaaatactgattagtaagtcatggatgtgtgtgtgtgtgtgtgtgtgtgtrtatcaaatgtacgtacatcacagagattgataaacacacacatatatcatggagatagatggacagatgataggtggattgattcagcaacccaggtttagagggaaagaggagagaatggggattcagggaggcttttctgagaaagcggatttcaaattctgctgaattgtgaagtgcaatcaaagttaacctggatttgacaggaggaagtaggagctgtaaggagtaacattagaaagcctgctgcatgttggtttactagggttaggctggaatgtatgcccgggtgcattggagtcacagttgctgggaaaagaccaaagaagttcaaaagataaactgggtttagaccagctaaggcctaatacataaaccctagtaagcagtttgaatattatcctgagggcaacagggagccattaaaggttactttttttagcaggggagtgacaagatcagtcatgcacattagagagtctactgactttgcagagaatgggctggacagtacccaaagatgggtaaagaaaccagtagaggaggctgctgcagaagtcccctgctgtggcctggtccgagtttagcagctctgtttgcctaagtcctatgtgaaggcaggtggagtggccctgcgaacttgattctggtggtgaaaaattaatattgcctgagcctgattctctagtatgtacacctctccctaaagtaagatccttttggaagttgcattaagtctccaaagccactggggtgccattaaactcctgtttcggcatactaaatggaatggaatctcagcctgcagtcagccagcaaatgagtataacttatgttgaattccagctaatgtacagtcttggaagtagcatttagtctggaaagtcacttgggtgccatttggagtactgaactgtgatttacttggtcagaccctcgtggcctgtgtgtgccaatatagcttccatggtctttcctacttcatttcaggggataacttatagaatgaaaacatccattttaaaaatatattttctatatcttattcattttcttggtggatagggattattgaggtcagtatttattgcttaaaactctgtcatttaaatgaaaatagcaagtcgtaacctaaaaatgtatagtttaaatgaaagtaacggatcataacccaaggtaatttttcctctaaaatgcatataatagctgaagtttcttttaaaaaagcattgatatccacatctttatccaaaagtaatttaaaatttcttttacaaggcatttttaaatgttcatcatgtataagtttgctttatatataatatcaataataaattgttcactgatatgcacgtaaagaatgagtcatatgcctgtaagggacaatgtttaaaaaaaaaacaaaaactggtagtctgataagccctgtgaggtctgaggctatgtcttagtcatccttttagccccatgtaattgtcaccatgagcctggcattgaatatatgtttcctttgcatgtaattaccacatgcaaatgaacattaatatgtgaagcctgtctattgatggctaattgtggtggctactagcactgtgagagctctctgcctatctgagataggtgttctgggaacttcaaacaattgatattcctgaaatatacaaatgaagaaacctcaaatagagtctctgtgataactaaatttaacactattttaggatatagattcccttcttaataaaaataattcttggctcaagcttttaaagttcatagatgcttgataagtaaataggaatagaattttagatatgtaaagagattaagtcatatttatctaattcgggaaagtaaaagagggaaaagatacgtaaatagagaattttacaagtgcttgctgccataaaccataatgtgcctaatgtttatgtgatattgtagagtgtccattatgctttccaaaacattacctcatctgatctgttaggaacactgcaaagtagagtttttgcagataaggaaattatgttttagagtggctgggagacttgtccaaagtccaaatagctcataaatgatgaactggaaactctgttttctgactcttaagccaatacttaaatgttcagtagcaagtaaataattggcatatattaccacattttatacctggagccatctgaatagtgagttcacattgaagagattcctccttgaactgccaacacatttatggcctatactgctcatttgccgtaacactgtaactttttaaaaaatggcttttatttctaattatagaagcaacataggttccgagtagaaaacttaaaaatgtaaattggcttaatgaatgctatgtgaccatatatcaaatccttcagagacagcatttcttagaattttgtgctttttgaaaatttgtcatgctttaaaaatattttaaatgagatcatcaaaaatactttttgttattttagtttttgctttcacaaaataatatgaaaatttttctcatgccattaaacatcattgtaataccgtttaaacagcttcatagtattccattttctgaatagtacctgttatggagttggggctgcttccctaggttttcttattagaagcaacactgaagaatatctttgctatctctttgtataaatctataattttttttcttagagtaaatgcctgaaataaaattgctgggttaaatggcatacgaaatttctcaatcataagccaaatagccaaacagaaagattgtgcctatgtaaattcccattttgcagtgtatgaatgccgttttttatatatttcccaatccctgatcttaccttcttaaaaaaatttttgccaatatgattatcaatggcagcatattattgttttgcatagcttaataacaaaatagtaaatcatgtgaaagagggaacccagctttgctcaggtgttgtatcttacacagcgcctactgttcattgtttaacaatgtggacattcaacagacagaacattatcttgacagcatatgtaacagataaaacattaatcatattcttctttcatctttgttgtgtcaaatttatcaggtgctgccattcattcttctgtgaaatgaaatggctttttccatacgccattttaatgaccatataatacaagtctgaaagcattttaagttcttggaagtagtatcatagtttttgagctagcaagaaccttaaagatcatctaatctgaccccatcattttacattatgtgaatttaatataaagacatgaaaaatcttggtgtgttttgcaaattgaaaagttcattgtctaatatttttacacaaatgtattattttgtcattagtctatataagttactaacatccttggaaatttaaacctctttgttttttaattttgtagtaaaaataaaatcatcaactatgttaagaaaactacattttagacatgacaacagattctagtgtcgaagataaaccaaataccaattctgccttttctaaatgctattttcctgtacccacattattccacaagcctggtatratcgtatttcttttcattttgttttaggtagcagttttacaacatcatcaggaatatatacaggaaataattcactcacaaattcctctggatttaatagttcacagcaggtaatttaaaaagccagtttaacttctgaaaaatatctktaaatgcaacatgattttcttatgtaaagaaagatctgtttataagtgagagctttcctaaggcttttagtagttttcttttaaaattcactttagcagtcttttgtggtgagttgtttggttttcagattggtttaattttacctagtattgcatcatagaaaagcaaaaatatgaagaatgtgtataatcttacataawatttgtttgcaagtctgagctctttagttaatgtgtacttgtatgcccccgtgtgaattcagaaaaggctcagaaacccaaacatacttacagttacactttgatatgtaagagataagcagcagtattttgacagacaattcttgtgtggtttgatttggtaggactatccgtcttatcccagttttggccagggtcagtasgcacagtattataacagctcaccgtatccagcacattatatgaccagcagcaacaccagcccaacracaccatccaccaatgccacttaccagcttcaagaaccgccatctggcatcaccagccaagcagttacrgatcccacagcaggtaattatgtgaatattattagtcctgcaggtgatattttcaatggtttcaatgcatttttctacagtcatatattcatgcagtggttgcacaattttggcagyttttggcaaggactaaatataagtcaagcagcatgactgtggcattcatttttatttatttttttatttgcttgaaattttaaaataaagtatataaacatcaaaagcacatgaaatagagattttatttgtaaatatastcaatttttaagatctgtgtagtttttgagatgcataattataaatacttagctataactataattcattggcaccacatatagagcataaaatggcaatgcctagaatttggcatttatcattattcaatatttagtgtttttcatcaaagtaatatcttgctgatagtttgaaaaacaatcaaaagtgagcctctgctttcccacatgtggcctgctgtgaatttcatgacaatgtgtcatgagtttgggcatttgttatgcttctgcacaactcccttgctggtctctttcaaatgccagcctctccatgtggaaatcttcctacatgatgtctttgatatctcttcccctcattgattctttctttctagaactcttaatggtgtctgcctgatttcctgaattggtctttacttaacgtttcctatactttcacatacttctcacctccttgccttaactttttaaagagttaatcatacctttcatggattacaaaataagctattatcctcaaagagtcaaagttttcttcctcttgcctgtttccagagctaaagcccactccattgctacaagtcaggttaaaatggtcttaacattgaaaaaattacctctctgatattataatcatagtatgcattctaggttatcctaaatcatgaaaaaaagttctgtataataaatgctaatttaatttttgactatagaattatattttaaatattaatgggtgatttctcccccaaaagtcttcaaaatttttcatgttccacgtttttttccttttaaaaataagtatgcagacattgctttattctaaagtttcatcattcttgtctttcaattaacttctaatgctcattatttctgctgcacattttaactttaaatatttttgtctttgataattgtattccatgtatctttattttccaaaaactaagctgattcctcattcagtttacatgtgtacatacagttttcatagaactgagtatacatatctctctcttcctttaattagatttcacatctatataatgacactgaagacaaattttattatagaatgcattgaatttattataggagttcttatagaactttctctacttacataaacttcatataggcatcatgaggaaaggtaatggcttgtcccaactttagggagatcttgccttttcatttgaaccacctgtgtcatgcaagcttcctgaaaactaaaaggagttttgaaatgaagatcattatgtgaatgagatgtagcaaacctcttttaggatctagagagtcatagaaagagaagaggagacagcgaataatattatttaatttctgatattttggctgtgaatactacattgtaaataaactgttgaagacttaattgtgtttcttaaattaaggttgattagagcttttttgaaaaggccatttggtcagatataagtgtttgtctctgaaaccagacattgttctaagtgagtatttttcctaaaagggatgctatgtgagagagtggggatggtggactataaagccaggccacatggaaaacaatgaaaaattctaatttcaaaatcggtccatggttttaagagtgaatgatgtattttagcttgtattgtaaaagtaaaagtgcttagtgttttaggtacttattttaatttcattatcttatgggaaaagaataggaatgagttgaaccgagaaaaaaataatacttttcagatttcttatacatacctcttccaactaaagcgagtatgtctggatcagcctttcttgtgttgcataattagaagtggaaagttcactgagtttccacattgaaaaagaaatggttttctttaaaaattcaaggaagatctagtctgggtattttgttttcattctttaatttgtgaaaagaccgcagattcaggctaagttttttggcattaacttgtctttcttagtagtcgtatataaaataatagacttactattcttgatgaaaaggaagttttgatggtaaagtacataaaacagaagaatttattaaactaaataattagaaatgacttattaaaaacaatttctgttttgaggtagaattttttacattgttaaaataatgaatgtctctttttgytggaataatttcgggtcttttttttttcttttacttttagtctattgggtttaaagttagtattttataatactggagagttagactctagtcattttcttatcttatgtatgacctggtttctgcctttcaatttcattatattatgcagtagggacaaatctaggtatatgtgatatttatctcatgcttcatgatttctgttcctgcattgttcttagaattgttgtgtcacaatggacatataaagataattttgtaagggtttttcagggcaaacatgtaaggactcatttgtgggttttttgtgcctttttaaagttactttttaagtctgtgatggtgtgcagtattacttgtaaacgtaattccttatgaattttgagttcaaaaattattttaaagtgttcataatgaaatattcaaagctttattaccctttggatggatattttaatacgttaaaaataatataacttgaatctgaaagcttccaaaattttactctattttaaaaactaaaaacagtgcctttgcattcattcttttaaaaatgaatttgttagctctttcttcactatcttaattaaaaaaattcacataatctgcagatatgttagaatctaccttgagaaatatagatattttctagtcaatgagattttaatttatttattgcctactcatgcctactcttcaactagccatgccttaaactcatgcctactcttaaactcatgcctacttttcaactagccatgtctttaaactcatgtcttaaactcatgcctactcttcaactagccatgccaatcacccctcaccgccaattgaaggacatcttggttgctctgagtttctggcagttatgaatgaagtttctataaacatttgtgtgcagtttttttaatagatataaattttcaactcctgtgagtaaatacctaggagtgtgattgctggatcatatggcagcactacgtttagctttagaagaaacttccaaatcatcttccaaagtggctataccattttgtattctcatcagcaatgaataagagttcctgttgctccatattcttgccagaatttggtgttgtcagtgttttagattttggacattctaattgagaagtagtgctatcttgttgttttgtttcctaatgacatatgatgtgaagcaccttttcatatgcttatttgccatctgtatgtcttctttggtgaggtgtctgtagagatattttgcccacttcttaaacaggttgtttgttttcttattgttgggttttaggagttctttgtttattttgatacacatcttttatcagataggtgttttgcaatattttctcccagtctatggattttcttttctcttagcagtgtcttttgcagagaagtttttaattttaatactccagtttatcagtttttccctcatggatcatgcctttgctcctgtatctaaaaacctattgccaaaaccaaggccatctagattttctcctgtgttactatctagaagtttcataattttgcattttacatctagttctctgacacattttgaattaatttttgtgaaagatgtaaggtcagggtctagattcatttttttgcatatggatgtgcagtggttccagattaatttttgaaaaactatcttttctccattatgttgcctttgctgctttgtcaaagaccacttgactgtatttaagwggggctatttcagggctctctcttctgttccattgatccatttgtctattttttcaccaataccactctgtcttgattactacagctttatagtaagtcctaaagtcagrcagtgtctgtcttccaacttttttcttctccttcagcattgtgttggctattctgagtcttttatctctccatataatctttagaatcaatttgtcagtatccacaaagtaaatttctgggattttggctggaatcacgttgaatttatagatcaaattgggacaaactgatgtcttgacaatattgaatctatccatatgcatggaatatctctccatttatttatatcttctttgatttcttttatagtttttctcacataaagcttatatataatttttagagttacacctctttctctctctctctttccctctctagtattgatggaaataatggtgtgttttttttgtttgtttgtttgttttttgagacggagtctccctgtcgcccaggctggagtgcgtggcgctatctcggctcactgcaggctccgccccccggggttcacgccattctcctgcctcagcctcccgagtagctgggactacaggcgcccgctacctcgcccggctaattttttgtatttttagtagagacggggtttcactgtgttagccaggatggtctcgatctcctgacctcgtgatccacccgcctcggcctcccaaagtgctgggattacaggcgtgagccaccgcgcccggccggtgtgtttttaatttcaaattccaactgctcattgctggtatataggaaggcatttgacttttatctattatgttatatcctgcaaccttcttcattggtttcaagagttgtttggttttgggggtgggtatttgttgatttttttttttaatattttctacatagacaatcatgttttttgtgaaaaaagacagttatatttcttccttcccaatttgtataccttttattttcttattgcattagtaaggacttgtacaatgtcgaacaggagtggtagaggggacatctttgctttgttccttatcttagaaaggaaacatctagtttctcgccatgaagtataatgttagctgtaagttgttttttgatgttctttgtcagctttaggaagctctctcccctttcctagattactgagtttttttattatgaatgggtattggactttgtcaaatgctttttatgcatctgatgatttgatcatatggtttttcttcattagctcattgatgtgatggattacattaattttcaaatgttgaaccagccttatatatcttggattaatcctacttggtcatgacatataattctttttatacattgttggattcagtttgctaatattttgttgaggatctttgcatttatgttcatgagaaatattattctagtttctagttttcatatcttgtaatgcctttatctcatttcagtattagggtaatgctggcctcattgatggaattacaaaatgttccctctgcttctgttttctggaacagattgtagagaattgtaatcattctttttcttaagtatttgatgaaatttaccagggaacccatcctggtctagtgctttctgttttgaaagattaattgttggctcaatttctttaataggtacagacctattcatattatctatttttccttctgtgagtttgggtagactgtctttcaaggaattggtccatttcatctaactttgtctaatttgtggatatagaattgttcataacatttctttattatccttttaatgttcatgggattgctaatgatggctgtctttcatttctgatattagtaatttgtgtattctctgtttatcttggttagcctgcctagaggtttatcaattttattgatattctcaaacagccaatttcattgattttctctgttgttttcctgtttttaattttattaacktctctgattttcattatttcataatttttttctgattgcttttgagttaacttgcttttctttttatagtttcctaagagtggtgcttagaygattgatttttagatctttcttttctaatatatgtgttcagtgctgttaattttctcctgagcgctgtttttgtggcatttcacagaattcgatgggttctgctttttcattctcatttacttcacaatattttaatacttatttttgtttttattaccactggaatcctcccttttaatgatgtatatatttataaacattttattggagagaaaaatcttagaaatttcatagtttacagtaaatataattagttacagttacccagatattaacatcttacagattaaatggctttctcttattagaagatatgtgtaatttatgagtagaagggtattccatggtaaattcaaatttcactctctataaaataaaattttgatcagaaccaactagttttccttgttcaatcaaagactgtaagacagtgtcacaatgaaatccatgattactttaaataataaattacagatttcactcatttttatttttaaaaacccatcttttacaaagccaatgattttttttctatgatcaaaatagaggaagggaaaaataaatttgaaggtgttttccttttgtgctaatatctaaactagcattttatcatcccctagccactgaggtatagagtaagttatcatcttgtactgatcgtaaaagcttaagtcatattactactaatctaactaaatatattctttcaaaagagtgatagaaatactttttgagtattattacgaagaaaattgtaattgacttttatcaaaagatcacttaaaccatttttatcatatgatatttttcattatatgattcatgtgtataatcaaaatttaaacaatcatctataatccaattactgtgctgtatttaaataatttggcctgacaacatattttttatcccaaatctcttagaatatctcataattttgatagctatcatcacaatacataataaaatacagtcgaacacaattgttgtgcttagagctctacattcattaccacatgtaatcttacaatataccatgagataggtactatttgttccattttacagataaggaaaatgaggcacatcactcttaaatgctcaataagtgttaggtatcattaagttaatcaagaatgttgaggctaaattcttaaaaaagcactatttagctataatattgtatttttaaaataatacaaatataaagcagtgagggacaaagataaaagtgaatggtgaacgaaacattttagattaatgtgaaataaaagataattagtttttaggaataagatttagtatgaatgccgtagaaaagtttgtttttcaaaggattttttcatttgaatttcttacatcaacttgatgttgaaatctaccttcacgtgtgctgatcacatgcagacaatttactggttaaggtgttggacgggaatcttgccgatattgaatttcaagtgacagaggaaaaatcagtataagagggaattcaatatgcatgggaaaccatttgttccctctgcttctttgatccctgccaaggcacaagaaagtagagcaaagcgcctgaaaaaggggaatgttcttgttcaaagttgcagaactctgagccctcagaggaactcagtgtgacaggttaaaaaactaaactcccggctatcttccctgtcatgcaggatatttgagtctcgtctgtacttgctaacatgcttatgtctgttcattgtggaaatgatcctgaggtttgcaatagcaagcgtcttgatgcttccattttactaagtgaacgttttggaaaatctgcaggccatacttgctcattttcacagatgccttgtggactttggaaaagtttgcaatttgttcagctcaaaaataaactatttcagcaaaacaattttaactaatgttttggaaacatttgtcggcaaaacaaatatttgtatctgaaatagctaggctattaagatgtgagaaaacaaaacagatgtttgttttgggttgttgggtttgtttgtcttgatggcatttgttttctttctttctttctttcttttttcccagaggatatatagtggtataataagattataaaattcatggaaataaagttcactctttgttttgtactgtgagaaacgttatgaaaatgagttttgttacctgtgaattttggactgtatttccaagaaaagaaaaattcagtcttctaagcacttagcccttttgtgccttgttactggtttccctaattttttcaattacttagccatatgtcaggatgccttatagagtcagttttagtacactggatttaaatatgtaattctttcttatatttatacataacaagatttttatattaatcaaaataatgcatatattattgagctaattaaattagtttattaaccctcccaaacatttattatcttcttttgtaactaattgattcattatttgaaaaactgttacatattaagtgtcatatgggaccaacacatatcagtgtaataatttctcgtatttaagttggaggacatcggcatttactggttcagttttttaattggagatggttgtaaagaggacaaagttatgagtgtttgccatctcttcacctaatttaattgcgatttcatcgtttggtaagtggcttttggattaagttttaaataaaggtagaactgatggattaatggggctaccaatgttatttctatgttgatagtaagtattgtttgataaatttttttactgaataataacacatgaacatgggacaaaattataaaggcatagatgtgtttacagacaagaataaacctccctccatgttctatactcggcaccttggtttcatattctttgcttatataaacatatacttaacaactgtcccccgcctctctttttttccacattcaagtatgtttagctttttggtccttcacaaataatagagtactatacatgctgttctgcaccttactttttcactagacaatatacagagaaaatttcagtaagtatttttgttgtgggttatatatacagatttaacagtggctaatattttttgaacatttactagtgccaggtattgttctaagcactgttcattcattaacttagataattcccacccagctccatgagatagagttgtattgtcattgtcctcattttacagatgggaaaactaaggaaaggtcagtgacaacactgaaattaaacctctggaagcttgacttcaaacttgagtttttaatcagtaaagcatgctgctgcttgaaaccactgtgtctgaagtttcaaaggagcagaaaaatgaaaatgtaaacagagagtcctaaaggtagtagctgygtagtaaacatcttctttaatcagcactcagcaaaagcatatattatgaggcattcagttaactatgtgttaaatgtttgagctctacttgctgataaaataatgtaggtctgaaattacagggaagaggtatgtagtatattttgggttattatgtcataagtattcactgaattataaaagcagtttgtggatatcttggataatccaacagctgattgctcccattctccctcattttccacttcctgaatcagttcactccgtgcttcccctgtatcctacttaaatagtcacctgtcatggacctgcttagggaacaacttgccacatctctaccatttccctccccttccttccagggacctccttgcatcttgtcctcctttttttctttatcttttaaaaaaaattttaaataactcaaatggcagctcatggttgatgaacactaggtgtaggaatggtgacgattctatcaaggaaaagggaagctattcgttttaaagtgaaggtggggatctgaatccaataccatcaccttctaacacttttaaaacttatctgactccttcagaaacttcagggacctcttgattaatttaaatttcatttcttcattatcattatttaagataagttttaactctttcagttttatgtgactgctgatatttaagggtataattctctgctattttgcattatatttgtgcagtatttcacctggattattgattgattaggtaagcatgaattggtttggaaatcatgtctgacatcgtttctgtgagaaaatagcttctgaatttcaaacaattgatttaaacatatttagaacgtagcatatttgtaaatagactactctcttatatctacaaatccacttgcgtaaccttagcaggaagcagctgggcaatagggaagcttttaattttcgtttagcatcgactgtatagattcttttgcagaagaccttcaccttactgaatataaataaggaatccagaaagattaaatttttcctaagcagcacagcctgccattggtgacatctctgaatgggacactagagtgtcagccttgggagacagaagggtgtagtgtggcctttcccatacttccctgggtagcacaactgtctcccaaagatggagatgaatatccttttatcctgtaatgagttcccaggtgggagcagttagggatacaagttatcatatttaaagttattggagtttctctactttaagtcttttstgatttttgatatgacagtactmattgagaattgagtgtaatgtccaatgtttcccagtcatacctggctggggttgggtaccactttccacctgtgcttcccccaacaccccatctgagaatgtctatgaatgtctcttgaccagcaccctccctttgaatacaattaggaaaaactggagtggtggctagggatttggagttgggctaacctgggtttgaattctggctctgycactcacttgggaaggccacttagctccttggtgtattatttctctgtggaatgagcataataccactcttgtgtataggatgactatgagaatgaaatgatgtaagtggctagcaaagtgactgatacatattaggccctcaaatgtccatttcttccattcgggcattcaagagatatttatcaatgcttgctgcatgccaggcactgtgcttggtgctgggaatatgggggtgacaagaaaggcaaggcccctggcctcaggaagctgatgtgttcttccctcttgaagttcattactgttgtacattgtggattgtggttgtttcagacactaaagccccaaaagtgtggctcaccagtttctttcatgtagaatgactgtggggagcttaaaccagtggttgaaatgtgtaagaagaataattagaggtttctaccaggttatccagagattactggaaagtggataatggtcatattttaggagtgatgaagctgtcttaattgagttactagaccttgactaatgaattaatttacctagagacctcgattagtgcctgcgtgaacagggaataatggctatggaatacaggtagagaagtcaaagcaattctctaagattaattcagttagtgtttattggtctcggactactggttatccctataaggctagtcaacaagtttacttgcctttagtttattttacaaaagttttttgtgggagatttctatgactgaaaacaaaattattacaattcctttacattaaatcttttattctgctaaggtaatagtcactgagaatctaaactaatataatgtaatttattcaaggttttgctgaggtccttttttttcttttatgccaaaatctaaaaaaaaaatttaggccaagcrgggtgtctcacgcctgtaatcccagcactttgggaggccgaagagggtggatcacgaagtcaggagtccaagaccagcctggccaagatgatgaaaccctgtctctactaaaaatagaaaaattagccaggcgtggtggcaggcacctgtaatcccagctactcgggagtctgaggcggggaattgcctgaacccaggaggcagaggttgcagtgaactgagatcgtgccactgcactccagcctgcatgagagagtaagtctctgtctcaaaaaaaaaaaaaaaaaaactaccaatatgaaattatcatggtcacactatcacacgtaactttgaaggtttgatgacccataacttcatagatctgtgtggatcccaggtgatttttgaggaatatcattggccttctttcaggactgtggccttctacgtgggaatcttccctgattgggcctgtaattttcataggaaaatgtctatttctattctcagcacagctaacttagtaaagcctatgagtttccccccactcaaccaagcaataacaccttcgcataccctcttacctcactgccacttaaaactcaaaggagaaacttgttattgtcagctggcataacaatatgtcatggctccatgcctccagatattttcagttttaccsttaaacaagatgcctgattccagggttctgcactctgcagtagtgaactccagagttacagagtcagcagtaatcagccttagaagaaagaatcttgtgacacttgctgttttatttaccacgagggtgtgctcctggcattccgtagcattcctcagtgagcagttctgtgaggtgtttccatcccatctctataatgggaacacctacattttttattttaagttccgggttacatgtgcaggatgtgcaggtttatacctgggtgaacggggcacacctccactattgtggagaagttgtttgtcacatctcatgcacaccatgagycatagaactgttcctgcctttgccctgcatggactgcaagaagacccgtgtggtccatttcctcactggctccattttccccttctgatccacattcttcttctaaggtactcattcattttttaaaaagttgactgtatagttattatgtatatatttggtgggttatcttaaacccttcttttagaaaagtgggatatcaattattcagaaactaaaattaagaattaaaaggttgtattcaacaagaataagaaccagagaacagacatgctcaggaagaaattaccttgcaaaaacaataagaaccagagaacagacatgctcaggaagcacttactttgttaacaacaactgttttggaaactttttggttaatatttgcacaaaaacctgatatgcacaaaaaaagccttttgggttaatatgcacttcatgttttcatataactgtagtctcccaagagcacatgcctctttatcatttcttctctttgctcaaagttccaaacctacttgtataatgaataggcaggcctgttattcgtttcagttcagctatttcatgtattttttgaaaagcatgctgcccatggtaaaatctctcccaatgtaaggagtacactttctctgtcatgaatattgttttcagcttctgcaatttattttatttcccatgcctaccacttcttaaatgttctcccttcaaacattctaagaattacaggatttgcttggagtctctcctttctagtttctcatttagtgtttttcttaaagtatatgtttccctacacttgttcatctaattacttgccttgattcagcttttatattgataaaggttactaagaaagcacacttctcttgagatatatttcttaattgtgctattaaattgcatcccctggttccctaattgaaggcaaagtagaaaacgcagtttctcctactgacatatggaaatgagattttaatgatgttcgtcaacgtttcattaccagccattgagcatctcttactttcaaagtaccattgggttctatggagatatagaagacaagagggtcattcactgtcctcaggagcattttgccactaaagaaaactatgtgtacagccaaacctaataaaatttccatttttaaaatgccatgctagaagaaacaaagtcctcaggaagagtgcaacaacagattccttacataagtgtttgaagaagaaattaacaaagaaggtgaaattctcagcattggaggatgtgaaagtgcgagggacagaggatagggaagggatatttatttgaggctagagaaatagaccactttaaatgggctcaatgacaggatatcctttccatcagaattcggttaagttatatttaaattttttaaaggatgaaagcatttttgaactggaatatcactttatcatcatctttacaaataaggtaacagcccagaggggtaattttgaactattgacttagagcaacaacacaaatacacttgtataaaacactttagcatgcattatttgatgcaatcttgacaatggtgctgttcccattttactgttgaggaaactgaagtccagcaaaagtccagataactgaataaattataagctatcaaggctgctctggaatgtatgcaaccctaatgtgttaayttgtaggttattctgtccactatggtgaaatttgaatgaatccattttctgtgttatgccctgtaagttagagaggatatgcagatgtaccagaatgtgcaagattcagcttctctgcaggtgggttattttcccaaagartgaaaggaaagaaggtccccttactggagtcagtgagggttccatcacccaagcagccaagctctggttgtgggcagcccctctcctttaggcccaaacctccagaagaaggtggcagccaagggtccccaggcrggtacccatcagaggctgcacagcctgtctctggcctcctcattgacaagtgagacttacggcttggagaaacaatgctgtttctgaggccagtcaagtctgtagggcgtctgaggtgggagcaggcaggtggagttggaggctttagagaagacaggcctgggttcagatcctgatattggtacagcctagctggcagacctttattttgattaacttcaatctttttatctgttaactggggacagtaatacatccctaaacagatctgggtagaaataatcctaaacctagaagaagccctgttctctccactcttccatctctcaaccctgaccccagcctcaagtttcttttgctgtgatatgtcttcctggctttgcactgtttcaatcagttgagaccagaggatgggatagtgaaccaagtgtgtttgagttctcctgtcagagaaatgctgtcccctaatgaacatgaagacattgataagtatttccctgtgacacatccctcaagagagaggctaaacagacccttggagattatcaatgatcatgtgcattttgctgtgtgaaccagagatgctccacatgccaggttgtggaaaaaaaaaaaaagtttaacgagcctctgatatgttccaggcactgttctagacataggggattctgcagtgagcaaaaatcaagcctctgccgtcagggaacttacattctattggaggcacagatgataagtacatataaaatgcatctggcagagtggctggaaggatgaacagctgcctaaggagaatagcgttagggcaggtaaactgtttcggaagagttgtccatcgggtgacacttgagcagaggccttcaggaagggaggagagagccaccttaatatctggggaaagaattctggggagaggaaacagtagttgccaaggcctggaggtggggctgtgctttttggattcagcaagagcaaagaagtcccataagrcattggagcctctgggaaaggaaagtgggagggtaaaggcagggaggaagagaagctgtagtagaaggccttgygggcatgagaaggatttgggattttattttgaataacatgagcagtgtttaagcagaagcatggcatgatttcttacacctgtaaataatttctctagtcatggacagagaataagttgcaacaaggcaaaaaaaaaaaaaaaacaaggtggtgttgaagagatcagagcttctgcttagcacatgtgaagtttgagctgtctgttagaaatctaacaggaggtggtgactcagtcattggataagtaagtctaatgtttacaagacaggttagggcctaaacttgtgagtcttcaacatctggaagccactgaaagctgtgtgtgtggatgagttaaccaggactgtaggagcaaacacagaagaggagacaagcactgagcccagggccttcccacgttagccagctgggaaaagaggaagagccagagaaggagattgggaaagagcacccagggagtcaggaggagaactgagaaaagggcctttcagaggccaaggaacacaagtgttgcagaaggaagccatgatcaactgtgtgtggcgctggcaaaaggcggagaaatatggaaattgagacttgactatttgatttgacagagtggatgttgttggtgatcttgacaaagaggaacattagagaaaatagcatgatggaagtgggttcaagagaaaatgggataaaaggaagtttaagcagcagggattctcaattctttcagtgacttttgctgtacactgtaaggcagtagagaaagagggcagaatctagaggaagtggaagatgctttttaggcaagaaatctatctagcttgtgtgcacctgcaggtcatctagagtaaagggaacgtggactggaatcagtgacagggcactggagtctcatgccaaaaggaggggttggccttaggagtgcagaaggtccacccatcataacctgaggggaggcagactgcatacagagtacttacgggtggggagagcctggcaaggagagtagagagagtggttccttctgttttctcagtgaatgggaagccaggttccttggcaatgagagagtagaaagctgtcccttggtattgctcatgacacccctggtgcataataaatataggcagcgccaatattctacaaggtcatggaccatcatcctgctcagtcacatccctggtgctgagtgtgttgcctggcacataggtgctctgtgataccacagaatccaaaagtagtgcttgttgccctggcctaggaatttgtgatagccacaggcaggaccagctgcaaaactggtgggccccttgttcaaaaataaagaattttaagacagcacagcagactactgaaccaagttgcaggcccagctgaacacaaagccctgtgggagtgcacaggctgcacctccaggagactggccctagccacaggtacttgttaaatctgatcaaaccccagtgatgcaagaatcacagtcagcagacccgtggcagtggccagagataaaactccctgcagagacaaattttgcttattttcctctttcagatgtttaagactgagtgcaagcagcagtcaccatcttcacagattagcagagatggaggtttaatgattcttgtaagaaaatgaacagaaagatgcatcagagatattcagaaacttttaggagcaaaatgttcactagtggtatctcttaaatgacgataccacaaatccctgctgtaggargagaaaggtgccgaatggtgggacagagggagcttcagcagtgttggaggttgcagcccattgtgagtatgaggtggcattaatgaccattcaagaaaaaaacattctcagacaaaacaaaataacataagaaaacctccccattcattcccaaaactgcaaaggtaaagagtagtatgggtagattagatccagtgcaaaggtaagatgacctgttttatagctacttcaaattgagttgtttcaaagattgtttttaaaaaactattatatagagacctttttaatggagtttttcactgggcatggtggctcatgcctataatcccagcacttctggtggcccrggcaggcagatcgcttgatcccaggagtttgagactagcctggcaacgtggcggaaccacatctgtataaaaattacaaaaaatwtaaaaattagctggggatggtgrtgctcacttatagactcagctacatgggaggctaaggtggaaggatcacctaagcccaggaggtcaaggctgcagtgaactgtgattatgccacagtattgcagcctaggtgacagagtgagaccctgtctccaaagaaaaaaaaagcaaaacaaagttttccaacattgttctccttttatcggaaaaaaagcaagtcagctgaatgaatgtgtgcacatgtatacattccatgttgtgagcatttggtttcagtggcattcagccacatgagaattcaagcgtgaagtttaggccaccactggaattgctttagacattttaagaataaaaggaattttggtattcactctgcggatatctgactgtagaggttgaaccttggccagcccttccctctgactgccttacaggagaggagaattcattttatgcaatgttgtctagaggattagaggtgggtttgttagaaatatctgtcatattcagctatgggaggtcactttaagtcagagaaaatctaagtgttcattgtaaaaggcctacatatccttttttcattcaccttttcacctgaatttcctggttttcttacatagtaaacagcatggcttgacaatggtagggtcttcgaatttttcttttctcagaaactcagcttagctcattttctggtgtcactggtatgcttgtctgctcaagtaagttgagtttgtgtcccctagattcagctgactacaaagagcctggtaaacaagtacgcccagggacccagacctgggacagcagacttggtgcctgcacctggccattatgttagagatgaaatcaaaaaatcactcacaagatgtatagttctggtgcgtgtatcaaaccaagcggaattcatagcctgtcaagcatttctgtgtgctgctatgacagcagagtggaatggttgcaacagagaccgtgtggcccagaaagcctaaaatatttactgtatgactcttgacaggaaaaatttaccgagccttgctctagrgtataggaactctcccctccacacacacacaaaaaaggagaattaaatgtttatagtgttggtaagttagtctccgtgccccatcatatacctgtgacctgtaccaacaccgtccaatgggttagtttcagtgcctttgactttcacagtgcagctggtgtagagaagttctgggtaattttgattatatttctttgtttaccttgtccatccctggagtaagggtcaatcccactcacttgccttaaagtaattcaactcagcttcaccagtgttttcccccataggaaaactaatttcaaaatcataaccaaaaatatgcccaatggatgtatatgattcttttggccaatgtcatcaaatttgatgcatctgcttccctatggggaatgccacggaagaactataatatccttgccttcttgacttagatttcaacctctctacattctgtcttcctgatctggccttggtataccatctattaagatgacttttgcatatacttatgttggttttgagagtctcaaagttcaggggtgccttagtgtcagttgttgtctgacatctacttcgtgctcatgtgtacaatgtgctttaaggcttgagtcttgaacatgatggaatctacatttagggaagtgatatgctctgttatttttatctgagtctcccataatggcaaatagaatataattattgattagcctgtctcatgttcactaaattcagataatctttctaaggatttcatgaaaagctctgcactttgtgttgtaagctatattgtcttagcagacagattcagggtcttgccagagatcgtagctaccctggcctcagtccaatgtcattgtacatgtggtgagagcttcctcycggctaggagttcaattacctacttctgtttagggagagtagtctttcacctcacttagacttcaatatgagtgaggagggcctccaccctcccaaagcacggagaaaggagcctgcaggaattgtgtattctacttcctttgcaaccactactggcatatgtagtccctggggtgtaaagctagatcagaaatcccctactacccttagaataaatgtgaacacttatctctaaatcttcaaggagccaaccaggccttcatgtcgtgcagcaagactccataaaaataaaatacctctgtgaaggaaagcataatttaaggaaatatcaggctgggagaagtatcagtagatatgaaaaaagggttaaaactattttgtataaatcaataaaggaatatttaaaaactggcaaaggatttggactgttcacagagsgaatataatttttaagcaaatatataagcatctttaatatatgcaaattaaaaatgatgcactgttctgtgtatgataaatagcaatgactttaaaatgatgacagccaatgtatatatggttatggtaaaasagacacaatttaaattgatacagtcctttgaaaactatttggcaatatgtataagaaaacagcgtattaaggaaggcctgagaaataaaaccacataggtaatttgggctagatatagtaggcaataaaccctgatgggttttgagggttggagttgcctgagatcttttatatagattaatatgaaggtaactaatctacttaagagagagagagacaaagaactaatcattatgaggctttggtaagtgttgtacatccacaggtaatagaattttaaagctaaataatctaggctgtcgtcaatttgataaacagagtgggaactgaggaaaaaatggaagtaacttccccaaggctcaaggaggagttactagctcaggggaactaaatggactcttgcgagttccagttctttgtttttctttttaatattgaagaatttatggaaatctgtggtatttacagatgtaaaaatttaattatcttatgtggattttaatattttatgacttaatatataaacattaacttttaaatgagctcttaatgatagctatttctcatttataaatatttttgctgtcttgtagaaataattaacctttatagctttaataaatactagactgaagaaacatttttctaatcatcaattttttaatgtttgccttgcactctagacacttaccatgctctcagtgtgcaaacatgaataccactgtgttctgttttcccagagtgggaatgatggacatgtgctcaaaataatttcatcaaattatttattatccaccacaaatgcaaataattgcaaaaatgttataatcctataatagagataagagtacataattacaaagaagggaccagaagttagagaattcacaaagattcttgagtttgatcttcagaggctaataggaatttctcagacagcggagagggtaaggagttgagaaaaggagacaagggccaggtgcattggctcatgcctgtaatcctagtgctttgggaggctgaggcaggaggactctttgaggccaggaattcaagaccagcttgggcaacatagcaagacccccatctstacaaaagatttttttaaaaaattagcctggtgtcacgtcatgtgcctgtagtcctagctgcttgagagcttgagagatatatattgcaggtcccttgaaccaaggaatttgaggctgcagtgagctatggttgtaccactacacttcatcctcagtgacagagaaaggtcctgtctctaaaaactaaaaaaaaaaaaaaaaaaaaaaaaaaaaatgtgtgaagccatgaaatagcatggcactttcagagaaatgagataattaagtttgtctatctgaagtagactatgaagagagggtagttagagataaggttgttgaaggatgactcggtgacaacacttttttcagttagctaacatcgtaragtgctaacgacatgtgcagctccaagtacctttacatgtatgttagttttattttaccccatttattcccgttttacaaatgaaaaaactgagtcatgtaaaggctaaataacgagcaagcaatactactagtaagtagtacagtcaagagtcaaaatatggcagttgaatacatagctcagtgccttaaaatctagactgtcgttcctgtttcacactataaggctgaagcagaagggtcttaccactctctgtgatggcagtgcagaaaataggtggaagacgagcctatcgatcctggaaatagcctgttgcaagaattaaggcaagatataatgagagcctcaacttagagcaaaagtttttaggagtaaaaaccacagaacttagtcttaatttgatggagacactaaggagtttctggattgaaaaagtggatagttactggtaccattaattcaacttgttgatagggatgattccttttggtacaagtttaattatggtgtccatggaatacttgggtagagaggtctagaaatagtgggatactcaggtcaggagatcaaaaggtaaagctttagaatttatcagcttggagggcatcaattaaattcctcctacaaatattaccaagcactaagagcctacagtgggataagagggccatggaagaaactccagtgcactgctgctcaaaatatagtccatcaactggctgcctgtccactaactgtttattattagtgcaagataacaaaggatttgcttcagaatgtaatcgaccatgttactaagtaatcaatgacgttacatagtgttttcttcagctgactatatttttaatattagcaagacttttagatgaaggaaacattgtgttgattcatatcctgatgcaaaatctgtatcttgtcccagatcagcactttgaataacagggatgtagagaacaccaatattcacactttggtcagagcagaagttctccaaagagactgataagggatagtgtaaagcagaagtaagggaagtcaagatattctgaattggacatgatttaaaggagcaagtggtcagcacagctgcagaggggtcaaataatattgaagactaagacaataattattggatttggccattagagggtcatcagtaacagtttaggagttttaccccctgttgtttcactcttctgcctccttgaatctgtattattgccatgtagaccaaatgcctcttgactctaatctaaagtactcagattcagtctttattttacctgtttcttgggtgatctgaagttattgatcactctctccttcctgacatactttttcatctgccatacattgactttggttttcctcttcaaacctcacctgtctttctctgcccaacccttgtacacacactgcatttctttaacaacactcatttccttaattacatatggtgtcagtttccaatcctaaacccagcccatatttctttatggagcttcagagtagtctagcagcctactggacatctctacttggatgcccacagccccttcaaattcaatatgtccaaagcggaactgaattctcacctatactcttccctgtaatgccttcttcctcctaagtcccgtaccttgtattacaatcttcacccagttgtgaaaccactgacatgggcatgattttttactkcatctttcttccttatccacttagttattgattttacctcctaatgacrcttcagatctccttatgcccggcacctgcatcaccatccctcacctggatcactgaattatcctcctggccggtctcccattctcagtctcctctccagcaccctgccacgtggagtgygagcccccactccgttgttgaattctttacctgccactccagcctcatctctgtgttctttttctgtagactcaggtcagattggatttttattttcatttcttaaatgtgacatgcgctctcgcacgcgcttgcgcttgttcactcgcttgctctcgttcactcgcttgctctcgtgctctcgctctcattctctctctctcgctcgctcactctctctctctcgctcgctcactctctctctctctcccactttaccttcacacatacttatgcccctgtctggaacacagtcatattccctcttcactggtgcatttgtcctctgtcttcaggaagcttctgtaagcctgcaaatctgagttatgtggacttcctctgtgttctcctagcattctgcctttcctgtgttgtgacctttccacattactttgtaatttctcatttttgtccacaagtcaatgccttcctctgaattgtaagctccgagaaggcaggaaccatgtctgtttgctacatcattatatttcatgctcctggtacagtgcctgcatggtgtgaacgtgacatccactccaagtttgttaaaatcaatgaatgccctccaaagtattttcacatccagtatctcagtgggggtaaacttgaacaatttggagagggttttagtgaaacatgagctgtcagtggattagaagattaaatgatttgaatatttgagttgttttgcactaggaggaggaaggagaagttagagtctggaaagctggttaagagaatagaagcatttaattccacctcatagaaaaggaagggattttgaaaaataactagcttgcatcacttttattttcatcttcctccagaagtggaggcctgcaaggtacgggtgtgggtgtattttaatatttaaaggtgtcaggttgtctatcttttaggggtttttttccctttacctggaaaaactttagataacatgatttaaaactttcactttctactttgcagaatgaatttattttcttttggaaagaggcttacaaaagtaactcacttcattatagctagtctgtttccaaaaaaagtgataataataaagacagaatatattttaaaagattgagtttttaaagtggggataaacattaggaaataaaggaatgagccatcaataggaggaaatctaggctaacaaaatctaggaaagataaacgacttttacgacaaaattatactgtcggtaagtcaaggaaaaagttgtaacatgctaacttacattgctcgatgtcttttagcttctcttcaaatacttacttccaaaagccagagagctcccaattcaagagagactttgtagtaaagtacttgaagtgcaggttgaattagatggtgactgtactggttgtaaaatgaatgcttggtatcraaacatattagagattgatgtgtgttttgtctcagatggtgaatatctggttctgcatggagacgtacattgcagaatattttttaaaaaggaaggccaagactttttcctcaaagaacagctttgaatccacttgactacttaaaattctactcatttggagctgctgattctctttaaaacatggaagagagatgctcagtttggaacatcttaaggagaggatgccctagttatctgcctctgtaataaaagactattaatgtagatttagagaatgattaactgacaagccagcattatgttgtaatggttctgtgagatgagtcagcttaaaawtgcatcccaaataaactaacccatggggtggagttgatttggactttcttattgtcattaataagcttacaggtcatgatggtggtttctgggtgtgagaatcacatgaccagtttagatgaggaagtttgccatcttgttatagaagaagtctcttgcttgttttctataagtaataggaatctatttaggttttaaggttaaataagaggtatagagctgtctcctgtgatttagaaacagaaatttattctgtcaaagcctttcctatctactctgmctcaaggctttggagaagcacttaagcgtggaggtaattctgagaccatgcagtttgacacgtggatggccttattggtatagttgaggctgatagtgtgttaataaaggctaccaagccttcagttgttctcttcaaacagtggttttctgtttagtgaaatagaccaaccttaacaacatcgtagggaaaataatcattcctcatcttagatggagagattccaaactaaatctggtacagaaatctggaaaagagtttgtggggtgagccagctttttggacgtctggaatttgggagaagaggagatattctgatgtatgtattggatagactaaaaagtacaaaattggtgtgagtaaatggctttttgttcagtctgaayacaagataagcatcttccctygctccacaatcactgcccgactcttcctttgagccttttgggggttgttctttattttgtggtttctatgtaattattttagtggcttctctgagttacccagatgagtaattttaatgtgctgcctggttttggatgtttggttcaaagggactaggaccgaggaagagccggtgatggacagtgtgtggagtacgggtattgtccatgtatctgcctctttatcttgtcacccgcttgttctcacataaaatgagggagaaaatggggaatgtaaaattttcaaagaaaaatctacctgatgactcagttttccctgccccagagagctggttttttcttttcacctctttgcatgcaccagaacctttttgtagctgagagagccgcagctgaggcaaatgtgtgagcctctcagtatggccaggtgctgtgactggaatgaatgagagaagcggggaaaggcatggggagcgttctctaatcacagagaaccacatggaagatgcaggcaaccttgtacaacctgttgcctctcaccttcaattaaattttaattgttcctcatcacactttctttcaaaacaaatcttgtaatcagatatcttataaattatttaccagcgcaagtaaaagacgatgtaggatttcagcagaatgaratgtgctttactattgaaactccccttgtgaattaaaacaaggctaatcttggcaccatggtgatggaaataaaagatgaaagtccttcctatattcctgcagagtacagcacaatccacagcccatcaacacccattaaagattcagattctgatygattgcgtygaggttcagatgggaaatcacgtggacggggcygaagaaacaataatccttcacctcccccagattctgatcttgaggtacgtcatagccaacacccaagtgaatagaaaggtgtcttaatagctaactggtggttttacatacctgctacgtaaacagcagtggttaaggtatcagatgcttttgttactgctttcttttttatattaacaatagataaagtaatattttctctcctttattaactataggttaagcaataatttgttttttcttccctatgaactatatggcaaagggtctgtttctctctaaagaaatatagtaaattatgcaattctacttgaacaaaattctgttatgctgatctgtatcattgccattttaattaagtgtcatactaaaaatacttggtaaaatccacttgttaaaaggcacaaaaaaaatagaatgagtgagacctactatttgatagcacaacagggtgactatagccaataataacttaattgtacattttcaaataactaaaagagcgtacctggattgtttttaacacaaaggacaaatgcttgaagggatagagaccccattctccatgatgtgcttatttcgcattgcatgcctatatcaaaacatctcatgtaccccataattatatacacctagtatccacaaaaattaaaaatacaaaaaataaataaaatccactttttgttgttttgaagatggagtcttgctttgtcacccagcrtagagtgcaatggcgtgatctcggctcactgcaacctctgcctcccggttcaagcgattcttctgccccagcctcccragtagctgggactacaggcaccaagcccggctaatttttgtatttttagtagagacgtcatttcaccatgttggccaggatggtctccatctcctgacctcatggtccacccacctcggcctcccaaagtgctggattacaggcacgagccaccacgcccagccataaaatctactttgaaatgaaagacacacttatatatattgagaaaggaaaacctggaatgttctaaactgaaatagtaatcatctaatgagacatattttgggggagttcaaaagcaggaaggattaagtaagaacttaaagagtggtagatttcatagccttgaatccactgcaactaagtttctgctttttgccagagtgaaatctgatggttggaaaacatgattattttggctgaaaaaatgaaacttttagcagaatctatgtatatgaatatgtactggtgtgagtgggaataggaagaagtaaaacaggcttggtaggctttttgtggtatcccaaagacctttttgaaatgaattccttcagttcccattttaaatacttcaagagtatgtctaagagcatgagtgatgtgtatgcttattttgttaaatatctataccctaaagacttaaaaaacctggcaagaacaatgtgtatcccatccctttgataacagctcaataggtaacataaggtgaatttattatgtaaggttttagtctttggatgcaattttaatacttggcttcctaagagtaaaacataagattcattattttagtgcttctcaatgaacagagatcagaggtaaggaaaagataaatgatatatgattagttgctcatctctatctcaagttataaccagactagctataactcatttttttcatttattcagagctgagaccgaaattctattacagaattagaaaggacatagattatctctttcctatatttatattgacattacaaatgtaattatcctcttgcacctcatccaaagttatatctggagaaaagttaggagatactctttgaaacagttgtgttttttttgaaataataaattcagatttttcattcatcttccgtttcaagatgactttttcgtgttgaagttaactgaataacagctttctcagccaaggcaaagacacattgatttggttcttcctttgtagagagtgttcatctgggacttggatgagacaatcattgttttccactccttgcttactgggtcctacgccaacagatatgggagggtgagtaccaagaggcatcagtttttamtttctttggagtaaatatacctctaatttgtttattakccaaatgaatgtaatttaactttaacaaatttaaaatataratggaraagaactatatagtcaaatatatatatgtaaggtaaaaaatatgtaaaagagccaaagaagatattatttttaggtctttggcaataagatacactttgttcaattaaagtcatgcttattcagaccccagtgaataaaagtgattgaattttatcctaggatgaaatattaaaatacataagtgacatagaaagatgtttcgtgttctcttttacttttcctgtctttttattccctaacatttaatggagcaaatatttcactttctgttgttctcagtgattagaagctttggtattttatcttcaaaacaactgctacaaatgtctctatatgtccctttgctacttgggttaaatgtatttgaatggtatgtaagattgatcctctgaaaggcagtgggaccatgttagagttgtacagtacttatattggtattatagataaagaataatattatagaccaccttctgtgagtgaaactttggtttccatgttgtacatttgggtatcccaaaagtttggaatttcttttttggcatattgatgatttcataagtctttcccaggcaaaaatgttatttaaagtagctataggtaatttctcaagttatcctgctaatatttcatttctcttgttttcatctgtaaagaaataataagtcttaggtttttttaagttatttggagcattagagaytgaattcttattatgtcccagtgacttcagcagtttatcataattaagtgttagaattaataccattaaaatgcacatactgttattacaaatttgaccgggtggttgttctttcaacaaatatttattttaacaaatacacactgagtatctgctatggatatgcagtctgggggatttagcttcacagcccagatttccttttcatcatctcaaaggtacacctaatcaaaaataggctgaagcaataatatcccaccattttaattcctgttccgagataatatatcggtaaaacacagtatgtctcatcttattgttaggcaaattctctataagaagacaacaaaaatgcagattataaaatataaggccatagaatcaatcagccaaatggtctctactgcgtgattagcacatagtaggaattcaagaaacattagctgtgctttttcttgtattatttcttctgtcaatactatcactgttcctatttctagaaaaactactacttaaaaactaaagaytaatatctgaaatatcaacatgtagttagtaggcagaaccttgaagatctccttaactgatccattataaaatccctacacctgtcttctaaggagaccactggtgcctgtaactcacacaagagtgttgaaaagagtaggcacttagaaaatgagcatttgaaaaccacccagaaagtctcctataagctctcgctaagggccaaattgacgcaaaagagagttayctaagagtattctattagccaatgaaagagaccagcttagagttaaggagttaggcatcccatgacctactgaactttcaatctttggccataaattattggcttacacatggaacttacacttaacctagaaatgcctggcttcatacaatttttcattcatgtctaaaccattctctaaataatgtattacaaataccatgagtttaattttttaatgtgtcaatcattagaactttgaggcttcttcaagtagtaatatatttgtttgtttgtttagtttagttttctcattccaggtcatgtgataaaaagttttatctcggccgggcgcggtggctcatgcctgtaatcccagcactttgggaggccaaggcgggtggatcacgaggtcaggagatcgagaccatcctggctaacacagtgaaaccccgtctctactaaaaatacaaaaaattagccaggcgtggtggcrggmgcctgtagtcccagctactcaggaagctgaggcaggagaacggcgtgaacctgggaggcggagcttgcagtgagcagagatcgcgccactgtgctccagcctgggcaacagagcaagactccatctcaaaaaaaacaaaagttttatctcatataatttccaaaagccaaatttatatactctctgaagtacaggctatttgagtttcttaaatataagtgtatccttcattgataagtttatggggctgtggaagaacttcagaaagccaggtttctgaggaagatcttcctgcatgtgactttgggtctgaggcctggagttactgtatggtcatcaggagaaagggtgttgtaagcagaagaaacagtaagtgcagaggcaagaaaggctttgctgtttgatggacagaggccagtgagaccaagcttagtgatggagatggagagtcaatgagatgtggtcagggatgaaggcaggttccaaagggcctcccagccacacacagtcaacagggctaatctcactgcatgtgccatgggaagtcatcgggggaccacaatggaggagatgagaagatctgatttacattttactttagctaagtgtgaagaatgaatggtagtggaagaaaaatgggggtccaaatwggaggytgtagcagtgatctgaggcaccagcagtagagatggaaagaattatttggactctggattacattgcaggtagagaactggatttagaaatgatttgaattgattggagtggtgggtagtaaacaagacagagaagtgaaagatgattcctgtgttgtcctgggcaactgagaaaatagtcgtatatttgttgaaatagtaaagaattcaatttggagggaagggagagttcagtgttggacaagtttcagatgcttattagacaactgcttggaccaggcaaggaaaccactggaaggtgagcccagggcactggggggactagtcagtacaggagatggcagattcacagtcaacattgcacagattagggttagaggctccttggagtctcttagcttgatttcttcctaaacattttttgagcaccttccttgtactgaacacttgcggtcagcctgttgtctcattgcctggaggtgtcttttcctggccaggtgacttttgaagatgcatggtttaggatgttgaattgtagctggaagcatgcaaggaagtctacttaatgatttcctcattagaaatcattacagttgataagaattggctctcaaatctgatcatcaagctttgtaaaaatgtgattcaacaaggattcttccaaacaataataataagcaagctgatcagagtgtcttgcagtccttttgtttcccccagggcactgaggagaaaagtcttaaaggagttcagtgacaagacttctttttaggagcacagatttggtggtgttcctgggcattgtcaaggggagcatgtggctgagccttactctacatgtatataaagaatgaatgcctgacaatgtgatcgctgttctgtctctaagggaaccagatacttgagaagtagcttagtcacagtggcttaggcaactcaatgagtaggccattcagtaagaggacacaggatctggttgatacaatgcaaaattagggcatgttacagcaatgtgtaccaaaaaaaagtttgagaatgtcccaccttccgtgtaatcctagctgtgggaagaaggcacgttgggtgttataagaaagtcttgttttataacaaaggtgatagggacaaaagagggtgctgggcacagtcagccatggctgaggaaaacaagtaagatgttaggaaattgaagagcttgtgagtgctacgtaaactaggatgttttaaatagtatctgacctagctgtttttgtttaatgcatttttaaaagttgctttaaaactaataacaaattccagaatgtcattgaagaaaactattcttgggttatttttcattgaatggtctccttataataaacaatgtaattcaattattgttatcaaagtgcacacccaaaacttgtatttcaaatcaaaattgtgctgatgtctcaggcatggtccccctcctgtgggaggattacccaagatatctacactcaacgccttgattgtttcaacactatctttttattgtttaatgtctgtgtctcacagtgatttgggctagaatggatcttaaaaatatggatattcayttttcattttcaacaaaaaacaaaacatgaacacttaagatagtgtaaagcttagtatgtttaatcataggccctattaagaactttctatatgcccagcattcatttaattcaacattaatgctccaaaggtgctgttatcaagcctattttatagatgagaaaattgaaacgggagaggttagagacccaatgtaataaatactcagcaccatgtctagcataaaaaaaaatttcaacaaataccagttatatttgaaagtaggtgaagcttcactatcaaaaaaaaaacaaaacaaaaacaaaaacttgaattcctgcatagtggccagtgagtaacatggtggcagtgtcctcaaatttatgaattacaagtatacgctatgccttagagtgtgatagaaagaggatcggatttgaattcaagtagatctagactcaratccaagctctgacttttcacctctttgaccttaggcaaattatttattcttactgagcctcaattttcttatccataaagccagctacgtgacttgcggaattgttttaaaaattaaattgtatcatgaatttggcccagcatggtggtttatgcgtgtaatcccagcactttgggaggctgaggcgggtagatcacttgagctcaggagttcaagacaagcctgggtaacatggcaagagtccatcgctacaaaaaaaaaatacaaaaattagctgggtgtggtggcacatgcgtgtagtcctagctgcttgggagggctgaggtaggaggatcgcttgagcctgggaggtcaaggctgcagtgaactatgattgcactactgcattccagcctgggtgacagagtaagatcctgtctcaaaaaaaaaaaaaaaattgaattgctcacgaatgtaaaagtccatgcacagagtcttattaatggcaacaaccgatagtaagaaaggaaagcatgtgtcacctattgaacttgtagttgctctctagagtatttgttttataactcactaggcttctaagaggatctcacttgtcatagtgagtttagataaacagcctcccttgtgggtgtgtttctgtgatcattcagtaccttgaggaaagaaaaactgaaagcagtttatatcgcccatttcatcagaacagctcagttcgccagtagagattgttgttcctactctgctttaggggacaacacaactccaagctcttttggtggaggattttcttccatggtggttgatgaagaagctaaactcttagcatggcaccagagcagtaggacaccagtgtcctcactgggttgcaggagatctggttacttaaccaggatgatctcccttttggaacctccagtccaagggttggcaaacattttctgtaaagcaacagatagtaaatatttcaggctttgcgggccatatgcttgccataactayacagttctgccttagtagtgcaaaagcaaccaatgaataaatgtggctgtgttccaatgaaacttgattgaatgctcccaaatttgaattttatataatgttcatgtcttatgaaatatttttcttttggttttaaaaactctagaccgaggattgacagaccataccccataggtcaaatctggtttatggtctgcttctgtcaggcctttaagaatgttgtttaagtttttaaagtgtaatttaaaaaaataaaagcacaaggaagaatgtgtgtcagagatgatatggcctgcaaagatagaaatactccctgtccctttagagagaaaggctgtctgcctgcmtctgctgtaggtgatgctctgagctttgcactggttcattttcctcctgccttccgggacaattcaatgacagcaacaatgtgamtagaccgtgaactcaatgcaggcagtgcatacatgcgcctggggccccaaggaaacacagaccctcacgtgaattcattagggtaggtgaaatggctgttacaaacagatctaaaatataatggcacaaacaaaagaaatctgtctcttgtttagttgtctagagtggggatgttccaggttgcttggtttgggcatggtttggtggtacaaataatagtagtgccattttcatcatgcagcttttgaagcttctgggatcattagcattcaatccccaggggagggggtggaggcaggggcagtgtgaatgggaggctttgtaagctaggctgagacaggcacacacctctgcctgtgccattgacctcagtcaaatgacccagtgcaggggaggctgggcgattcagccttcctgtgtgcccaggaagaaacagagaatgggttttagtgaacaggtagcactcacagcccagttctcaactatttgaccaacgaatgaaacccaaagcacactttcaacccaccttgcagctctagccacactgacagagccaagccccaggctatgtgagtggtggctctggagtgatgatggccaatctaatcccaaaggacagagccctgattttattttcttccttgtatatcaatgccaaattagataaaaaggatgaaataatatatgtgtctatatatgaaacctctttatgctgtagagtgacatagaatctaaactctcaaaacaaacagaagcacattttttcaaatgccagccaaacaggcatgcttcatctctcttctggccatatcttgaaggtttctctcttttcctttaacagscagcccctctgcctcactaccagtagtatacagcggaaatgtacattcttgctgtttaatggaacacagccttactgttcttgttcatgaatataaaagggaatgcagtgaatgaacaggaatcatcacagctccttaaccactgcactggcctgccacctgcaactttggacctcccttgctctgtggccttggaaaaagcagcctataaaatgggagcaattacagggctgttaggggaacaatgtgaaccacctagaaaaatactcataagtacttcatgaacaagagctattatttattgcttactttgggggttcagaggaggaagcaggaaaccatgcagactttgttattccaggmagcaaagagggagtgggaaacagagaattacaartggcagaaatcataagcaaaaagggtaaatagtgataaagtatatttaggggattagacttgargaagaatagtagcagaaaatgtgttggatcagtaataaaaagactgcatctttrttcaacttttatggtttacactgctatctcacacttattatccaatgarctccttctttttgccaataagaaaagtgtagctcagaaaaattaaattatctgtccaaaaggcagatccatcaactggcaacaccagtcttgtaattgacccaggcttagagagagcattgagtgccaggatttcgttctgtgggcatgggaatgccatgaattagggacatgatggaagaacatgatggcaatggagggacatgctggaagtgtacatttggaagaccgatttaatagcaaggaaaactattgtgcagtcctctggtagaaaataataaaggcctaaaaagtggctggaacactctgtaggaaggagggaggtaggagagtcattacaaatgaaatcctgataggtctttcgactggatttagctgtttagcctttcccttagcaccccatgggccccttggtgttgaagccaatttggccaggtccatgctggctttattcttcttcctccctctttgtaccacttcttggcagttggcccatgtttgagattcactgggttttctccacagtcaaaattagtctttggaatgttgaagttctttctcttattctctacttgagtattattttcatggtgttgaaagggagtctcttaagtaaggagaaaattaacacaatcgagtgtcacgtatctaatcagtaaaaatgacctgattagccccaccacaagtttgagggttttgggggtgtttttccagatcattcaggcagtagtttaaccatggtttattttttatgtgtatacagtctctcttggtaatctgtattatttcttaattggcaagagaatcacatccaactcccaaaatctgatatttcatatctaagtagcccagtgatagggccttaaaccttgaaaaaagttaatattttattgatgatattgctccctttagacaggagaaaacacaataatggaacctttgggtctcgtaagttgtacagatcatttggataacacttttggttatgtgtttatgtgttttttattttttattttttaaaaaaacaatgtttcagcatagtttttcctttcaagataggaagctaattttcaaagcttaaccttaatcctttccttgtgggcagccagcatggggtcttaaaaataaaccactcatgtattcagagtgctcattcctgtttttcagcttattttcccccaaaacaaaagatcttggatggggagaatttttaaatgacattcaggtcctgtttgtggctgtaatattagcattctaagtaaggaattgtttaaggtgcactgaatgagtatttttctttcttttgattgatactgcccaaagatttgtccttgatttgagcatacttaacaagattttcacatggacgaataaatctcataaacctgctcacattgttagcaacacacctcactgggctaccacaactcccagtaattgcttgccagggaggcttagctgcccatgtaggattagtacagagagagtttaggaaccttattttcttttattccagaaattcaaaatgtaggtagcatatcctgaggaactagtcatgctttctgaaatagttgcactgtcttctgataactcctrtctcaagattaattatttaaatagcacttttttaaagataatatattctttgtgattcaaagtagaatagcaattgctaggagtttgtgtagagtatcatctcatggatataagtaggtacatattcagagaggagagatacaaaagacatacattatgtatttaatgtacttataaattgaaaataataggataagaattaaaaggcaaaataattccctttcctttttatttttagtaagaacaccataagtactttgtagagaccaagtcagaatgctgaagctacttaaaattggaacaatgacttagccattaaaatagttcttaaatgttgacttaaagcatttaaattagacaatttatattatgtgtttacttattttgttttactgttaaattttttgttttcaatttagaaaaatagcatggccaaagaaaataaagctaaatgtgcaagggtgcataaataaaaactagagctacattaaaaataggaacaatttttcttttggtgctttacaggtgtatctagcaataaagagaacctgcttcctcattaatatttgatgccatttttagtggttcttataataaaactaaagtgacttattcttagatgacatcagatctaatgtaatacttgtcacttgtggcattattaaatcaacaataaaaatcttgggaagtatcttttaaaacatagttacataaaaaggagagatactttcatggttagaaaatggttacctttaacgtttctagagaaaggagaagagatattttgtttttatactcagaaatatattctggatccttctaaaagccccaaaagagataaacaacaggtttcccttcaactttctatctgttttgagtctccaaagaccgtgaactatctgaactgaaagtaaataaaaacgggtcaagaagatcatttctgaatcagcctcacttctgtgaggggttggtgtttgccactaaaaatagactacattgtcatttgaagccaggaagtgagaagtgttcattttttcttgcctctttctgatcattttagttcaacgcataactctacctttctccagcaggctgaattgtgcgactttcatgagtcttacgtgtttcttttatgcattttgccagaatactgtgcttaaatggtatggggccagtagagagctccaggagtgggaactcactgaactggtaaatgacagcaagagaagttaggacagataccagtgtgtccacaggtgactcttggtgctctttggcatctgtgtaataaggtaacatgaactgtggtgggcgggcatctccagtctgctgtgcgggagagggaggattgattgtagaaagtccttagtggtaccaagagaatgtgatacggctctggcttggttgaccatagacagagttcagggtaaaaaaggtattttgttgttgtagggagaaagctgctggatttataggaaaaatgatgtgtgcttacccaatactatcagtaaaatagtgtctggctgctttacatttttctttaaaaaacactataaattccacattgcaatccttttctcaagcactctgaatggggtcactaagcaactttgtgacacaattagcttcagctgtccagttggtcaaattagattttacctcttctcccttcctcaatgtttgtaagctgcctcacgaacatgactacaacataaaacatttaactttccaaagaggtcaagagaattgaggataaatacataccgccttcaaaacagttttcacagtccttatttacaagatagttaagatcaaatatcatgtacaaacactagaattagcagtgcaaatgtaactataatagttctccacataaatgggcaacaaaataaaatgagcagcataaagtttaacctagtcactagaataaagcaaaatggcatgtgagaatgtactcccttccrctccttcctggggacctagaaaaattcctggtggtttctgtagtgggtaaggtcccctgctaataccatgtggtctccatgttaggactacccaaagtttaagactccaccatagaagtatcaggtggtactcagaacgttaggcttctagcagagatgagtttccctgtggataaatgatcattaaaaacatccatgaagtaattcagaaaattgtaccaccaaatggcacccttctcaagttgcacacgcaaaacctccagggctatatggactccagtacccagaacacatgcctggctgcacacctctctcctgcctgagtcaccatttgtttcctggcctgacattaatgagtcattcagaaagtcattcttttatgatttatagaatacataaacagtaatgttgtaggtgcctagccaaaatttctgccttcaaggagcttttaaattaacagaggaggctgtttggtaggggatggatgaatcttcaataatagtctgtcattagggtaaaactattctaaactaatgccactctaaatccactaagggtaaaactgcagaatctccaaagaaataacagtgctaagaaggcaacaagtctctctgtattattcatgagagccattctctagtagctacatcatttaactagcaagaaatagccagtaataggatgtcagatgataacactagcattgtgaatcagaaaaaaaaaaatcaggatccacaggagacatacaaccaaaaaataaatgccaggagccttaaatgaaatgtttctagggttactgctcttcttaaattacaccgggatttctcctttgcagctgatcagcactgcaattcaacaccgctattgctaaatgtatgagatgatcttgtggcttcaaaaatgtaggagttcctctgggttcctggaaaagaacatcccatatggtaaaaatgaatagagtgaatagaagccaagcatcgtctgacatacattcttgtgtatattccaaatcctcacttatatctgggtacagattacccaagtatgccctagcaccttcttttcaataaaaggtgatatgctgaggaactttggcaggcttttgcattatggcctttaaaatgtttttggcattttaaaagtatggcttgcacgtgttttaaattttcagaataaatatttttaatccatagtttcaccaccaaaaacagccaatcttgtcttagtgaatatttttatattttttttaacttttcattatagaaacttgcaaacatagaaaagtagatagaataatatgtataatgaaacccaatgtaaccactccagctttaacaatatcaagtcctagccaatcttgtttatgtatatcttcatcgtatccctctgcttcctggtcctgtccaaggatgatttttcaaaacaaatcccagatatcacattatttaatttgtatagagttgagtatgtatttaggaattcattaaaagaatagaatagaagtaataaatagtattcagcaccttagccatctagtgaaattaaaaataattctgtaatatcattaaatgtctaaccaatagttatatttaaaattattttttattttattttttttttgagatggagtttagttcttgttgcccaggctggagtgcagtggagtgatctcagctcactgcaacctccgtctcccgggttcaggcgattctcctacctcagcctcccatgtagctgggattagaggcatgcgccaccatgcccagctaattttgtatttttagtagagacagggtttcaccacgttggtcaggctggtcttgaactcctgacctcaggtgatccacccaccttggcctcccaaagtgttgggattataggcatgagccaccgtgcctggccaatttttatttttaattttgatatacacataaaaaattttaccttcttaaccattttaagtatacagttcagtagttttaagtaccttcacattgttgtaaaaccaatctccagaagttttttatctctcaaaattgaaagtctaaacccattaaacaactccccattctcccctccccccaattcctggcaacatctattctttctgtctctgtgtattgcaggtaccctcatataagtggaatcatatagtacttcactttttgtgactggctggtttcactcaggacaaggtcctcaaggttcatccgtgttataacatgtcagaatttcctccctttttaaggttacataatattctgttgtatgtatatgccacattttatttttttgatatatctatcaatggtcatttgagttgcttccacctatgactgttttaaataatgctgctatgaatatgagtatgcaaaatgtcttccctgcttttagtattttttgggtatataatcagaaggggaattgtgggatcatatagtaattatatacttaattttttgagaaactgctgtactgtttatcttagcagctgcagcattttatgttcccaccagctgtgcacagggattccaatttctccacatcctcatcaacacttattattttctgttttttgttttctgatagtagccattctaatggctgtgagataataactcacagtggtttgggttcacatttccctcatgaataatgatgatgagcatatttcatgtgctttttgaccatttgtataacttctttagagatgatccttttcccattttttaaatcagggttttttttattgagtcataggaggtctttacatattctggatattgaccccttattaaatatatgattttcaaatattttctcccattccgtggcctgccttttcactgttgtttcctttgattatacacatttttcattttgatgttttgaatttattttcttggttattgcctttgcttttggtgtcatatccaaaaagtcattgacaaatccaatgtcatgaagcttttcctataccattttatattttaggtctttcatttaggtttttgatctattttgagttaatttttgcatatggtgtaaggtaacgatttaccttgaattttttgcatgtggatatccagtttccccagcaccgtttgttgaaaagactattatttcctcattgaatggtcttagcacccttattgaaaatcatcttatcatacatgtgagggyttatttctggtctctctctatattccattggtctgtacatctgtatttttgccagaaccacattgttttgattactgtgtctttgtaatcagttttgaaattggcaagtgtaacacttccaagtttgttattttttaaaattgttttggatcttcaaggtcccttgagatttcatataaacttcaaaatggagttttctgtttctgcaaaaaaatactattggggatttgatagggattgcattagatctgtacatcactttggatagtattgacatcttaacactatatctttcatccatgaacatgggatgtctttccatttatttgtatcttctttaatgtttttagcaataattttttaaaatttttcagcgtacaagtgttttccctccctatttaagtttattcctaagtatttgatttctttcatttctgctattgtaaatggaatcattttcttaatttatttcctggcttagtcgttgttagtgtatagaaacacaactgatttttgtgtgttgttttttcatcctgcaactgtgctgaatgtattcattagttctaacagactctgtgtgtgtggtggggggcggggtggggggaggtcttcggggctttctacacacaaaattatgtcattgtaaacagatatcattttacttcttcttttacaactttgacgccttttatttgttattcttgcctaatacttctggctagaacttctatgttttgttacacagaagtggcaaaagcagcctggttgtcttgttcctgatcttagaggaaaaactttcagacatttaccattgagtatgatgttcgttgtgggcttttcatatatgagctttattttgctgggtaatttccttttctttctagtttataaagtgtttttctccagtagttttgtttatttactttacagtttattatatgtctcctaagtgtctataatctatagattctcactcaatccctttttataaaccttgtgtatttctgttgaagtaaccagactgtctgtcctacagagttcctgggagtctgggttttcttgacagcaaccctattgtattatttaacatgtttctttgtcctctgtatttcctacaatctgatagctagatctaggagcttgcttagttagattcagtttccttttctttttttttttttttttttttttttggccaagactttatagatggggtatatccttgagcatctagttgttgtttttaaaacttcagtactccagttggagaagctccttcagcagtccattacagaatgtttttacttatgctgtacattctttcgttttagctctaaggaggttgactaagaagaagaaaactcaagagtttggaagttttatgaaccacagattcttaattgatctgaatcaaatatmtgtagccttgctgccagaaaaaaagactgacagttcctgttgcagataattagctcagagctatttttgctgaggtgaagttttgagatgaaactaaaccacttgctgaattttgatattttctcaagtatcaactcttcttgaatagctctacagtattattgcatatttttgattaaggcttcctcgttacctttagtggacaagtaggtgtcttgagtgactcatgctgagtcacctggcaggtgccacattcctttgwtatcttttcaatagtgtggtgaagttcaatttaccacccttagtttcaagtgagagaactaactgataggatcagtgaattaacatggttagtctatagctatgcttggtggctaactttaaaggcagattccagctatcctacttgaggacatttgctctacgggtagtttctttgtctcagtgtaagaataaatatttattagagatttagagatttatatacaatctaacatgctaatcttgactgggaagtaatcaactatttacattacagaaatatgctatactcacatcagagagccaaagaatagaccacctttcccctatataatcagtttgatgattcaaccaaactttctatttgtgggagaaggatccttttttattttttaaataatacccccaaattttaaactctttatcttcttcctggagtgggcacagtccaagtcacatgcattttaccctgagcggacagaataccaggtacttgatacagatactccagaactgatactggaagactctacttctctttagtattatggtagctgatattttatgttaatttgatattcttaaagtgctttcacaaatttatccttcgacttgaccacagacaaaacctttctaaaatattatgtcattcctgaaatgctaaagtattggatcattttatgatcactgaaaaatttcagggactttacattgaaggcactaaatttggactctatgtcaataattcctgtttataaccatgtattactggcatacatttgtagataaacttggtcagggtcaagatgttgccaagacctattccccccagtcatttgttaattgattggatttgggctaagctatgttcacaaattgtcactgttaaatgattaaatggtataagcagaaaggtatatgtgactaacttaaagcaatcacatgacatggctatgcaagtaattgatttttttgaagaatagttctaggtttcagttgaactggtgcattgctcagatcccatctgaatgatcctaccttcctcttagttcctagatcttcagagtataggacaccttttgccagcttcctagagttgggtcatctttcctggtgataaaagcttggttgacatcttttggaagaaccagtgatggccccttctgggagtgctcatgttgcatcgtctagtttaacttccacctaaattagctttactgatgactgagctcttaaaaatatggtcacctcaaaaataattggtatgaggaattgtatgaacattctatcgaaagtgccttgagtagtaagtacagcgaaagtctagtttgaatgtatgactcctttatggtagtgctgcagagattgagtgtgttagtccattttccattgttgtaaaggaatacctttactttttagtaggcacaatacatatagcacttcagaaatttgaatttaccaagattctcacatacacagatgaaggcattgttggaagcaaatgacttagccctgcaaaaacaacaatgccttcatctggtgtgtgtgagagtcttggtaaattaaagaatcagaagtgctatatgtattgtgcctactaaaaagtccatttttaatgatacttgaagtttatcacatgccttagctcactgatgaaacaaagcagggccccaagaggaaatatcccagtcctctgatgatctagtacacacatgcatttatatacccttttcttttatttacttcaaacccaattacagattttcaacatttgaattcaaagctgacagacattaatctctctagagactgtatttaatggcatttcagtatttctgtgcactgcttttgtccagaatatttttcctttttaacattttaatcaagatctactgtgatagctgtgatgaggattaaaaaaaaaatcaataaacaattcaaggtagtggaccagggttgatgctggtgatttgggtacatgatgaaaattttagtctctgcgagcagttctgtgttgtagaaataagagaaagagatcttgaggcaatgggataattaaagaccacttgacagaggatgaaggcaaaacaattgttttattcctggttctacagacactcagccaatttcatcattatttactttttctayataatgttactttgaattagtagacataatttgcctttgatgtactgaaaacagccatgggtagcctaggatgacaacaagttccttcacttcactttagtgactttaagtagacatttgcaatttaatatcatatccaaataatttcggagcagggttagatttcattcctgtgtgtgggtgtgaagttagatgttgtgtattgagttttgtttgggtgaagaacaacttaagaaggcttccactagaagaatttcctgtacataagaactatagtaaatgtacaatttcttcgttaaacaagaaaattgataaaacagttgactgtatttttttccttttgagcctcttcactgtactattcaatttctaccagagaagtaaatttcatggcacataagaacatattttacaaaatggtgtaatacataccactactgagtttacaaaatcagtgttatgctgaccttatggtaatattatccacttcattaaatagaaaagtaaggcttcttatgcagctattctaagaatgggctcttccttaatcaggtagatagcatttactagtgaacacgtttaatgtttaatactatcttatgtagatcaaatgagattttcagattcaagtgcccattttttccctaggctagatcattaggaattgttttttcactgacaacactaacagctaatgaaaggtaaaatttagtattttcttcttttcttcactggaattatttgaaatattctctatttattgcttttcattcatttattcctccaccaaagtttgggaaagcctttatgacatgcattgtgttgagtaccaaggatatacagataaggatatagggataggaaaaaacaaggaatcatagcctaaagcttaaaatgttgtttaaaggctgtaaagagagagaaaaatctaattgaacaaaacattctacacgaaatagaaacagagcctcccactatgttttttcagaggattgataccctctttttgattctgcaaataacagtttcatactaaaactaaaaagaaagaaaaccatactctgaatctaaaaaacaggaggaggaagatacagggattaaacccctggcctgccgagamaagaacacatagagctgtggtaccagcaactgtggagcccagccagcaaggatcagggaggtggagctgcggaactgggaaaggggcccagcggggagcgctgcctgtagggatggagatgtgagtgtacaggctccatctgagaccacggttcatgaacctgtgtggacagattctttgccccagtttaggcctctgcctagttgtgttttgaggaaaggatttcatgatcaagacaacagtttgaaaaatcagaaacaggccatcttgaatatgtaagcaaaagttagacatatacgggtcttttgtacttgttaaatgtttgaatgttttttgaaagagatgagaggctggaatgaagatagtgacaacctaggaatagaccccagtgaaggagaccataccaaatatccacaaaagacacaaggctaaggggaaaaaaaaaaaacaagaaagcaaagaacaatggcaatgacaataagggaggctgaaatttatggtccgagtgacagagtgttgaaattgattcaatatggggctaaaaagaggtggctaggaaaatgccaaggtctgggttggtaggatgccattcctctaaagaatgaatacagtaggtgtccagacgaaatgtgatgactccaacttgccacacattgaatttcaggtgctttatgggacatctaggtggaaatgaccaataagtaattgatatatgagcctccagttgagatctaagatctgatagaggggagtgggtggtggttgaagccatcagtgtgcttgagtccacaaggtgatctgaacagaatgagagatggaaggataagaataaagtcytaggaaccaacgtcattgatatggttttgctgtgtctccacccaaatctcattttgaattgtagctcccataattcccatgtgtcatgggagggacccagtgggagataattgaatcatggggatggttacctccatgatgttctcatgatagtgagttctcatgagatctgatggtgttataaggggcttttccctgcatttgctctgcacttctccttgctgccaccatgtgaagaagaatatgtttgcttccccttcctccatgattgtaggtttcctgaggcctccccagccatgctgaactgtgagtcagttaaacctcttttctttrtaaattacccagtcttgggtatgtctttattagaagcatgaatggaataatacagacatttaacaagcagatgatgtatacatagattctaggaaaatgcccataaaagattgctgtcatagaggagaaatgtcaagaagagagtaaacagcagtggcatatgccacagaaaggccacgttttgaaaagaatgagaacatttggcaatgagattgacttaaaatgagatgttactttgaagtggaggcaaagctctaaataattttttgaaagtgatataacaaaaaatggtgttttaaaagaagtccttttataactgcagctctggaatttgttattgcaagaaaattatgtattataaaaatagtaagattaaactaaagacctggtgattttaacatctcagttttggtttaagaacgtgtttttttccttgttcttaatatgccaaaataagccatcaagccagagtaatttaytaactgttcaatgttagcttttttcacatttgacttgtactcgtatgagactttagaaattttaacagtgttaacgtattagctattataataggaaaataaaatctaaccttgatatgagaactccagttgctagaatatgtaagcaattccatgagcagaattatctatctgtccttctgctagtttcctcttgggtaaaacactcagggtgagatggctttgcactctgcttgctgggtcatcacgcacaaatcacaaccctctaggaactccgtgctctgtttctaaagtcaaagagtaggtgttttctagagctctgcctttcaaactgtagattgagacagggctgtgaaatggacagtgtcagagtatatccacacagtgagcaaaatcttgctttggcaaatatatttcagctgtgtgtgtgcacataagagagattcttagatcccagtgttaattgtgttttttactgagcattgtggttcaaagatgtctgaaaaatactgctctcaactagaacccccttcctattctaaaattgtctcattccagttagctgccagactgttctgttggtgtagtaaatgtttcaaaacaatatcttggagtggcaggtataaaaactgttgaggaatgacagctaataacaaaagagattaacattaagaggtaaataagaccaacatctgtgttgtattttaccactagactgaacaagcctttaaaatttattagtattctgactagcaagtcattactgtaatttatgaagaaaagttaaagtatgctatatattaacgaacaatagagtaattctttcaatggtcatataaataagcaaccgtatcaaggagaaataatactttttcaaaagtaacaatactatggcacataaattttaaaattggcaattaaataaatgtggtgaggctccatccttgccacataaaaagattcattgacatggttatgagacaagtcagggtatttttattggcctgagctagagggaataaacaccttagtcaggtgttttgttttagacacatctgtttgagcttcccctacaggttaattcagctgtagggtctatttgagcatttgctttttccagcatgcctactgatacttaaactccttgtgaatgagcaatttcttataaatccaagagtaaatgagttagtttttctttacagtaatttgtaaactgtaattctcctraaacctatgaaatttcatagaatttcatagatttcaggtgtattaaaaagggacaatttcagaatgctaaggagtatgaatcatcatacacaaaatttgagggaatcgttttcctttgtccctcccagcagaactcttagacactcagcctctgcatctttatttcctctctgccttcttatcaaccctggggtatttgccaatctaacccctgacgtttggcaatactatgtcctctgcttcccttccactgtcagtcagctggcagaaaaggcacaggcaggagaggaactgaggtgagtgaattgcaccatcctgccatatttcacgtactctgttcctcctctagggctgctggaaggtagaacttgggccacactggagaggtgggggcagtgcttaagggggtgggatgtactgtagggatgtgggtagtgctggaagggtgtgggtagtgctaagggggtgagaggtgctagagggaagtgagctgtgccaagagggtgggaggtgctggagggatgtgggaggtgctggagggatgtgggcggtgccaagacagtaggaagtattagagagatgtgggaggtgctggagggatgtgggtagtgccaagagggtgagaagttctggagggatgtgggaggtgctggaagggtgtgggtggtgccaagagggtggggagtgctggaggggtgtgggcagtgctaggggtgggcagtgctggaggaatagccaggttgggttgggttgacctccaggctacagcagatgggcccctggcaggtgcccagcraggctccgctcccatctcccaccctttccagcccctgctctctcctaactgtacaaacatgtaygattctgacaaatgaaagacaagattttttttattagtctatgtgagaatattgtgtttgccatcttgctctcagatttattagtgaacaaaccaggctcgatgagaggatgacacctaagtgggaaagcaaaggcagggtctggcctacagtctaggcctcctctctcaccacttcttgccacttcccaaacttaacaggcatggcagatgttaaagagtaggggtaacacacgggcatgtctagatattggagataaagttagagtgttcagaaaacaaggtagatagtgtacaaagttgacattgggcagtatcgaatcaaagtcttttctttggattgtatgttcttgactctaagactcaaaggcacatgacacacatatcatgacacatggcatacctgcccaatggggcctacctgaaggcagtttctctgcttacaatccccctggttacataatgatgcaaggagattccatacttattccaaaggtttgccgtgacaataaaatagtatatcataaattattgttctttggaagaattgaaaatggcatacatacgaaagttggtattattaatagaatgccaataaacccttaaaaaattcattttatagccttgtatacttcctggaaatgttatctttcattacttcctatacaggatcttcagccatgaaccatgttgcttcttggatttgatacacagtaaatacaggataaaactgcaaatacctgcatatcccccaagttcatttcagtgccagtagatgtcatcagggtggcttgtagggagaggctgactactcactgctaatgtccaacacttgaakttttagatagaarccacggtgcactgtggaatgtagcactgctctctgagtatggcatgggctgtttgatgcccgtacagtgtcatgtgaatcttaagatcagctccctgagctggacagtgcctggtggggtcagagtggccatcacttcctgctttgagtacacttaaaattgacaggtttaatgaatgcaaataatgatagagagttatctagattaaaattactatgtactacccttctgaaattaacctatagtgcagggctgtccaatcttttgacttccctgggccacactggaagaagaagaattgtttgaggccacacgtaaaatacactaacactaatgttagctgatgagctaaaaaaaaaaaaatcatcacttaggccgggcgcagtggctcatgcctgtaatcccagcactttgggaggctgaggcaggcrgatcatgaggtcagatcaagaccatcctggccaacatggtgaaactccgtctctactaaaaatacaaaaaaaaattagctggtcgtgttggtgcgcgcctgtagtcccagctactcgggaggctgaggcaggagaattgcttgaacctgggacatggaggctgcagtgagctgagatcacgccaatgtactccagcctgggtgacagagcgagactctgtctcaaaaaaaaaaaatcatcacttaaaacatagtgttataagaaaagtttatgaatttgtgttgggctgcattcaaagccgtactgggctgcacgcagcctgcaggctgcaggttgggcaagcttgctatagtgtatctattttctgatatttgtgacagtgcacttagatgctcttaatggattgtggcgtaacataaccagtggctacttgattcactgaattttttgctcctgaaatagacataaaaagttgaatttcctttattttatatgtctaagtaaccctagattttaaattttaaaaaagtaaagaaagagttttttcttcagtgtgtaaagcaccatcaacatttggggctctttttataaaataagtccctgaagtttgcacacagaataagtcatgcacactaaaataagcagctgttgcccaagtctctctctgtgtctcttgctttcagcctctcccaatgcctgcttcctcttaatgagacactctctttcatgtaacctgaagtatacatgttcttcacctgtcatattcttattttaggatccacccacttcagtttcccttggactgcgaatggaagaaatgattttcaacttggcagacacacatttattttttaatgacttagaagtaagttctaatttttaatacatatttttgcatgtctgaaaataggtgattggttttaaaataaagatrggatattattttttaatgtataattggaatagtgagacagaggtttgttggtaatatggcaatgtgttttgcctttatgggatttctattttgctttactttggctgttgattttcagagttagatcctacatgaccagtagtaaagattaaaatttgatttcaagaatcttaaactttgttgattatcagaagccacatatttctcagttacataatcaccactaagatatgtccaacataattcgtaacacttgcatatgttatgtcagattctttttttctttgagactgttatgtcagactcttactgtattaggaccgatgctttactttctggctgatccaattggtaggaagatgttttagtctggcctctgctgtttgggttgccaggactgcttatgtcacactgctgttaattttattggtccattatgatttcagggcagactcttgtaagatggctagctgaattgttacaggcactgacaatcacaatggtcttgattagcagcattcttaagagtagagaatattgtttttcatatctccattatgagaaaatatgactataactacatttcgttctcttctgaatagagacagttgtttatttaaattccgctgttaagcaagcttgtggtagggctgccaacaggcattaatcatcaagttgttgttttgttcgatttataaatgtatgttatttcagacaggagaagaatctgaaagattcaaatagaacttttactgatcaaagttaattggcagcaattggcctttaaatatttcctgatgtttcccttttcaaaatcaagcaaaatgcaccttatttaatagatgagccaaaatcatttgaaaaatgccagtgtgtgacagaacttaaatgcggtttgttcaacatctgtcctgtattttgatttcttttcatctgcaatgaaactactcaaagacgaattggcaacttccagtgcaataaagttattaaatatgctttattttttctcttccttagtgaaaaatttattttacacttaagggtaaaatacaaaatttttttgcaatttaaagtgttttcctcaagaagaaattacatgtaaggcattactatttttttaaggtagaaatattcccattgagtgacaagtttagaattaattgcctttagaaacacataattatcatacttattttcaaaagctgtttctgattgataattgttttcacttagagagcagcacaaaaaattccacattttactggtatgttaaaaaatgcctttcctaagtttccatttgtttctaaagatacagagtagactgattttttgtcctgggtacaatcttgttacctttattgatgttaataggtgttaataacaaacatcaagaagaaatttgtagtaatttcctattgttttaaaactctgtaccttcttaaaaatgccaaaacttggctgggcgcagtggctcatgcctgtaatcccagcgctttgggaggcagaggcagctggatcacctgaggttgggagttcgagaccatcccgaccaacatggagaaacccccgtctctattaaaaatacaaaattagctgggtgtggtggccaatgcttgtaatcccagctactcagggggctgaggcaggagaatcacttgagcccgggaggcagaggttacgatgagccagagatcacgccattgcactccagcctgggcaacaagagcaaaactctgtctcaaaaaaaaaaaaaaaaaaaagtgccaaaacttgcttatacagtgccaaaattaggtggtgaaaagtgagatgttaggcagtcataacttgttataatatagaccaaaaaacttccaaactcaatttcaatgtagtataatcagatttttgtttattgacgttatttacactgattatatagagactgaaatactactcaaatatattaaaagctctaggtttttagggtataggagatgtatttttttctgtaaacccaaatttcaaaagaaaaagaaaaagcagtctatgaagttactgaaatatcagattctatttttggcatgaggactattccttagtagaggtaaagtagaaaagagaatgaaggtataattcaaccaaatatataaaacaatcatgggaaaatgtttaagcttgtagccttacaaaagttgattttatgttagggatattaacaaaagtataaatgaaagattcatttagtctgtctttggaaattgtttacttgccctagatttgtacaatattttaaaaaataaattggttttttacttatttcaatattttttattttattttatttttgagatagggtcttgctctgtcatccaggctggagtgcagtggcaccatctcagctcactgcamcctctgcctcccaggttcaagcaattctgcctcagcatcccaagtagctgggattacagatacacaccaccatgcgtggctaatttttgtacttttagtagaaacggtgtttcttcatgttggccaggctagtctcaaactcctgacctcaggtgagccacctgcctcggccacccacccaaggcactgggattacaggcatgagtcactgctcccaggccaatcttttattttatatttttgaaattcaacaaacctgggactggtcattgcaaatatgttttcttcaaaataaaaagtaaaattattttctggcaaaaaaaaaaaaatgtctattggcataatgctcctaagaacaccagaattatctcatcagggagaagtgatgtggtaatgcctgatttcacactccaactagcaatggatagtggtaggggacatgaatattttaatatatttaagttacatgtttttagctttgtaaggtctatagcataagtaatttcaaggagcttaatagtctcttggttagcttgaagtatgatgcctgaactctaattgttgacttttggtcttattttcttctaaatcttagcttttgccagctatctcttggtataatttggttagttcactccttgcttaataagacattctgactagtgaaatacaccccctctgtgaggggctttcagtaacatttgtcatattatgaatcagtgtacatgcttaaaatggttattaggatatgatttagaaaatttaaggtataatttttgaagtactttagaaatatcttaatcgaactctaagaactaagttaattcattttagtttcataagtcttgtttgtaatctcacttagtgacttttttaatttaaagaaaatcacaatttatatcaattctgttgacacaccaggaaaaacaaaaaggagaaaaaaatgttttctgtaccataaaaaatgtttgacgtatgaaggaacatgagtgacagggagacataattatcttaggaaataatattttccccccaagagaagggtttcgactttagttccgtagtgtacgtctggctttcctatttctaagtctgactaacgtcctgcatatcattttacaaaaaaactctccatgtgcaatacgatgatgcctatatggaagtcattttttatgaatgacagtatggaactggaggttttttcagcttctttggtaaagtatgactctttctgactggttggagaaagagttctttctgttagctttttattgaaaggcaaccttcaaacggagtgaggaaaggccttcagcatacgataatatttcagtttaacctgctgctggtcagttctcctgctggatttttccacagttagaagaaaatattttatgaagatggatacaggtctaaataaaaataatgctttaagttcatgttgaattttcttcttctgtctggttaaggaatatgatttcactggcattatggttgccatcctaacccatgttgacagagtgacctttaagagtcagcaggaaccagatctctggtctcgggtcacccgttacccctgaagagtaaggattgggaagagtgggaaccctcctctcgtgtctgtgagatggtggcacatgaaactattgcacataccacgctcaccccgttagtagcaaagctgttctaaactcccctctccactctttcagtgcattgtttagttggagcagaccagagcattctttgcatcaagatttacaacatgaatattccttggggccttcaatatgtagactcctagcccgggtctgatatttgaacacctagacttgttgccccttgttttcaccctttctattaaaaaaaaaaaaaaaggcctggggcagaaagttctggtcccactagagtatgagtttgatgagtccagggccaaggaaaggggcttgtggatggtctttaggtaatagcattatgtaaaaggagaaagctgcaatgatttttcttgtaaagcaaagagaagattatcccttggtttaattcagtctttaaagttgcaataatattttcttactttaaaacttargttatcatctataaattattttaatatgtgttatttatgtttatttttagctaggaaaaaattctttctgtaaaatatcagttacgccaatgttaagaaacttcgatttcaagtaaagcacttggtactgacatactgtttgtgcttccaaaaagtgtgaaatatttaatccgattcagaagttgatttctcaagttgggaaaatataactcacctagaaagtcctttattctctataaataaagaagaaactctgatgctctatgttcagcttttgtgtggatgctagagctctggttctctgctgccaaaggatctcacaggtgcttgcaaggaagacactgtagttctttgctgcttccaaacccctccacaagccaagagtagccatatgaaagggtgtgagcatatggataattacagtccaaacctaagggtccctatgtatatgtacacacatatggaatgccacttgtcattttcaaccctgtacacagactggtatacttggtgattttctcctgacaaattcagcaaacataaaggaccacattttttaaatcctagtaaacatcccttataacactcagaatgttgccttatatatgttgaccatgaaatggatatcctttagactgaattgttatgtgttgtcttagactagaataccgatttttgtttccttcttcatagaagataatagagttgactttgccttcctgtgttttcaggtaggttgttcagccttgtgcatttccttagttgacaagagtaacatcaaaaccctcagtttagggtggggaggacaaaataagttttttaagcaagaaatgattattagtcataataaatgcgtattgagtttagctgcattgtaactaatggccaaaaagaaacaatgcccatattttattattactaatgaataatttttattgctcttcttgtttcttcatcatttcttataagattgtcatctttattttatctgaagttaaaaatagaaatataaaagtatatttaaagatttccttaactctgattttcatcagaacagtcttaaaatatagctatttaacacagtaaaagataatatattataaataaatttatactctgaatactttatattctactgatagcaaacattgtacttagcagtaaaatactggaagcaaactgtcattacaagtaaaaacaagataagaatgccttctatcagcactattattcagcagtattctaggaattttggacagtacaataagacacaagctttacttaatgaaatgaaagagattcaaattatttttgtagataatttgatatgtagaagactgaagaaaatcaactagaatattcttagaatttacaacagccttcagaaaaatgaagaaatatagaattcaaaaatcaaattgatttgaaattttaattataatttaaaatagcggtagttactaaaacacaaaaacaaaaaatatcataaaaggaaatttaggaagaaaccttataagaagtatttgtgaagaatatatgaataaacctgtgacatcttactgagagatataaaggaaggtttcaataaatgagatgtctttctttctcatttttgtaatatgaaaaaattgttctaagttctatttgaaaggataaatcagcaaaaatacctagcaatttttgacaaaacatgggaaatgaatgtctgactgaaccaattattaaaatgttttataattctacaatagcgtgaagaattatgcggcctaatgttgacattggactaagtatgagagaagaaacaaactgctcaggcacagacccaacttaaagaaaaattgtgtatgttttaaataaaaccaagcaaattaatagtgaagtaatagattattcagcttctatgctaaaataggtaaacagttaaaaaatgaaagaatgaaacacaaggagaatatataggtaaatgaaaagactaaataagtcaaaatcttcagatggccatttggaaataagtattgagatcctataaaaggttaataccatttgtaccaattatacatctaggactttttactaatcagagataaaggcaagaatttataacaataaacatttctaacttatgaaatccatcatattttgtttcttcatctggktgttagttatacccatgcatttagtttatagaaattcattgagctgtaatatttgtttaataaaaagttaatttttaaaaactaatatttgaggaatatacacacatattgttggctcacaattctattataaaatgtataccctatgtataatatattcactgctaatttctctagcacaggacctggcccataggaggacccagtaaatatatattgcataaataatggaaatatatgttgactgtcttatggaaatataaatcgtagaagtttaacattgattgtttatggaatttgtggttttattatttttttatttatgcttttctgtatgtcccaaattctgtaaagcatatgcttatttcttctgtagtcagagacaaatactatttttaaaagccacagataatattaaagacacaactgagccaaatataaccaatcaaagaactaagattactgcaattcattaagaaataggtaaagaaatagctcaacagaagaaatgagcaaagaccatgaacagataattcacaagagaaaagcattcaaattatcaagctacagacgaaaaatgttggatttcacttctaataatcaatcagggcggatcacgaggtcaggagtttgagaccagcctggccatcatggtgagaccccatctctactaaaaataccaaaattagttgggcatggtagtgtgagcctgtaatcccagttactctggaggctgaggcaggagaatcccttgaacccgggaggcggaggttgcagtaagccgagatcatgccaytgcactccagcctggtgacggagtgagactccatctcaaaaaaaaaaaagaaaagaaatgtcaagtcaaacagcctcttgcacatgaaataggcaaaggtttaaaataaataacatgatctacaatgcagtaagatgaaaacttgtgtacattgctggtaaggatataaagggatacaagttttcagaaaagcagtttcataatatgtattcagaactttgatgtgctgatccttttactcaaaattccacttttagcatcacttctaagaaaatagaattacagataattaagataatagcaataagcatttgtcaaacacttgtcctatatcttttacatacattattccatttaacagcatgatatctctactatagtaacactattaatatcttaattttatggaggagccaggtgaagcttaggataggtaaaagaaaacttgtctaaggtcacacaactgtagagtggcagattctagctcaggtctgacactttccagaaatccactcaaccccataatatacccaccccccatggtttttttaccactacaatagagaaatattttaaatatccaataacagattaaaaatgaaataaattaaaatacatcctcataaaacttgttttaagacaatttattgtatatagggaaggtattcatggtcgatttcaagttttaaaaattagctctaagatacaatctagcctattcaacatgtcatacctcttcaacatgtatggcatatttaaaaagtgtaaaattcggccaggtgctgtggctcatgccttaatctcagcacttagggagtctggggcaggcagatcacttgggatcgggagtttgaaacccgtctgaccaacacggtgaaaccccatctctactaaaaatacaaaaattagctgggcgtgatggcgtgtacctgtaatcccagctactcgggatgctgaggcaggagaatcaaacccggaggtggaggttgcagtgagccaagattgtgccactgcactccagcctgagtgacagagtgagactatttcaaaaaaataaaataaagagtaaaatttgtattcaacacgtatggcatactaaagaaaaactggaagggaatacattttttaaaagccacsacgatatattttcaagtttaaaagtgatcagtctacaaaatgaatgatagtatataatcctgatttaatgtctatgacatattaaaggtaatatttacaagttgccagtggttatttctgggtgttggggctataaatgctatatttctgtgatgtttcagaaccgacatgctatcgcatccagtagtctttttagactttgtcatttctttccgtcattcaatattcaatacctatttattgaataaccattaagtacctaggcacagttctaactactggggatacagcaatgactttattaaggacattctccttatggagttagtgctgtggaagagaagtaggaataaacagtatgtaaacaaaacacttgcaggcagagataagtgctatgaagcaaatcaagcagtattggctaagggatgaattggagtggggcattgttagctgagatgatcaggaagagatgtctctgaggaggtaacatttgtcaagaagggagaagctgggagggaagcaactgcaaggatatggtaggaagtcattttgggaggacaatagtaggaatgagtttcactccttcaggaagtgaaagatgcccagtgtggctgagacagagtaactagggaagagcggcagggtccagatgatgaagggtcttgtagaccatggtaaagaatattttttttctaattgcagtgcgaagccattggagagttttaagcatggacatgatagaatagtgtttacacttttaaaacatcagtctggttatcaaatggaatcggggcaagagtgaaaccaatgagaccaattaagagactgtctcagccagcctaggaggacattagcttagggctgaggatatagcagtctggatgtggtgagaagtcacaggacttacagtatccttttatggaaatatgggcagaatttgctaatggatcagacgtaggtggggagggaaagcagaatcaaggatgagcactaggttttgccttgagtactggaaaagtgatcacacttctgaagaagagtgtgtttggggggtggctggggaggagttggattcaagcattctgtattgagtgtattaagtatgaaatacatattcaacatccaagtcaagagatgacatataagcaggtagacatacaggtttggatctcagaagagagaggcaaatttgaaggtatagttttgggagtcccgacgccataaaactagatggcacaggggaaggaatgaaaaattgagaagggggcctaagattgagcattttggtaccaacaattagaaatagggccaagaagaagagctttgaagagagaattgtatggtagagagaattccacaagrtaggtggaaaagtatgagctatcacagaaacctggagaatagtgtttcaagaaggagggagtggtatactcctgtgtcaaatgtggccaaagtcaagtaagatgaggacagagaagtgagcgactgttagattgggcaagaatgttggctgttaatgaccctgataagcaccatgtcaatgaagtggaagacatcagccagatgggaatgggttgagaagaggatgagggctgacagtgaagacagaaaggatcaagaattcccacagagacagacacaaagagatgggctatggtgtgtggaaggcatcatggaatcaagggaaggtggtttcatttttaaataaaagatatttaggcatgtctggatgtcagcaggaatgattccataggaaggaaaatacatgtggtatggcaaggagaatgactacaggaaagaagtccttggatagcaagacagaatgaaatccggagcacaggttacatggtgggtcttagataagaaggcaggtagagtctgcaggtacagtgcagtccaggagtggggatttggtcatgatcaaaggagctggttcttgctataaaaatatttactgcactttattaagattttctgcatacctcggtctaccccccactgggaaatcccttgaggccaggaatcaggatttgtccacttaaatcctgagctcctgacacaagatttggtacatggaaggctctcatatgttttctttaattacttattttcaaatttttctaatagtagtcaatgatgagcattacctttattatttagaaaagttaacttttaaaagtaaatgaagattaatctcaatcttaacaattaaaacacccaagatattagactttcatattacgttaagtcagattttcaaaatccttaatgtcaagacacaatatacatagaagaggtatgttataaaatgatatgcagcgtggttccagtttggggattaaaaaacaaaggtatgtatatcaaaagaaaacaaaggctttcttttttttcttttttttttttttttgagacggagtctcactctgtcgcccaggatggagtgcagtggcacaatctcggctcactgcaagctctgcctcccaggttcatgccattctcctgcctcagcctcctgagtagctgggaatacaggcgcccaccaccacgcccaactaattttttgtgtttttagtagagacggggtttcactgtgttagccaggatggtctcgatctcctgacctcgtgatctgcccgccttggcctcccaaagtgctgggattacaggcatgagccaccgcacccggcagaaaacaaaggctttctatatttaaaatgatacagaaataatttcaacaataaacactgatttatctctagatagtaggataagagaaattttctgtttttactttctatatgtaatgtttcttataattaggaaaatgctgaatgtaatcatggctctcttattccagcctgactcaaagcccagtgttgtttatgtggtttgttagcttgcagttctagagacaccagaggtggaactggtgaattcattcattcgtgagggccccctttatgcctcaatttcccatctgtaaaactggatgatgatatacctcatcgggtcagtgtgagaattgcgtgagttaaaatctgttaagtgcatacaactagcactggctcgcaggaagcactaaggaagtctatgctgctgttattgtccattgagtgtcttctacatgcagaatgctgggtcaagccctgtaaggctgtaggggacgaagggaaagtgacttaaggagggacgagggaatgaagggcatgagaaaataagtggtttgctgccaaattctcttgtagaattccaacagaaatcacaccagacacaccaaaaaaaaaaaagaaaagaaaaaagaaaaaacatctgtcagtggcaaatgcccctgctccaggtagatcacagaatacttctttgggtccatccttattcatgggctcctcccacccccagttgcatgccgggaggtgtgctgttggcagttaagtagctactgtatctggttcccgtcacagtgtgctgtccctcatagaaaatgaggatgctggcttcgtgtaaaaagacacgtttccttggttgtgctgataaatgtccttttactcgttgtcttcctacctcatgttttgaaggatggctcatggaacttgctggtggtgtcacggcatgcagcggagcctggctgggtgtgaagtcactgtggagcagagcctccccttctcaggccgcttggactgacagtgcaggctgctgggcgtccttagtgaagtaggaggcagggggcagcagtcctttgggaaacttttctcatgtcagtacaaaagcactgactccatcaacactgtgaattcaatcttattatctgcagtttacacatgtgggaaattgaagggaggtggttgttgcccaaagccacttggttaggtgatggtaaagctgaggttgaaactcaggttttcttttgcaaacatcattgcacaaaacctttctagccaagtcagagaacctggctattcctttttagcaaaggaaaggaagtcaataacaccttgctgctgtcacacaaggatgctatggagcggggcctaataactggatggggctttcttgactgtattctttgaaagctttctttctcactgtgtcttacaaacctgcaagccatagttgcccaggcaacttaaaatctattttggaaatgttgagaggtaggtcaatagatagagagtggacagaaagacatgttgttgtaatgaacaacgataaaataatattggagcagtccctacaycacagactaaaaagagctactttgcgctgaatgtcctcatgctcactctattctggacactagctaggcactgaggataaaatatgaaacacattctttgctgtcaaggagcccagatactgggtagagacagaaaagtgaaagaataattccatcacagcaatgatggagatgtctgtggtcattagctagagtctgagagatgggatggctatcccagattggggagaggtggcaaggcagagtgttggagcagtgacttccccaggaagaaacattgagcttgagaaagcatgacatttaggaacagagcctgtgtaggtataaagcacagaacacacagagagtgcttgtgagatgagaaaatggaaagaaagacagaagccatgtcatcaaaggttttgcacactctgctaagggaattggattttacaatggatgccgagggtaaccagtaaagaacttatagcactaccaaggagatgagttgtattgtaaagtcaaaggggtcaataatgatgagaaatcagtggcatttgtttgtggagacagagaacaggggctgatgtgaaagctactgagaaagtagtctgggtaggatttgcagatctattcmgtgtaactattcagtgagccagtctcttagtttctggcttgagcaataaggtagagatagaaaacccaggagaatggtctggctctggaaggaagatgctgaattcagatttgagatattgaacctgaagtgtgtgttggacacacaagtggagtccagtgagcaggtgtatgcacagatctgcagctcagaaaacagaagctggaagccatcatttctgacatcagttaagatttcccaggaagaatatattgaatgaaaaagaagagttatgtcttagtttagaaacacagaatccaaatatgtattgaaaattccagattcagaaaattaaatgatttatgtgaggcaactgtggccatttggagcagcagttattccaacaggctgttaattaacctgttcatgaaactgctttcctagtttcgccatagtttctctattctgttgggtgaagctaccaggaacagtgtggtctgaagggacagtaaacacttcagaggtggagagacctgggttcagtcctagcttcctgctaatgtatggcctccacacagtcaaccctgactggcttcagagagggtgacaggtaggtgtggagttaagggagacaacagaatctggagctcctggccggtgcctgcagcatagtggtgcctcagcgaataacagagtgtcttcctttcttgttgaatggaaataccacttcagcactcacacagtctgctggattgcttcagtttattttaaagtcgtgtgaaatggacctgtcagtgtcacctatgacaggcttttggtttagatcttggattttgacaggtgcttgctaatcttcaatctgggagagagtcactgctttgtagagccagattttcctcagttaccttcataggaagtttgcttagtagagaaaggaattcaaggtgcccttagaccttttttttttattttttaaggttgaatagtgcaagagaaggcctgtatgcctgtaacttcaacttccccaaaatgtgtttaagttgcagtccctggagacttctcccatttcagtgcagctacaatagggcctctatttgggctcagttcagtattctagcagcatttctaaagaaaggctttctaaatgctggatccttctcactgctaattgtgtgctactcctttgtaaggcaggtggacggtcggggtatggggagagcatgttgcttttgatcaacattattttataatcttttgcctcttcagaaataatcaactaagaattaacttctggaattggtattttgtcagaaagttaaagggaactcttctgtccaagatatcatccttttcaattggtaggaaacagcttggactagaagaatgttacagtggttacttctgagggatggaattggagatgaattcttttatacgttttttagtactgcacaaattttctacatgagtatgtgtcattttataatcaaaattatttatttccacaaaactaacttcaatgacaaaatgcactaacattatctattaactgattgggtcatcaattctttcataatcaaatcctgtcaatcagataacctagaaggtttcagtccatgatatctatgtgtttggtccagcgttagaaaataagtaggaaaaaaagacacgtgaaagatggtcttttcttcaaagagtttcttatctggtagtgtacacagaagttgtctgtgtaagtctttgcttattcatcaaatgcagagttttcaggagaattggaaagaacgtgaaatacacatgacacaaagactgtagtctgtcaataatggtagttattattgagactgtgggttgcagagagtatgtcagggatggagaagggaaagaaaccaataaaaacttaatggaggagcactgccttgagggagagagaaggcattccagcaagcagtagacacagctattgtctggtgcagggaggcaggctgttcatgatagaatgtgagggatgggcacattggtaaggttagggctcattatagaggcccttgaatgctcaattgcatagaaatatattaagtgtttccaatttaatttttctaatacatctattgagggagatggactaaaacagaagtaaaacatattccctgtctcccctcccgctagatgcttttgctctttgttggagactgccttgcctggaacagcaaaacctactttcagaaaaatgtatctgaacgtgctgcccagggtgggttggaagaggaagggctttacaagaatctagtaccttccctgacagaaaatcatagtgacagtcactgtaccctttctctctagccagtccccatgtttaaaaccgtaaaggcaagatctgcatctcatttatttttgtgtgtgtggtgcctggaatagacataggtgttcagtccttattagttgaatgcatgagaaaatgaatgaaagaatcgagaacatgtggttatgtattttctagtgacactgctacagtttaatatataacacacataatactcatgctattctaatgatacataatattttcctgaataacatataaacaaccaaagcatgattatttatagctctaaattatacttcttgagaagagggatgtttttatagggagtgaaattatgagtatagacaaaactttcccttttttttttcctttcgggcagccaactccatttccccttttaacacccaatgatttgggggcaggcacaccagggctccccatgctggaagaaatttatctcatagtgcagttcacaccaaggcaatggagcttaaatagttcactcttacctgaagtctttgtcttacaaaagaagattcagaagggatgattttgtgtggtggaatttcagacccacggatacttagaggagagaattttttgagtaggaaagtgcccctccaaggtcctctcctcgccgccagggtctgacagtgagggaggtgatgatggaacccttcctgcagctcacagggaactgctttttaaaaagtgcctatgtccggttctgcatatttttctttctggagtcagtaataattacatggcagagaaaatcagcttggaaaaatctttattaacttattaactaaggatatgattgggcctgatttattctgagctgtatgttcttttatgcaaaattgagtgtttcttactattagaaaattatctagcagtataagttaactgaagttcataaattagcctcttttaaacttcaaaatttcaaccccactctcacccctgcaaaagaaaaagacatttaaaaaggttaaytacaagaaaatatttctttacaaaatgcattgacatatagtttgtagttaaagatgaatctatagacatgtaatggcattaaacagaaactaatatttgttgcaaatgattttaggaggagtgggaaattgctccagaaaaaaaaataatgtatgacctatttaatattggagcttatagttcattgttttatatgagcgaaacaaatatttttgtgcaaatgaaagctctagttaaatgctttgtgaataaattggtatgcgattcactttctgcaaatggccatgaaagttaaaagaaagccgttgcagaaaaggatgaaagttctctcggtctgaatatttttccatgcttctggcagcaagtttgcaataaaaagaatgatttttatgacattgtgattattcacagcaagcctagagttgctgtcactatgaaaaattcttctttagtagattctctcagcaggaataatagatctaaaagaaaggaaacaggagttacaaagaacactgttgccagtgacaaattatgtttgcaaaaatgatgagcaagcccgttgaaaattgagaaataagttcagcagtaaatcaaaggctcattcttaagagtagttctgagttgctgttccaaaaaaaaatgatatttatattagatgtgtgctgagtttttttaatgttctgaatgataattagcttacacattaattcagcctttagtcttttatcttcatactttgttatatrccattttaaatatgtgtaatattttaatgataaaattgtacaatataatttggcattgtcagcaaacactaatgcattgccctgtgtggtatatgaaggtttgcactggttatgatacaaatttgtaaaattctatgttctcttaaattaactgaaccataaataaagctgtgcatttggacataaccttttgtgtacaatgtcagcggtagggacatagaatgcattgaaatacctcttactattgcataaaacataacttaataaaagacggatcttgtacgagatagtatttattgtatacttttaaaaaagcaaagaaatttacaagtattgatatcattagatcaaatgtaatatatgctattatcttttaattatccttatattaaaactgttcaacactgagtcactaaggtaatggattagttaatggattaatccattacctttagagactcagtgttgaacagttttaaataagctcattttgtttaaaagtttattttcaattctttctggctttcattaagtgagactttcttttcctcaccctaaggttgagagtgtgaataaagacaaatatatttaatatcatgtggtaaagaaggcattcatggtgacaaatatatttaatatcatgtggtaaagaaggcattcatggtgagaaagaaggaactccacgcacagtgaaactgacatatcatatttattaacattgtactcactaagaaggagctatcttcatgtgatacctttgggattctgtaagccacacgctaaagtgatataatgatgtcttattttttttaattagcacattttaaaagggattaatattataagaaaatatcaaaactttgaaaaacatgtgttcatgcaatcttctagttattaataagtttgggcatcctggaagcctttacttagtgatctcaaatatttaccataattttatgcatataccagcacatagcttaagcacttcaatttattttttaccttaacataccatcttcaggaactttcagtaaagactttgttctctaaatattttatgaatattaataaatagaatcagatcaaaatagctaataccttacctttgttgaaacttctgtaattcaaatcttgtgtttctaatacaagcacttaggtctcctagctaatataaacataattctagtaaaatctctctcacttagataatctctaaaggatattataacattaagtatattaagacactgtttttgtttgtaaatgccatatgtgtgtccacaagttgcatcttattgccacctctcgaaaatagatgctgaaattcctctttttggtttctgaaatttgaaattgttttcttttcccatcggcttgtatagttgtgtcatcctattcctaccataacacatatagatatttaaatattgacttaaaatatcggttggcaccaatagtatgctgagtagatagtttagagtgggaattaaaagatatatttgtccaggtgtgtcttaattccttgacttgcacttcccaaaactgccaaacagaatggggcaaatttcaaaactccttttgttttttatcccctgtgccttagccacaggtatctgcaccatttttttctttttctgcaaggaagcatcatggtgtgaaggccagggaaataggaggtcaccaggtgtaccctagacagagatgacagggtctgccagcgattgccagtgtggagaggctacaaaccacataccctccccatctccaggagtcaagggcttccagagagtccatgatgctggtgaagctgggcagaagaaagcctagcagcgcttgagctcttcatgaggtctatttgaaagcacagtgagggcttggacgtgcccttagaaagcacaatggaatcatgctgttctgcatcagtaagtataaatacacagtacatcagttgggcagtctcctctttacagagaaaaacacgcaagtaaaaacatggttcctgcaaatttactaattcatggacagagggtctttatcacggagcctasacttgatgtaccaaatcaaattgtcagctagttggaagccagtttcttcaaatctgttccatcaattggcttcttccttgactactcctctccctctgtagaacttctaaatcatagagaagtttagaagatgtcccatttcacttagtttttcaaattagttatgaaaatatctggagagttgagagttatttcgaaaaaccaccatggagagcattcccttaagacctttgtcactcaaacactggtcaccctgtaaggccatctgtgtaatttagttttctgtgagaaagatggtagtctggatagatccacagacagatatgcattctttttcaagtgctgctaatggcttgacaaaattagctttcagacaatttatgtgagtttgtcactaaartactagaactacccatgtcccatgtataaataaacattttcacatttagaaataagaggaatacttcttttagtgacctatagatgtcaaatatcaggcaagtatctaaattgctcaatagggaagtcagagccatggatgtaatcacttaatgacagataagaggggacacagaacccaatgatcacttcctctgccttggccagctccagctggtctcaataggcacattgatgtaaagacacaatgaaaacagctagttctctgctgacttttatccttccatttttgttttgtaaaaggaagtattgaaagtattgaaacaattagttggcagtatggtgttagttttctcatggtaaatttggaacatggagcatactatagccttgatcagcaggatttggacttgtgtaactcaacttctccaaagacacattgtaactttttcatattattcccttttataacatgcaaactgcctcacagtcttcctagagacttccttctctgtttattcaaggacttcaggtttactctgagtttgtgtttctagtttcatgttcagaagtatacagcatcagtgtcctagctattacgtcactgttggcacagataataagactcattgtaactgtcttaattctctttattaattttccaaaactaccttgaattgtatggtgtatttttacataattatggtacaagtgaaaggcttggggggaaagtacaactactacagtatcaaagcagaataaatatttgcagaaaaattctgccataacttaatattttgcatatgagcctctgtacaaaatctgagttattcccggggattggtccaaaagaacatgtctgtggcccagccctagaaggccagagatgatgatggatcagaaaaaggtcagcttgagtcttgatgccaagaataatgacagaagggactaaaaaggcagaataacagtgcaaccagagttccaagagcgaatgtgcatttgccgcatggctgtgagatcgtgccccatgtggctttctgcccactccctatacctacaccagaactgggattcaggacttcatgtgttggcagtttccccagccacccatgtgagcattttataatccagctccatgagtagttagatgactgttagctgagggccagcagtaactgaagctaactttatttattttactcctctgtgaagcacaggtggtgtcatataaggggaaggctggcaagggtagaccatggtcatttcaattttggtatttactgaaagatgcttgtaggatcctgttgtggaaaagcagaggtttgcaggctggtaactgtgggcacaacaccgcacctctgactggtgccatctgccctcttttcagcttcccctgccatgacggtggcctaatccgttttcctggtcctcagctctcctacttaggacacgctgtggcagtgtgatatgctaaaacctatgctttcaccacctacagttgtactctctaccctccacgcctggcagagacccggttactacagtggctctccttctgggagcattttcctctgaagtaccagtcatttaaaggcctgctgatgacatgaagcgttggggcttgtgctgtaggatgaaggacccacatccatgctccaggcaggaagaggggtccatgaccacggacacagagcacaggtcagagtggggcagacagagctggagtcccctaaactcaaaacaactgagaagcctctaagaacctaggtcgtgaccagtgtctagagggagcagttgtctacactgtgtgaaattgaggagcctgggaagaaacggcgagttgagggtcaaagacatcagcatcgcagcatttatctcacattatttagcttttctgaatctttatttttcatatctgtaaaatgggttgtaacattaaatactattgcattttcaccataaattcaacttaagaactaggagtctgtgtaagtgagagaaactgagcacctgcctctgcaggaactccacaataagtgtaaggaatgccttctgcagaagctattgctgtgggggaaggaagaatatcctctacgagggatacaaagtgccaagatgtggtgctttggtagtcaggtatcaagggatgatgaatctctggtgtcttgggacttctgaagagagagaccaacctctgactgggaacagcgggctggatgcgttagcaatacccaagtttggtaattaattgtaaaatttttctagtggaggataatcgcaactttgcctcttgcactggccctagttcttccacataatctatctgtactatgtgactgttaccagtggcaaatacctgagtcacacggcaccaaatatgttaccagtggaaggtatccgagttaccagcagtgaatccctatggtctgcagcaacctcaattcttacctcctcagaagaaagaattcaactggggggcatgaggcagaaagagagactgaggcaaatttcagagcaggagtggaagttttctgaaaaaggctttagaacaagaaaaaaggaaactgcacttggaagagacccaagcaggcatcttggtcaagtgcggtgtttaaccttgatcctaggactttatatgctcgccccgttcccatgcatcttcccttagggtgggctgccggcatgtgcattgccccccttacccttgggaactgagcctgtgcagtgtgtttaggaagctgcacgcatgtctatctgaggctttcttcccttttccagtggagtgcccccagaaggtcatactctgccattaggtctcttaatgtgcatgcccagggaccctggtgcctgcattcagttaacatttagtgcaacaggtgtggaccatcaggaaatggcctctccctggcattggctgccaatttatcacttttagagagacaatgtgataattgccagaccatcacccgacattcctagtgggtggcgaagagccctctcctgccccggctcatggctaactacctgtatgtgaaaattggctaaatagaaatgtttattatatattcctctactgctgacttgtttctgagcccttatgcaaacatgttgaatttttcatccctttgggaaagccattaacaaaaaattactctcttcccacgtcttgatccctttccaactcccatatcagttctcacatctgtgacttgggggtgaaagaaacatgtcttcaaaggcttcccctcacctctctgaggcctggtcactaagcccccggggttcctttgtaccttccccgccccatcccaccccacctcactgccatttgaaggtagaggtccagcatggatagtctgggaccaataagctgttttgttcctgtcaccacagttcagttgttaggaaccatctccagtaggccaccattttatcggtttgattgtttcaatcacaaaagccacaaggacaagcggtggaccaggctgtccctcctgatgtaccaaaatataattttaattcttcagacctttgcaactctctctggctaaatagaatgtaggacgatgttcatttggatcctagggaagttctgcaggatttaccatgattttaattatcacgtgtagttagttaacttctctctttcccccataaccatgtaagtgccttgagggcaaggactgataacttgaccactgcttccttggcaaagcctgctccttgctgggatctgcaggcacagggaactcttctcctcctctgccctctcctggctccttcctcctacctccttacaccagtgttctcctgcctcagggcctttgaacttgctcttttatttgcctggaaaactctttccctcacacccacttggcattgcatttctccctcatctacttttttgtttccttagcacttaccactatccagcatatgtacattttacatattttctcgtttgtgactaactagaatgttagtttcaaggcagtaaggacttttgtctgttgtattaagcgctgtatcattagcatctgaaacactacctggaacacagcagcctctcaataatttgacacgtacatgaatgaccacctttctaagctaagatacccattagtttactgtgagtgcaaaatctttcaggagtccttgaaatcactatctctgtcttctctgaggtcccaggccagatccccaaacacagcagggatcccytgggcatctcagacccttccactacagattagcgcataaaatatgctgaactggagtggcccctagaaatgtgaatgctgtcccaagatttggattcaataatgatttcatcaccttaaaagtctatcacataattttggtcgtgtatttcaaaagtacaktttcagcacgtttagtctgtttttggaataaaaacttattttcccatagaattatgtatgttctgtactctactgaacaccaaattagggtttttaggaatatatattggcacctggaaatatattaagcttccatttttgtctttgtcagtagattcttccaggagagctttaaaccaggttgctgctgttggttcacggtgcccagagccccttctgcctaagccatggactctgaaatcaggccctgcaccctccctcagttatctcattgtctgggttttaaacaaatttggaagctaaaaacaacctagtccagaaggcaaaaatgacaacctaaaatttggctcttaggaagacaaaaagctagatagatggtgtctgagaaatggtagaaggaaagtttctccccacagaagaggctgagtttcaggatatctgatgggagacttcagtttctcatttgagagctgctggacttacaacaggttaacacattgtgcagttctgctgtggaatattgcagtatcttaatattcctcattctttcatgaattaaaatgttaataagtaagcatttagatagcaatattatagtttctccttaagatttaaaacaattttttaaaaacatacctcccaaggcattttatgtcattatttgtaagttcctacaaagacacagataatgaaccctcagtatgtattttatgtatttgaagtttgtacaatatagtatttttctattcattaagtgaaataagcaacaattacatagacacattttacatagacattttaatgatttttttttcattcctggaggtgctgatgaggccccttagagattactcttgatttttaaatctcttttaattaaaatcattctacagaaattctgatgaggaatgaggatttccttgtcactactccgaactttgctttaatcaagtcactgtgaagtgagtttgctatctgcaggtaaaagcttgaaggtgttgacactaagagctaagctagagattgaacaatacttcaaatgaagtcctcagcytgggaacaaaacgttttaaatgaagctggcaggagaaaacaaatacaggatgtggaagaacaatagcaacaatggggtcgttcacagctgttagaggataactgccttctctgttagtaatgaggatttacagctaaattcgcttcagaaaagcatcttaacaccctgctttttcaaaaaactctttccacccttagagggaaccagggaattccaggtcagttttgattccttgaattaaattcttttgaacatacattttcctcttctactagttcctcaacttcctcctcctttttgttcattctcccaagagagaaaatttctccatcatggcgctatggccttcccctctccccccacccccaacgctaaccacacgctctaaagaagttttacaacataaaaattacattcctggttaaatatcagaaatttctactcaggatttagtatgttgtcgaaaacacaagcgatcatcattcatcttctaaaataagattacattaataaatgagaagttcccaaccacgttttccaagaatgacctgtttttaaaatgttaaattcacagtcagcatgtgagggctcctagacttgcttttccttttctcttatctgaggttatggacctcaggagagcaggggagggttacaaggtcaaagtcttttcctccttggaacttgctgcgtgctgggagagggctgcctggaaaatagatgctttagagaagaggttgggggtcacgattttaattctgttaaggaacagctggtttgagtttctttccacttctatctcctcctcccttcctcacaaatccatggagagagaagagtttgttcagaagggaccggcaacataaaaatataccttctattattatagtgctttctaagtgtcatctttgttatgaagttgagtctaagtgctagagagatgggctagattttataaaattaactctatctgaaacatgaccagaccttcagtcaaaaagaaccttttaaaatacaggatgtgcgcctggaaatttcttttaataatatttttaaactaaaactttaatggaaataagtacaataaaggcctctggggtatttggagcctgactgcaaagagaggaacatgactgaaatatgaaagcagccaagtgggggtgttaagtttctggactagagtccttgtctgcctccaaattaatatgccttcattcattcaacaaatgtttattgagtgcctgttcttcccacaattcatctggggatacggtggttaagatatatgggtgctccgatatatctgcaaacaggtgcagaaacgttaactgggcccaatagagctttagcctgtaagcatggcttcctattctaagtagtttacacagtttgggatttaaaaataagatctgttcaaaataacattatgccataataaactcataaatccagtgaatatgtaataatagtaaaacagctaaaaataacacaaaaaatgtaaaaaaaactaaacagcaaacaagcacatggtttgactttttatttaggttttaaagtctcccatggtttttaccgtgcacatgtgtacacacacacacacacgtacacagagagagagaaagagggaggataaaactcacatctctcaaataaatggaaaccagtaacagattttttgtctgggctcctcaacacactggcctcaggctgtgttggtgtgtggctcaacagcaatcagaggtcataatttcattggcagttagcatcaggtttaatttttctagcatgttacatttaccaaaatgtctggtttcagttatgcttaggcactgactgaatcagctctgagcagcatgatggcttaaggtacctgaggtttatggaacacatatgctaattgttttcaatcactttcctttctaaacacaaaaatgtgttttctgaagctgaataacagtagtccttaacgatgttgcttctttcttacaggagaggaccctaagtaggtaaaaatgtcaattttacaagactgccacctactgattgacatagttgaaaaatcctccaattaaggtgctttaaaaaatatgtatggtttttccaaaacaaaacaaaaaaattaggtactcttaaaaaattgacatgtatcattttaattgcattttaggaatgtgaccaagtccatatagatgatgtttcttcagatgataacggacaggacctaaggtgagcacccttgaatgtgaagtgaccatctcccttttatagtttaattacttacctaattaagatggactttctgttcggctaactttgggcttttcttgcatataaatagcacatataactttggaacagatggctttcctgctgcagcaaccagtgctaacttatgtttggcaactggtgtacggrgyggtgtggrctggatgagaaagttggccttccgctacagacrggtaaaagagatctacaacacctacaaaaataatgttggaggcaagtgattaccaccagtacctcagcaagttaagacagtccagatacaattycaaaagtactgtacacttttgtgtcacactgctttgaatataatagcttctatttgggcagtttcatctcactggccattattctgctgtgatttagtgacagaaatattgcactggagccagctgccctggctattccagtctagtcctgtctctgttacctagtgatgtgacctggggcaagtttcctgacctctctgacattcagttgtcctttcaaggaaggattagcatccttcgaagaattagccacctctgcccaaatcacaagatgggttgtaaatctcctcctacagggtaaatacttggattagtttgaatcttttgactttggttcataatggctttagcatgaaaaggaaatacagtgacttaataataaaaagtttaggggtgaggttggtttccagcatggctatatgcagatgctgaaatgatgctgtcggggaagcctgtgccttcctttggataaaggcctttctaggtcagtccctcccaagaggtggcaaaatgaccaccagtagatccagctttatactctaccagtagtttggcacatccatgaggggagggaatctatcatttcctaatagattcagcaaaagttccaagactgacttccactggccaagtgaatgctgcacacctaccctgggagccagaaggtggagtcacctctgcccaaactacacttagaggaatgtaggaaagtaggttccctaaaaagagatgacttctgtaaccaaaccaaataaatacttgtcaaakgaatggtactatgtgaaagatactttgtatactataaatctggaggctggtattcatagtactttttaaatgttaattacttgcaaagccgaagaaatatgttggtcaggaagtagttcatcatgtgcttttaaatcctcaggtctgcttggtccagctaagagggaagcctggctgcagttgagggccgaaattgaagccctgaccgactcctggttgacactggccctgaaagcactcycgctcattcactcccggtgaggctctctgcggggtctttgccaggaaatgggcaatgctcgtgcttgttcattttggagatttatttttcaacagtctttkttttctttttgttctcataggacaaactgtgtgaatattttagtaacaactactcagctcatcccagcattggcgaaagtcctgctgtatgggttaggaattgtatttccaatagaaaatatttacagtgcaactaaaataggtgagctgcttttctttyctttttaacaatcagctcttttccttcaggataataaaaayraaaggcaataaatgaaactttttttccagaatgctacataggtcaaaaaaaaaatacaagaataatttaaccaatttgcaaaactggatttagacgtaagagaaacataaagcataatacagtagctgaagtcacaaaattttacttgactggctaacgttaagaccagggcattttaggtagagtaacagcatcgattctggattattatcatatttttatccttttaggcaacattaacaaaaatatctgattttctaagctaaaacaaacagcaagataraattataaaaagtagaaatgaaacaactctaataacagatttattactagaaatatttgttttgtttttcattcaatctgtataatcaattgagtttccatttttgttgtggagatttaaaagcttcttgcatgaaagaaacatagttgggaggaaaatacttatgaaatttagttagaatataaatcaaggcagaatcaacataggaataaaaagacatggctcttgttctcaggggaagcagacagttacatgacaatccaatatgatacaagagtatgcaaatgagcattttttagttgtctactagatgccctgaactgtactaagcattttgcatttaaagtcaatctttataatctttccattttacaaatgaggaaactaaagtccagagacttaagtaaattgttgcaatcaatagttcacaaacacaaggctcaagcctcatgtttctctgattccaaggtccagaccccttgctgtatcctacagggtcctattgctaagtgcttgaatgtgcacatgactgaggaagcatttactgccacccaggaagaggtagaggccaagtgtctatgaaagtgtgaaagctaaagggaagaaatgacatttgatctgggtatagaagagcaagtaggagttcaacaggtagatgggctagtgagaacaatgcaaatggacagagaaattaaaatgtgttccctgctgagggacttgtgagtggccctgggtagctagtatgcagtgctcattagaagccaaagctgaaaaggtatacttgggtctaggcatgaatggcgttgtatatcaccctaaggagaggaatgttattttagtccaggggaaggggtatgagcattctagcaggtggcaagagggctgtctttggctgctcgactccatataataaaaaggggcaaaaatggaatccctgtaggtctaacttccgtttgcctgcacttttacacttcctgtgcttctccttcaaagcatttactaaatgattactaaaaaattactgacttttataattatttgttcatagtatgacttccccgtcatactgtaataatcttgaggactgggtttgtctctcttgctcatcatagtagctgtaacacccagcacacagtaggtatcaataaatgtagagatgaatttgttgaatgaatggctgaataaattaccatttattttgaagaaggccgacacaagatttcttttaggcacgtgcgtcaatagcggcacaattaactgatggggaaatcaggttttatttttatcagtgttgcattggaagagacccagtggggtcttcaatcaatggcagaaagacacagtcagcagggtgctgatgggattcatccaggctaacctttcaagttagaaatacatatctggagtttgagaatgactgatgcttcccaagaagggccaagaacaaattgttggaaaatatcaaaaagcaagaaatatatcaaatagagtaaaattcctagtagcccattataaccagaacttttatgtgctttcatgttccataaaaatagcaaacagtttaagtcacatgttaattctattttcatctatatcaattaagaggaattataattatattgtgttgtaaacagggattgtggaaaaggtttaccagcacatgaaagttggaacaaatgccgaagcagcccatagtacagaagcgggtagagcttaggttctcagaaagaaagcaggagtagtgtattacatagcatgtgcattgaagtttaatcccaaataatttgaaaatgataacaggaaattacaatccagtaagcattgtttttytaatgggcattttgtttaaaatattaagctttatttttttttcaatacagaaaaaaaatatgtggtggtggaagtaggatttcaccatcaaataaggtatatgtggggaatcaatgcagaaaacccagcaattttttttttcttttgacatggagtcttgttctgtcacctaggctggagtacagtggcaccatctcagcctgtgcctcctgggttcaagtgattctcctgcctcagcctccccaggtagctgggattacaggcacacaccaccatgcccagctaatttttgtatttttagtagagacggggtttctccatgttagccaggctggtctcagactcctgacctcaggtgatctgcyttggccttccaaagtgctgggattacaggtgtgaaccactatgcctggccccagtaatttttattgtaggcaaaatgctaaagtcataggaggagatgactggtatctcagttggcagagctatgatgacctttcagacaaaatggactcatcaaaatgaatacttcatataaaactaatagttaacttctaaaatctaagcttcattttcttaacctctattgtgaaaaatttctacatgaccccaaattggcaatgagcccaataggagatagatagtatataggcaaggatttttttkgtctaccacaacttcatctttaaattacattgaatttaccttcctttttccacaagagggaaactttgcaaaaacgcataagcatttccccgtaaggagagaaaaaactttcatgacatcgaagtttttggttgtatatttttgcagtgaagactatactttgcatttgcttcttaaagtgatttaatatttcacagtttagtggacaactaaagaggcatttaaattgcatctttgaataaggctagctctatttcattgtgtcagatgcaaactagagattttagtgcaaaatacaaatataaagcagacatttgtttaagcaaacaagcaatttgttcatgtgtatatctgatccttatttgaaagaggtgcaggcttcgctcagccattcacatttgaaaactataaactgtcccattgtccattaaaatgaccctattggcagtccaagagttggaacaccagtttcttctctgagaagaaacaatgcttgcattaactgtgggaatgtgctgacagtgtagccaccacaggagcccaaactaagtcatgacacgggaaagatartagacagataagggtattctattacctttattccagttttcctccaggaaagtgcttcattgaacattagatgcctgggtaaggcaggtaccatcttgctgcactacctcaaattatctgacatttatttgagaaggagttttacaagactacatcagactttcagggtctttaattcaacctgaaaatgaaggaataagctaattccgatgtttgcgttttcttgctagaacaaaaacaagtccagttattttttatcattctcaatagtctttggatcagatattttcaaagtttgatatatgaagaaaaaactttttaaaatcaagttaaaatatgttgccagaattgcctatgtttgagttcagcttatatatagggggaaaaagaagtccsactgcaaaacagtactttcccccaccaccccaattgcaatgctgtgattgactagattccattttttaataaatgagtccttgggaagagagtatttaactatcaatttccaaaggacaggacaccacactgctaattaatttactttgtaatttattgtgctgtggcacatacaacccaagtggcataaaagcattcctcttagaggtactagtggggcattcgaatcagagcatgaagaaagcattttatataaaaagttcaagcactgtcacattaggttacccaaacttcacattttctatcatttatttttgttcactaggaaaagaaagctgttttgagagaataattcaaaggtttggargaaaagtggtgtatgttgttataggagatggtgtagaagaagaacaaggagcaaaaaaggtgagcattcctagatggtgcatcttgtctcatttgttttttcagtcctcagtattctcataactggatcatttaaacaggttccatttatgtgaaacgtgatgaatatgtgcagtactctaagcactgaacrgggtaaagtagaattcaataaatatggagtgatctttctgaatagtagtgtgcacaaactcaagggccacaagtggtgttcatagaaggtagaatttgggagcagaactgaagtgttgttagtggtgtagctgtcatccagagcagagataacacatgtgccagcaggaccttttctgtacccatggcagacatgccaggtggttcaaaccttgttacctgagcctggacgcagcctaagaacctttcaaacatccttcagaaagcctctatcagttggtcaaagctgacttggaagataaaactatctgctgccccagaagactcgatgtcttcttcatatcatgaggtcctacctgtctctctcagggcagggggaagggagtggacccaactataaatctcttgactcccgctttgcccattgctgttcattatattcttctgaatctctgcaggtgtaattctatcatttctctgagcaaaagctttctcattgggcctctcattgcatttttaaaagccaaggaccaccttccttagcctggcactgagggtctccacagtctggttacagcctgcctttctgatctgtctccctcctgtaccttacactgtagttgtgtcagtccactcagctttccttgaccatgccccacagcttttccttcctgttgtgtctccttggaatcttttccctaataccattccgtcattgtcttattcatttgcaaaatttaattcatgtactaccttttctgttatgcttttaagagatcaattataatcatgctcccttatattttaactgaaggagctgtagtgataaatagcttggattcttgagccagacagcatgagtttgaattatgaccctgccacttacccttcctgtgacttygaacaagttcttaaccctctgtttccctttccttgtctataaatggggatagtaatagcacttagctcattgggctagtttgaggattagatatagtaaagatatataattcccataatatagatatgtgtaaagtgtacaacaaatggtagctattgttattgtttatgtgcctgtttcagcaaagaaatgtgagcttcacagattcagggatcttactttgcttggtttgttgagactgtcttcagatttttttataactccctaaatcttgtcatagttgtactctgtaaatgtttcttgaattgaagaacaattaaatattttatgggattaaccaacagcataattttccattcccttccttacacactccctcataggaatccatgtatatttccataaatgatacaatatctcagcccttctggaatatttcagcatataccagaaacagcatgtaaggtcaccagattacagatgcagcactgagcctaagtatgatacatggccagccttcctacaggctctgaagatggcctagtttaccttcagtgcctctgagttccactaaaatcataatcactgaccctaattttaaactagataatttcatgaatacccataaatacagaatrtatcccagtcacaaacctgcgtgagtctggttggtgctggtagaaacccacacgtgacttcaggtctcctcatgctcaatgtgaagcagcatttgccatttaagcagtagttctaatcttcccacttcaccgacgaccaaccactagtgtcattgggtgcctctgttacctctctgggctgtctttataaaataaaacctttcccagcctaagtcagaatcctcaaaacacaatcctggagagttgaagagaatgttttctgacatccagactcaagtcttctttctaggaaagcctctggcattcccaagccattcctattcaggaccctcctagtggccagcagggcagggatggaacagatttgtacctctgaccagtatggccctaggccaaggtgtgaagccatctccaggctggtccttctccctctggtatctaccagaaagtttaatatcaaaaattgctaaaatgtggctttctagcttgtggtaggcagagagggatgtttatgaaagtgattacttaaaatgcagggaacacaagtgaaatcctttggatcttatcaaggtttctgtgagtgagtcccttcctaaacctttctgataagtacaattcttagaagtttgacttcagtgaacacaacatggaaaaaaacaaaggaattcttggtttcaggttagaattgaaagtattgatagggctagagtatttgctgtctttgaagagcagttaagatttttttttcttttttttattatactttaagttctagggtacatgtgcacaatgtgcaggtttgatacataggtatacatgtgccatgttggtttgctgcatccgtcaactcatcattacattaggcaaatgctgacacttcctggtagattctaatcctgacagctttgacaaatgggtgctcaatacattttgttggtagagcggacatgaaaactttatgtatttctgatgtaataaaaggttttagttaaaagattttagttaatttttatactggaaataggctgaggttcgtttttggttttttgttttatttgagaaagagtctccgtcacccaggctggagtgcagtagcgcgatctcggctcactgcaacctcctcctcctaggttcaagtgattctcctgcctcagtctcctaagtagctgggattacaggcatgtgccacgatgcctggctaatttttgtatttttagtagagacggggtttcaccagttagccagactggtctcaatctcctgaccccaagtgatccactcgcctctgcctcccaaagtgctgggattacaggcatgagccactgtgcccggccagttttagttaatttttatactggaaacaggctgaggttcataatttttaaatctatagacagttcctaaatgtttgcctcactgattcatagtctttagagggtttccaattacttccatgtatattataaagttttaatactaatttaatacacatagaatgttggtgataacagtaggaacaacccaataaaacacttaaaattcaaatgctggtacaattcatttacaacagtaccaaagaataaattataaggtgtacraaactattctattacaattatttggaaaatccttctttgtacaaaagtattctattacaattatttggaaaatccttttttttttaaccttctttcctagatcactctgataataaactctgatatttgtgttttctcaacaaccaatcagcaattacagaataaaattaaatatagaatggcttaaaaaaagattgtttccactgtttatctttggacatgtcttttttttaatatagggcacacacaaaaaagaaattaggcagccacctgcagaaaacatactgaattttttgaccaaatgagtcctcctagctttccatttttatttcatggatgactgtacgtgacaagagtccaaaaatatctgctgcaaaccactctttgtaccttgagaactgcctgtgtggatgtgtaaaatggacaaatttttcacaatatctcgatttctaataatcttgcaaaagattcagacgtcatcaatttacaacaagttgaacattcctttcttattttctaactttattgaaggagaatttttgtctagccttttcaagttaactagtatataaatagtcgtctttgtatatgagttaagagacaaggatctaatcattcacaaaagataatgagtatctttaaagtggagtgctgcacagaagtagagaatacttaatatttaacctatgggaaataatttaggaggaggagccctctacagttcaacaacatctcatttttaaaactacatatgaaaactcaagctaaagaaactaagagatggctttctatgctgtaggattaatcataatattagtaagtaacaaaaattgctaccaaggcaggctcacacttgtaatcccagcactttgagaggccaaggtgtgtggatcacttcagctcaggagtttgagaccagttggggcaacatggcaaaaccctgtctttataaaagatataaaaattacccgggcgtggtggtgggtgcctgtagtcccagctactcaggaggctgaagtcggaggatcactggagcccaggaggtcaagactgcagttagccgaactcatgccactgcactccagctgggatgatagaatgagatcctgtcccaaagaaaaaaaatgctaccaattataaagcccttattatatcccagtccctcttttaggccttcccatccatttttctcwttaaatcctcataatcctatgaaggaatccttagacctattttacacttgagaaaactgaggcactgtaagggtgaataattcggccaaaatcacacagctagaaagtagctaaattaggatttgaactcaggtatttcctctgactgtgagatttagtgaaaagtttctgcagtcggagagtggtggctcacacttgtaatcccagcactttgggaggctgagacaggtggctcacttgagcccaggagtttgaggccagcctgggcaacatggtgaaacccgtctctacaaaaagtacaaaaattagcccagcatagtggtgctgcctgtagtcctaagctactggagaggctgaggtgtgaggatcacctgagcctcagaggtcaaagctacagtgagctgtgatgatggcaccactgcactccagcctgggtgacagagtaagaccctgtttaaaaaaaaaaaaagtttcttcaaactataaactacatttatatatcttaaatatgacttgacttacaaaaaagaatttacatggtttttcaaaaaattattagagtaaaatgcaattcttctttcttttcaggagttagatataactatataagtgtcttctttcccctaattttacattcataattaaaatttttaaaacacataattctgatatgtgctttagctcctgagcaatttagtttattaaataaattaatagcaaaccaatgaagttctgcacatttgagcactaaaatgttttgccaaatcaaaacattttacattgcttcgaaattgattttaactatttagcttgtctctcttagtttcctgtgtccttcaaaatctaatacaacatgctcttctttcccttgtagagatctgtcatctccttaaataatgttcttttgctagagattgttactttttttaaatcacagaaacaaaacccagtaagtaaatctgccagttgcctctttcgttaatggtcaattgaaatctattctgtcatccttattctctttgccaatgtagtccaagggctttcatcagtaatttaactctataatttgyatcataaaaagtacctscttcaaagagaagaagttagaaatacctttgtttcgtaaaagaacaacctcatattgaaaggatctcttgcaggagtttgtgtgagtgcctctttgttcttagaaagattgtgggaagtctctacctatggaagtcttcctttgacgtatgtcttttgttgtcaaaatccaccagttgttctttttttaccataaaattatttgtttccctaatgcaacatggcttgagagaaaatgattagacctaggtatgattgtttaaaaaaaaaaatgtaggaaatagtctcctgtacattgacatctagttttcatttctagagtagtaaaagtggccttgytaataaattattttcagagaactatttaaaataaatctcttgtttatggcaaagggagaaaaaatggcaagcatccattttctgcacagtgasaaaggcktcattaaatatgttcattttatatgtacattctaaaacttgctgaaatccaagatgaagccgagaacctgattaataatgcccaatttcaagcttatttaggagaaaaatacaagccacttttataaaataacatttgtaaagcacttttttgtttttagtttaagtgggacatcaaggttataaacaccaagtacagtgaatgttatttttgtaaagtcataaattcatttatagttaatcacttactatatgccaggttttgaactggatttcatcgtcatccttaaaaagcatacttatgtctagagggcaagcagatatataaataaaagagcaacgttgcacaataagtttcataataagttctcccttgatatctttctttacaatttgaaaagtatttgtaattccatctgcaaaaytttctaaatgttatrtgtgcacatgaaagcacaaataagtatttttttacacaaatgagaagtatacactttttttcayacctgctttttcagttaattcatcctggcagttattctatatcagtccatgaagctttgcatctctaatgcttttaagtgactgcatcggtattccatcatgtggatgtgctatttaaccagtcctctggggtgaacatttagatggtttccagtatttactactgcaaacagttctrcagttcatgcatgtgcaagtgcatctgtaggataaattcctaaaactgcaataattaagtcagagggtatatgctttaaaaactttgaaacattgtaattaacacatttttaataattcagcaaaattctrcttacatatatgtatccacatacccagctttttatatggttgttgttatatgtagtctaaaagtataaatgctaaatatcagatgaggaaggatggaggaaggagatttttgaagttgctccaggaggcaagaaaaacaggaaggatgtgtcattgttttcccatcaggcaaaattttggttctggagacacaaaagcatgtgctaattttaggccttgatacctacttctctcaatatatgcctaatcttgataaacgaatcacatgcatgttgcagttccagctgtcatttctgttaagatttgtgggtagctctgtttttggtcccagggcttcagcaacctgagaaaatatctctgggtaartatcccatgttctacccatctgaatgtctgaatacaagcaaatgaattcagctatcccaaaccagttggcccactcagacatgatttggggttctttgattcccacccaccgctgagtcacatgaactctcttcacaatatgtcttgcatctattacacccactccatttccactgtaattctacctagtttctctgctaccagccagaaacatctttggtccatccttcccgactgctgccctaaattgcttaaaatgcccccacctatttgtgtctcttggcactgaggaagtgttagcctctcgctccttccatttacaagacaaaagtctaaactccttagttagatattccaagtgctgctaccttgacaaacctccttaacatctctacgattttacacaccagtccagccccatcctccacaggccaattactcctcctaactgggaaccctatccacttcccttccacctctccaacttcacccattcttcaaattcagctcaagctcagtttaccctctccaggttacaactgagctctcttctctctgaatttgtctttttaattcttcatccctcattgccttacactgtaataaaattgtttcatcagttayatcttgcctgctggtcagctcttggcattggggatatatgtcttttgtgtattacgtatctactgtagctacggtgctatgcaggtaacagactttgttttgataataaagtcacagactttctttgacctagaagcaaccctgagtcattttccctaaacgctcatgttataaagaaactagggcttcaggcagactgtgccataattgaaggtcacatagctaatgtcaaagttgagaatataacccaggtctcctcattctagcatgtgtttttctttttctcttttgccaccatttctctccgatttcatacaagaaatgtttgttctagtggctaaacattgatgcaagagaaaaaaaagtttactttgtatccagttgtcctgagaagcttttataaatgcataaaatcttcacatcagtacgtacttagggaaaatattatcattgtgcaatattagctctgattgttaacaggagtttgacacctcctctcctctagactgtcttcttatagtcattcacttaatacaaaatgtgcatttcttaaagaagtctactatttttgtgagaatgaaactgctaactacagccgacatcactaccctgcatgccatgaaagaatgcagaggatagagttgctatccttgtgggtggagtgtccccagaatctaccagttttctttcatgtacacctaagatttgcaaagttttcattgtagaacctttggctcttctgcccaaatgaatggcccatccccactgcattgtgatgagttgtctgtaatatactacaggaagttttatcctttgacctcgtttctgggtgctgcttgaccaggtggttcttattaatactctgtacaggaagactaaagccattcgtattttagtgccagtaaacaagccaacttagggttgtttgcagattatctcacctttcccgatagtgttgagtatggtttaaaagaaaaacatgtgttctgtaggcggcatcaacccacacacatgtacagatgagacacacagccattgaaccagtcctttgtttactatgaaattaaatgcccactttatactttatgtaccaaagaagtagctggattttttttttttagttccctttttgatttctctgagagtcatggcattcttcagtgcaggattctgattgcaccaatagttttcagatttgcattgttaatggttgtaacttgtctgtggggaacatatggaacctcagacaattgacatgcaaaagaatttgactgaacctgctctgaaaaaaggcattccactttgcacaagtatttttrtatgtttttatgaagatggttgtcctaaaagtttctagatggattatctgaagagctttcagcatcctttgttacattctgagataatagtacttaagatcaatagaaatactatctaacccctttagctgttgacaagaaactttgaggaagggcaataatgattggcaaacctaataagaaaaacaattagaaataaagagaatataaaaatagataccaagtaggtggttaaatagcaacactgcacagttgaatacttgaaaacttttaaaatagttttcttttaaaatgtgtctaaaatgtaaaatgaatttgagattaagtagtaaaatgagtaggatgctgaatggaacatacttgataaacacataatttcaagtatgtttgagtatgtacatatataaaaatataaagaaatgtttatagtggtgacctttgtgtagtaggataagaaatgatttgtatttctttatagggttctatattttacaacatgaatttctgttctaatgaggaggaaagctataggatcaaacgtttttctaacccaggtctatgaatcttctggtgtctcttagcccacagagaatgcacgggggcagagagagagagagttagtttgaacctgtgctatggtgctgataatttacacagctgaataaaaagcctacagagaacaggtaggaggcattacagtatatgagcttcagagtcacacctggtatatggatcttggcttcactccttaccagctatttatttaaacctctgtgtttcatcactaagcctcaggttgtttttttttttcttttttttttaactagtacaatagtaatagtagtacctctgtctctttgaggtgcttagcatagtgcctaacacaatatccaataaatcataactattgggatttatgaattaggagtttattacaaataaactccttagcagggcttactaggccctgcatcagctggctcctgcagccactcatgtcaccagccaagtcttttctctcatacccatctagtatgccaacaatgaatttctccattattttctgtcccgcaatgcacataaccatcagagtgtttttctgaatgttaatcyttcataactagttttctgtccygcaatgcacataaccatcagagtgtttttctgaatgttaatccttcataactagttcagctatcacctcccttcagatattttcccagttcactaggcaaaggtaattgcccacctcctacaagatataaatgaacactgatgattgttgtgcatgtttgctactcaaaatagggtaggcagcgacacatgcatctctatatcttctacacctgacacagtgtgctctgtatgaatgaatgcacaatgctacgtcttacagtgtgaagtttccaagaggagcatccttctagaaatctacaaagaaatatttagtactaatttctggactattctgttatcactcaataacatatatacagatacaccaaaatagtcttgagtccagaaaggtctacatattggaatgtggtatgtgatttcaacagataatctgaggcaaatacattgttaataagtaatagtttgtatcccagtatgtagcagctatgtgatctacatatcaaaatagtcatggctttcactgtcacctacacatttaaaaaacaaaaacaaaaaccctcatttctctttgcttctatgccagattctcctattagtctgaaatttttccaaatttctcagaactataattgcaaattatactccaggcaccacattatttttttgcttaagaatcctattctataaggtaaacaaacagaattttgttctcctgagggtgatgattatctttcccttaaamaggttttgctcatgcattagtacttactatagtgctttggagcagtgaaagttcatcacattttcacccttcatggatgatgtaacttctgagttcttccccttggtttattcacgtgtatcacaaacattcccacttcttaaactagatttttagattgaggtttaaataacaacaactrcaaaaacctaaaacaaaacaaaaaaaacaacgttagatgttcatttaaaacgttttccatatggtaaagccattttaaggtcaatatgaagaataactgagggaaataaatggaaaaaaaactgcttcatatgtgagccacaattaaaagttagaaaaaatgtaaactactactaactaaggaaaactgcttaaactcataaagtacaagctttttaaactttcagcatgaaaaacccactggatacgtgaacagctgccatatttggcaacgttcttttatttaaagcttggaattggcattcaagtcacagtgtagatccagttaggaaatatccatccccttcttcaaagaaacagactctagattacattttacaactcagtccagtattcttaggggaggattgagtttgaatttttgttttaaacagatgtgatgttaagatgttagctggcatttcaatgatactgaaaatgggggtsagcatgggagtggatttccaaaaaagctrgcagggctggcgctgggtgctctgtcctcacrtgtatgtgtgcctctgctgcagcacgcgatgcccttctggaggatctccagccactcggacctcatggcccygcaccaygccttggaactggagtacctgtaacagcgctcggcactttgacagcgcacagctgctctgtgaccagggacagatccagcaggccccagtctcgcatcagcgccggcctccagaacttagcaatttccgcctggtgatgcgcagttgctgtcagtcttgacctctgcctttgtggtgaatggaggaccacgtctatttcatcagaacagctgttgactctagtactgtgaatccagtgaaaataagccatgagaatgttttagcacagcgttatgtgtctgccacattaactacacggttcaaacctgtgaagaaaggacctgcaaacgcttcagttgttagcattttcaatgtgatataaacagcttctccaatacagcaaacctaattgcacaacagagactgaaatgtgtttcctgaataccagtggaggaattttcttgtaaagaaggtttactttttggtgtctcatacccagggtaatctgtacatctctacttatttatgaacagactttttttaaaaagataaaaaaacagctttattgaggtataattcacccaccagacttttttaaacatcaaataattgaagagacaatagcattagaaataagtgattaaaggcctctgcctcacaacatggcaagtacagtactttgaattttagcacattgcatagtagttttaagtatgtctaatttaaacgtataatatgtacatcactgagacaatcatgtacagaaagaatttttggtgtaaatttgtaataatggataattcttttacatattgtttagggaaatgatattgaaaggtagcaatgcctggatagtgaagcatgaggcagcacgtgcacaaattcatgtgccgtgccttatctgagttttcggtataaatatgtagataatggattttttttttttagataatgttgtcaagaccaaaagcatggatgtcaagtgtcagtaaggattttgttttctaaaattttttcctgcatcagttcttctgagggccttgatgaaataacacagcagtttcttaaacaatttgaaacaaaatgagctctcctaccacctcactttttcatttccacactaatgtattatatgtaactacttggaaaaaataattattcaaatgcttcttcccacaaagaatatagatgatagtagatatattttattaataaaatggttcatgaatcggagactaacaaagttttcatgtgctcagaattattaattatcgtgtctgcattttctttcgataaaggaagacacacgatgctaatccggaaatcagcaaactttgcattactccctatgtgcgtattttctctttcttcctgtcaccctgaggaaggttcattgccattgtcatcaccatggaaacaacgttcctctccacctgcattatgtactacatgacaggcatcaatctggggaaataataaaattatcacctttgtcagaccataagagtttctccaaaagtggtcagtttggctgggcaatattttctctcatctaacaaacacaatccattgtcatgaaattacccttaggatgagtcttctttaatcaatcatatattgggcggaaaaaacaccagctttgacccgaagtagttgaagagctacttcattcttttctgaagttgtgtgttgctgctagaaatagtcatttgtgaattatccaaattgtttaaattcacaattgaattagttttttcttcctttttgcttgaagcaaacagttgacaatttttaaccttttcattttatgtttttgtactctgcagactgaaaagacaaagtttatcttggccttactgtataaaggtrtgctgtgtccaccgttgtgtacagaatttttcttcattaattttgtgtttaagttaataaaatttatttgtgatgtactgtaagctccctgactgtcgggatcatctttttctcttggttatatgaaatagcaggatcttggttacattaggacacccaaagtccaacaaaaggaagttgtatgaagtaactgcagtgatggctttatcagtcctttaggggactgaacttgcagggtaacagctgtttctttgatcactgtaagtactkatgaatggaaaagttcttcacttctccaaaaattacataaactagacccttactcaaatttacctactgtagaacataattcagcataaagtgtcttggattgcagagcacagatttagccacttatatacccaagggacaacactataaagcagtttcatcaataaagaatgcccacaacagatacctctatgatttggtcagattaatcattcasagagagctataaaacagcacaactggcttcctcctgagaatttaatcttagaaacacacattcatacatgaaaacacatgaaaatcaaacatgcactgcctcacccatttgtcaggcccctgaagtgtatttttcatacacacacaccaggtcaagtggcctgaatcatgaggtgcctgagcatgccccgacaccccaagaatgaaaagactttggggaaaatcttaaagagagacagtggtggggagtaaaggggtttttagggcttaaattaagcataaaaaataggccaaatggagggcatacccagaagatgagttttctataaagcaccacctctaacatgacaactgctggtcaaaatttttagtggctcctctttgatcatggatttagggctcagatttctccccttggcattctagagcctccaaacacagtctctactttcttcccagcattctctctcattattgaaattagcagatcatcagtacactaggctaacatactaagctccttaatgcatcaaacagctctcaagcatctctgcctcatctttgtccaaagcattctcatttcccacaatgacttccttcaccctatcctcaatccacccaaatcatgtccagctcaagttcttcctcctctacagacttttttttccctaccatggtgaagcagcttcattcatcatctcgcaccaagaagattaaggacacagacacacaggagcgggtttaggagtggaggtttaatagggaaaagaaagaaaaagaaaaaggaggacagctctctcccttgcccacagattggttggaccagctgtgacattcacatagcacgtggggaaggctggccgccctaccctaatgttatgcaaatgggctttccacttggccagcccatcttgtttgctccttactgtacacatggctggcaaagagaagggaatatggagccaccattttgaacatgcctagtcctaggtagccattttctattgacacaactgctggcactcacctgtgcaagcttccagcttgcttgtttatgtctgcagctcaattttacaggctactcttacttagaaaagaaaattattttggggctgcttttcattaaaaggaaaaccttaccaaggactcttctaccctcactatctgcctaaatgattttttcctaactccggtatcaatggcatgcagtgttagctccttctcttctctccctctgtctatgcctttattggaagtccatatttcattcaataaagactcactgccccctacccctcaatagtgtggcactgtcccaggtgctgagggtaggatgtccatgccccaaggactgagtttacattggagttggtggaaacagaccataatgaattactaaatgaatgaataagctacattcatatcaaaagggttctttttggaaaataaaacagaacatgggtcagtgacaggtgtaagtttcctctaatagaatggacagagccaagatgtctgagccaaaacctgactgctaagaaggtggaagcatgtaaagatgagaggcaggacatgcaggcaaaggtccacagaggagaacactctgtttatcctccaaatgagaaccacacccatgggtccaagaggagaggagcaagagatgactttgtaaagggaaggagaccaggaagacctagaggtcgtggtctggagtctggatgctatcctaagtgaataggaggtcactgagatttttacctagtggggggacctggtctagtttactctttgaaatgatcacccagctgctgagtggagaagagggtggagaaggagctggacaggagcaagagaagaaatggggaaaccagttattcagctgttaggacagtcccagcaaacagtggtcagattcagacgaggatggtggaaatataaacccaggtttttttttagtgatggctaaatatttacataggtcaaatggaggaagtagtgagacagaagaggaatctggacacgccccaagggaaggggtctcagcaccactgtggacagttcatcccagtggttaggaatttccccatctgtaaaaatggaataatgattgtatctacttcagaggactattatgaagacaaaataagttaatacagttgaaccctgaacaaccggggctggaattgcatgggtccatttatacgtggatcttcttccactgctgccacccctgaaacagtgagactaacttctcctgctcctcctcagcctaatcaacatgaagacaataaggatgaagacctttatgatgatccacttccacttaacggtaaatatattttctcttccttataattttcttaataacttttttctaagaatatagtatataatatccaaacgtgtgttaattgactgtttatgttatcgttaaaacttccagtttccagtaggctattagttgagtttttgagaagtcaaaagatatacatggattttcaacggcagaacggttggtgcctctaacccctgccttgttcaagggtcaattgtatatgtgaagtgcttgggacactgcctggaagattctctaatgttgtctattactgtactagctaacttttcacaaaaatatttccccaactgaagaaccagcttcttggatgcacagaccctacaaaagtccactgcattgttttggccaggtctagaaaacaagctaaaaaagtctcatacctgactttgagcattgggacagtgactgttaaagaattcattacaattctcggaagggctcaatgagcaagactaacagaggcgagggagtgatctactgtgggcagcctgggcaggcaagaaaggcttccctgaagaaccaatgtctcagctaagacctgaagcctggggaggagctggcccaaggggagtggggagaagagaagaaaatgagagcagctcagagtgagaaggtgggcagcaagctagggaaggataagggaagggcaggagagccaggactgtgagtctgggaggcagagatgacgggttgggcagccaggagagagaggaggcaagggctttaactgtccatctcagagtaaagctacaggctttgtgcctttatggtatgtgagcatgactgcttacccttcacgggagaaagaaaaggcagaggataggaatagaaagggactgagactcctacatcagcatacacagccttcgctaatggtgatgcttctatgytaaacaagccttcaaatatgaggtctaaggagtatctagttgagcccattttacaggttacaaaacttgggttaaatgctttgcccgatgggtcacagccaagtaaagcaaagccatgaccccaaaccaccctcttggatgcaatactgaatcatgaaaagattaggagctctcaggcctgtaacagttggctttgcctccctgatctatcactaaataatagggtaagtttaggtgtcctctttgggttttccaggaatatttagtgctttgtccacagttagcacaattttccaatgatgtccaaaggccttttgtcttttttaccttagtgcctcaatcctttgtcatccttccagagtttgggttaaaacataccttccagtaaacacctatacatatcaatgaaaacgtatttcataacttttcaatttgcttttcagaacatttgcatgtatcatggatgattcccaattcaaatgactataaaggaggccatttgcttaacagaatatagagatgatggacactgtgtgttcatttaagacttgtaagaaatttcctttcaggcactggccctttacccacactatacgcagctacaaaagcttcagctggaatagagttcgctatcatgttcaagacagtttttttacaatccaaaaggctcgagaaagtgagctactcttttctttcagtgtctctctgcacatctccatttctctccattctatgtcattatacaaactgacaggatgacttgcggcaaaagaaatgaaagggtttgtaatttaagaaacctctggccttgctgactgaaaacaggttgtttgtaaaaaggaaatcctgacctcagctaactggcaaactctgtcagaagcaatagaaggatgcgaaggagaaagaacagagctggggatttttattggcaacagaaggaaaacggatgctctgccaggggaaagccttttgagaagtcacccgtgagggggcaagacatgcctcaggtctcagagtgtatgcctggacagtcacagagcagttctgttctggttttgtgggctggttggacaggggaatttacttcttgtgacaatagctaggctgacaaccctgaaagtggattccctccaggtagctgaagtggagatcctctgctgcaggtaccccatggcctgtccatcttctatcctggcttgacataaagcctaaggtgcacaggtgacagggggtgttccaggtgtgcaggaggtgagcccacaccatttcccatgtgccagcccaccctcacttcctccccacctctgtgtgctgcctgttgggcagggctctgcagtgacctctggtcaactccataaaagaaggcccctgaaaactctaatctccttatgctagtaggattcccagttggctacccattgaaatcagctgggatgctttgaaaaatccccatgcttgagctccagcccagagatcctcatttgctttgtctggcatggggcttaagcagcagcattgttttgtgccagccagctatgtgagaaagacctccattgctagtcacccccaagcagggctgtccaattggccaagtgcactttccagctcttggtctttcctttctaatccattctgattcccagttacccaagcccatgcccatgaaatctttatgacccaactcaacaccattcaataaccatcagcgggagctcctactgtgaatgaagagttctgaccagtgtcagaggtgttctcaaggggctgaccttccagtgggaaacagatttgtgataaaaggcatcctatgatgagggcctcgctaaattccaaggatacccacaatctaggggggcaaattttgtaaagaattttaatttatgatggaaactcagaagatgcaggaatgagtgttgcctgggggaaagaggagaagtctcattgaaaagatgatactttcattgaactaagtgaaataaaagaaacattaagatgccaactaggttcttaaacccagtcctccctaaactccccctgtaactggctaacttgctcaagccacatatctagtaatcagaagacattctcaatgtctccccatctctctcaagccccactttcagcctttaactaagacttgccaatttcccacacagcacatctctgatcattctgctgcttaccatcacctggtccctgtcacaggtatccttcacagatctcctggaagagcttccagctgatctcccaaccctcatcctcccctccctgagccattccctacaccacagcctcaggggtcagtttaaaatgtaaatcctatcctagtactgcctattactacagtattgca

SEQ ID NO: 93703 - DNA, 94709 bp, Homo sapiens
atcacagggggaacattgaatcaattttaaatcattaaaaattaaatcatttgtaaactttaatactttgggtatatattaaatgttaaaagattatccactgtttcattcgagatctgttaacataaagatgaattcattcccttagtaccttagaatatctatctagacttagtgctaaatacatagaaatttctcaagtacttttcacctaatcctaacccatatttttaagttttaggacttaattcctttcttgttcatgtgttggaagaaaatataaataataacatatttccattaaaatgtatgagtacattgcaaattaaaactaacattaacaaacttcctcaggacaaacagttgcttttaaagtttctgtacttaaggggactgcttacctacgatgagcctctgtagagcacccttatctccattaacggcagcagcatggacttgtgatgctaatgatgaaccagcaaacagcaggttctctgacttgttcatagtcttcttagcaaccggagcaacctgaaacaatgattcagacaatgagcgcatgcagcaaacatttctgaaacctgtctcatcagttccaagtgggtattttataaatatggcttactagaaatacttgactaggattagaaaaatctatagtcctggctgggtgcagtggtacatatctgtaatactagcagtttggaaggccaacgcaggaggattgcttgaggccagaagtttgagagcagcctgggcaagatagtgaggctgtctatcttagtgagacctgtctcaaaagaaaaaaagctatagtcctagtcctggaattggcattaggtggcaaattaggtgacttttgtacaagttgctcatctgctcatctgtaaaatgagagggtaggtgcttctaggactcttcttagggactatctgaggaaaaaacaaagacaatatttaacattaggcacagggctcagggttacagtgacacaagcaatatgatgccacataatctaagttaatacaagtaatatgatgccacataatattaaacattagaattgatattgcaaataaaagtgagcccgatccacaaaaagagtataacataaactcaattgtgaagtcagaattagctggatttaagcactaaataaacttaaaaaaattaattagggctgggcatggtgactcatgcctgtaatcccagcactttgtgaggccaagacaggagaatttcttgagcccaggagtttgagaccagcctgggcaatatagcgagagctcatttctacaaatcccatcccctcccctcccttcccctcgcctcccctcccctcccctcgcctctcctttcctcccctcctctccccctgctttcctcccttcttgtcttttcgagacagggtcttgctctgtcacccaggctagagtgcagtggtgcgatgtcagctcattgcagcctctgcctccagggctcaagcaagtctcctgcctcagcctcctcagtagctgggattataggcacctgccatcacgaccggctaagttttgtattttttagtagcgacggggtttcaccatgttggccaggctggtctcgaactcctgatctcaagtgatctgcccaccttggcatcccaaagtgctgggattacaggcataagccaccatgccctgcctaccaaaagtttttaaaaattagctgagcatggtggcatgcactgtaatcctagctactcgggaggctgaggtggaagtttcacttgaacctgagaaacagggtttgcagtgagctgagatcacaccattgcatgccagactgggcaacaggttgagaccctgactcagaaaaaaataaaaaaattagttaaggccgggtgtgatggctcacgcctgtaatcccagcactttgggagggcaaggcgggcagatcacctgaggtcaggagttcgagaccagcgtggccaacatggcgaaactgtgtctctactaaaaatacaaaaattagctgggcgtggtggcgcgtgcccataatcccaactatgcaggaggctgaggcaggagaattgcttgaacctgggaggtggaggttgcagtgagctgagatcgcaccactgcactccagcctgggcaacagagtaagactccatctgaaaaaaaaattagttaaaaaactatttttaaagagatgggatcttgctatgttacctaggctggagggcagtggctattcataggtgcaatcccactacgatcagcataggagttttgacgtggaccagttcattccttcttaggcagcctggtggtcttctactcctgggagatcaccatattgatgccaaacttaaagtggacacctgaatggcatagcgcactacagcctgaaactcctgagttaagcgatcctccctcctcagccacctgaatagctgggacttcaggcatgtgccatcacacctggctaaatactaaattaaaaggtatctaggtcttgccgtcattctcacaaaaagtgaaatttttatttgttctctccttggtccaccaggaaaatatacctagatagaggtcttaaccataagatcttacttggaacatcgtatcactaaaatgaaccatatttcaataaggacaattttgttctgaccggtagtctcatggagcttgtaagaaccttttaaaaacatatgacaggagtttgagagaccagcctgaccaatatggtgaaaccccgtccctactaaaaacacaaaaattagctgggctgtggtggcacacacctgtaatcctagctactcaggaggctgaggtgggagaattgcttgaatttgggaggtggatggaggttgcagtgagccaagatcatgccactgcactccagcctgggcacagagggagaccctgtctcaaaaaaaataaaataaaataaaaaataagtatcagccgcataggaagatagtgagatccctatcacaagagtgtttaagaaagcagaggctggagaaatgcagcaacaattcaaacacctgatgggaaggaaagatgaatagttgcatcagtgatcttaaacatccttcctaaacccttaagctgctttatcaaagttccaaagctgaatgcctacaaggaccagagaggtaacaactgttagaaacgtagggagtcacagaatcacggtaaactcaagcatatgtacttatctaaagggagcagctgttaatcagctccagttaattgctgccatgagggtaggcaagtccttttctgatttcaccaaaaagcaggtcacgccaatcgctgttactcctggggatctgagagttttctaagataaatttataacggatgagctggtatttgtcttgtcatcgacaaggattattggttcaaattctgcccttgagagaacatattaatactttcttaattatggtaaagcacagctccttacgtctttattttgctgacaatttgagttaaggactggcagaaaatatggaggaagagggtgttgtgagacacttcagtcatgtctgagtctaacagtcatgtcagaagaactactgtcatatccaggattatattaaggttatttgagagaagctacaaaatagaggtggaggtgaaaacatgggaggggagtaactgcacttgggttctaggcccagttgtatttataatcagcagtgtgtcctcaggctatgtcagctttctaggtttctgtaaaatgcaaaaaataataaggttagaccatgttcacattcgttcattcaacaagctgagtgacaactatgtgctaggcactgttctaaactctaagacctgtcatttttcattctaagtgatcagagttttaggcacatcagaaccacaaaaaaagttctttataccctttgaaaaatacactaaaaatgtgatctctgttttatatatatgtgtgtgtgtgtatatattatacatatataaattatatatacacatatataatatatataatatatatacatataatatatatattatatatacatatatattatatatataatatatattatatatataatatatatgtatatatattatatatattatatatatacatataatatatatacatatataatatatattatatatacatatataatatatatattatatatacatatattatatatatattatatatacatatattatatatattatatatacatatattatatatataatatatattatatatacatatattatatatattatatgtacatataatatatatattatatgtacatataatatatatattatatgtacatatataatatatatattatatgtacatatataatatatatattatatatacatatataatatatatattatatatacatatattatatatattatatgtacatatattatatatattatatatatatactttttacttcataattcttagcacttagcacagtaacaggtatatagccagtactcagtagatgtttgttggatgaaaggtcacaggctgagtgctaagtccaaaaagtgagcaggatcaaagtttaatttcttgaataatgagttcatacttacaagtctctgctcttttaaaatttcccatttcaactatctttgggctctgtcaggggcgtggacaagagataggagcactagtctaggagttaggccgccttggtaagagtattggctctatcactgtctaattttgtcaccctgagaaagccattatgcagggctctttttttttcttaagaaaaaatgtattttttgcccctttaagaaaataaatcattttttatagaaaaaagtcaaaaccactttgataaagtgctataaaatgcaaaggtgtcatcatccttgcctaattatacaacaagcccgtgtaataaatgctctaataattataaccgtacaaaactagaggtactgcagtcacactcataggaagagtaattctgattaggactaaagggttggttgttcgggaagttctcagagatggtgacatttaagatagcattccagagagagaacgggtaaggccattccaggcagcaggaaagctgaagcaaaggcgggagcagggagaaccacaaaagcacagtgtgcctcctgggtactaagcagagatcgcgtgggctcctggacctcactgagtgtttgcagaagaagccgcagagctacctggggccaagttaggatcctcgactgctttgctagggaatttcgtaattatactggaggagcgatccacgccttagcagcaatcactcacacagttttccagtttacgacgtgctatcccatcccgtaccacatctactccttacaggagccctcagagacaatcagggataagtcattgactcattcaactgaggccccgagtggtggctctgactttataatgcaggaattagagcagaaagaagaggcagcgggcgaggaggccaatgatggaggctcaggccacagcctaggccaggaaggccgtgagtctgcagcaggggccaaggcggtgcggaccgaatgatctgagcctccccagccaggccccctcctactcaccctcgcctcctccaggactgacgtcccgggggcggctccaggaggcgcaacccggaccgggccgcccctcctgccgggccggtacactatatccagccaggtcagaccccacggcgctgaagctagccgagcccctcaaaaggccgcccgaggctttcggccgcacatccttctgggaattgtagttcccatcctctgaagcaccgcgtacacccgccctccgcccttctatcccacaggaccccgcgcgcagaggactcagtggaccggggccgagagcccaatgggaaaggaagttctagatgacggacgacgtgcggggtgaggctagtgcaggactacatttcccgaagtgcaccgaggtgggcaggacccggaagtgagggtgtgagaggcctctctggaagttgtcccgggtgttcgccgctggagcccgggtckasaggacgaggtgccgctgcctggagaatcctccgctgccgtcggctcccggagcccagccctttcctaacccaacccaacctagcccagtcccagccgccagcgcctgtccctgtcacggaccccagcgttaccatgcatcctgccgtcttcctatccttacccgacctcagatgctcccttctgctcctggtgagtgagggaatgacagacccatcgacaaacgcacgaacggcctccggccctcgcccagggggaacactgctactcctgcccctgcttttccgtcttttcctgcagtgttttggagtgcaccctcccccgctgccytcactctcgcctgtcggcttccaggcgcggagtccccgaggcctgagaaaccagtgtcgggggagaatgggagaattagccctgagggactgatacgtagtcacggcgtaggagcttccccttctccccgaagtccgggggtttcggtttcgagggctagtggacctggtggtagcttgaatcggaaaagaccaagcatagacctagcgttccttcccaccctctccatttgggaagagtgtgaggtcgacaggtgctggggttgtgtgactctcactgggtctagatccctgaagcggtgcccgggttggcagatccctctgttgtggcttgatgcgattggttgggaacccggaactggagactggtttggattccactgggagaatagagtttgaagggtggaaggtgtggttacctgacaatctcagctcaaggcctccctcaaatcttattgcaacgtatttccccatggaagcagatttcttcttcattgcgccttatttgaatatgcattcattcctaactgcctaacctgctcagcatcatcccatcttaaaagaatctttccctagtccctcttgccccagagtacgtcttgagtgtgcagactaattgatccaggcttcaggtcaaattgagacaaaagcgaaggactaaacacgtatggcaaaatggcttatatttaattgggctgttaattataatgtaatatttgaaagtaccttaattgtagtagatttttagaaattcagatttaaacattaagaactactttctttacaatttaagaaacgatttagtgacgcatatgaagtcacacagctagttacaggcagagctgggattagaaacaagtctcttgacttccagtgcttattccgccatatcccattaaatgtttaatatttgtgtttgaaatagttctttcttttcttttgtcacttggaccttttcggaaaaagcactgtaaaaaactaaatggcatgtcaaagtacttttgagaacaaaaagttgtgtataaacattgtaatattaaatgatagagtgtcttattgccacttcttataagtatacaacagtgaatgacttctgtatcgaggaaaatattctgtatagtgttgtttcttggtgatttcattatacactgtgatacatttttccttctagaagtgttagaataataccattattagagaccactctctccttaagaagactggatactaatcttatccacaaaatggcttgagttatgaattgtgtgcacttttaggaaatcaaaaaaaaagggcaaaaatcttaagatattgtaaagaaaagttgagacactgaacaggcaaactatatcagatgcactttcctcaaatggtatggtttggttgtaaagctaagttatgaagaagaaataatttattttggaataactcatgctttttatagaaaaacctaatcttgttaaatatgagttttttcccaaatagaatctagatttaactaaaatctaagcattttgtataattatctttctaagcaaatgtaaaggcataaaaatctggaaaatatgttagagaatacctgtagatatgaaaaggctgaaaaagccccagaaaaggtttaaactagaattacaagtcaaactagatttaattggaatacagtgtttacctagttttaatactcatatgctagttagcaaatatttataaaacatctatcctgtctaatcgcaactttgagttgcttacttaactggtaattctctcctactgatggaacctacttactcagtattctcgctgtctaataatttgtcctctttgttcccccgtgtacttttttcctactcttccaactttctctctcagacctcaagtttattccttcttacatacagataaagaaaagccaagttcccatttagctgaggtcatcattttttccttaaatggcctcctctaaaaagctgtatattctcttactatgataattttcttcaggcactttgtacctcaaccctaaagaactagacctgttcaaatttagtggtgttcatataagataacagttgaaacataatcccaaacttctggaggcaagtagctatcttttccctgatctcaaagcattttggaatatatcactctgccacaaagcctttctggatgggtaactaaacacaaaagctcaatgtgataactttttttcctgagcttttatatgtatatatatcttttatatatatatttatttgcgtctatatagatttttatttacatatatttagatagatagatttaattagcccttttctgcttatcttcctatctaaggtgggtttattcagggttttccgctgggaaaatgatcagtaagggggatagaaatcttgcctgtttttcctgcactggttgtgtacaagttttgaaaaggcgagataagagaaataagactaaattggaaagaagttgtctcatgcaccctaggtaacctcttctgtagttcagatttgtagcactgcagtccatttgttttattgaagatgtgttctcattaatctcttgataagtatgtttatagatcataattgttactagtcgtaattgtcccgcatgtgaacacttaagggttttgccattgttgttctcggtttgttcaatatgtataggtagtcaagaaaagtttgcttagtttaggtagctatgtaaatttgagagctaagtaaacatttatttaatcgttacaagtaccttaaaaataagcacagtagaattcagagatgtcagttttatcctttaatgttaataatatatgtagattccagtcttcaggaagagtacttttggaggcatgcagtttgattaatacctaggtgaggttttatttattttgttgatttaacttaccctagatcaatagtttacaaagcctggctgctcattagaatcatctgtggcagttttaataaaatgatatcggggcccaataccaggtcagttatatctgtgagccccagaaattagttttaaaaaaaaatttcccaggtgacatactaaagtatgtccctctaaaaggtaagaattaaacaaaaccacaataccattatcacatctggaaaaattgacagaaattccttcatatcatcaaatatctggtcagtgtttgggttttcctgattgtttccctttttttwaaaaaaaataaacagcattgttcaaagcaagggctatataaagtccatctattccaattggttcatatgtcacttataaaactttttaaatccctaggttctctctccatctcatcattttccttataatttgtttaggaaactgatcctctgtcctgtagcatttgccacattctggatattgctgattgcatccttgtggggttttatgtttctctgttccttgtgtttcctgtacatttgtaattcaatttatgtggtcctaaccaccagctgcatatatattgttaggttcatttgtttcatttatctttcaatttttagtttttaaaaatttaccttttattttataattatataaaatctcttccaaaactaaatctgtaaagctaactatatttggataagtctaatttgtttgtctcttttactgtcttatctccctcttaataaaatagcacyttttttttttttttttcttgaggcagagtctagctctgtcacccaggctagagtgcagaggagtgatcacagctcactgcagcctcaacctctgaggctgaagcaatcctttcacctcagcctcctgartagctgggactctgggactacaggtgtgtgctaccacacctggctaattttttttaatttttgtagagacaagggtctcactatattacccaggctggtcttgaactcctggctcaactgatctgcctgccttccaaagtgttaggattataggaatgagccactgtggcagacctaggaaaatttttttttaattttttttttgagttggagtctcactgtgttgcccaggctgcagtgcagtggcaccatcttgactcattgcaacctctgtctcctgggttcaagtgattctcctgcctcagcctccccattagctgggattacaggcgcttgccactgtgcctggctaatttttatatttttagtagagatggggtttcaccatgttggccaggctggtctcaaactcctgacctgaggtgatctgcccgccttggcctcccaaagtgctgggattacaggcatgagccaccacgcccggcctggaatacttttttaaaaactttttcaattttatgtccctttcttccttttttttttttaaaggtacaagctatttgtatttattttggcatatatttgtttctccctccacttggattaaattgtagcttattagtcacacttttcccccaccttttttttaacttaaaattttattctagagatgcggatagaaattttgcctatttctttttaactgcttatgcttcactggatagataccagttcactgttgttaccattcttttgctgttacagatagctctgcaaacaatagcttgtgcttacgtaattttgatagtgtatctttgagatagatttctgtacttgsagttgctagggcaaaaggtaaatgtatatgtagctttgtaggtattgctgtatatttgaaattactctccgtataggggttgtgccattttatgacctcaccaacaatgtaatagtttccctgtagccttgattaaaaaggtataatgtcaaattattgggtatttgtcagtctgatgggtgagaaatggtatctcaatgtattttaatttgcctgtctttaatatgagtgtgatcaagcttcttaggtgtaaaagtcatttgcatttctttttgtgtgaactgtcttcctgtctagcctggttttctgtagaattgttggtcttctatttctagactatatagacacagacacacacagttctttttttttccccccccmcagacagggtcttgctgtgtagcccaggctggagtgcagtggcctgatcttggctcactgtagcctcaacctcccaggtcacgtgatgctcccaccttagcctcccaagtagctgggactacaggcacaagccaccacacccagctaatttttgtatttttagtagagataggcttttgccatgttgcccaggctggtctcgaactcctgggctcaagcgatccacccgctttggcctcccaaagttctggtattataggcctgagccactgtgcccagcccacacagagttcttaaccctttatatccttagttgattctgtgatgatgctcacagggttgagaagcactggaatatacagccatatgtgaattcagtcatatgtctgataggttaaaatttgtaaaaacccttggagatgtttaattgcttacagttattgaaaactttttctaaactgtatactgtgatttttaatagcattatagaagctcaacctttaaatgcactgtagcttacttcattatttgttaagacattttggttactggttatttcaagtttttcacagttataaaaaatgtacaaaaggtatgcatacaatgatgttctctgcaaatgttcagatacattctcaggttacttttctagaattatattttttgggttatatggtgtgtcttatatttagaatttctgatatgttgtactaaattgccctactgaaaatttgtaccaatgtgtattcctaacagtgtgtgactatgcccacttcctcacactctcatcagtagtgagtgtttttgtaatctgtgccaatttactagaccaaaaatggtatcacaatttaaatttacatttctttgattacaaccaaagttgaatttttttcatatttattgataatttgttttcttgtgtgcatgtttgtattatgggttcttgttatgtgtcttcttttcaaaaaatggcttactcttcttccagtaattcagaatgaatgtactcacaagatagagtttatgaacagtggaaggtattattcttttgcctcttcattagtctccattcaaaaggcagtgtaatgcaaaagtagatgtcatggcatctatgtaagttccgactcttccatttacttaaccatcataaccttggttaaattacttgtttttcttgtctataacgtaagcacatggatttgatgattcaatgattctttgtgtagtctatcttattttcaagatagactacaaaagggtattcctttagctcctactgattatagacttattatttgattgggtagttcctttaaaaatctgctagcttgtcagcatgttgcacatgtgtatggggcatgcttagcatgcttttgtcacagcttatctgatattgactcttgctgtactctatttcttctaaccaagaagattaaaaacagtttgagtttttgcaacatttattgatttttagcctaactttgattccatagagaggaactcatctatggcccaggctgcagaaacttaatctgtatctttgttattatttttcttttctgcctatcatttgaaagtctatttgcaatctactatggaggagaaaaagatcattgagatgcatatcatgccttcaagaaattagtaattcagatgaggagagaagatatatatataaataattagactaccaaaaggaaagtaatggatgccaaaggtgtttgtagaagtgggttatagatcctgctactcagaagtgtgattgtgagcccaggcatcagcatcatatgagaccttttagatcacctcacctcagacctactgaatcagaacctgcactttaagaacttatacccagatgattcatatgcacataaaagttcgagaaatactgccatggatgtttggaagaaacaaattatttctcagtggaggaatcagagtagtcttggaaaaagatgaatttgaatattgccttgaatagttaaatggatcaacttattttcagtcctgaatggaatgaagaaaaagggcagtgcctctcaataacatagtaaatcttttctatcaattgaatacttgttttttattgttttatttttaagaaatcttgttgtctggttggctgacgtggccaaatgtcagaattggccctaaagaagctggcaaaccctttggccaacttcattaaaacagtttgttatcaacttagcaaaaataaaaatcatgatctttagtgggttctaactagccttcagattagtccattcaagaggggagaggaataaaatgccactttggagaagtcccttctgtaatgctgtgggtcttggttctgtccttgcaaagactgaaatcgaattctaactgctttgggaatccttggtgatattgtggtcaccacattcatctctgcaattcctacaaacctgagatttcatcattatgtagaactttgagcattatattggactctaattttaagtcacctgaatttgtagacacgaacattgctaatatagtagagaaaagcaacaaaaaagcagaagaaacccatctcagaaaaacattgtagtagtatttgagctaaagaaaaccataggctgaatagtagaataccagtactttttccatttcttccttattatagtctagtagtgggacctttggtgaatggatttaagaaattttagaaaaaggttgttaggtcrtgtttgacatccttctgggaaaaataaatttttaaaaataaaaaagaggtcattaggaatatagattatgaatgcatctacaaaataaaatgttagagttaaaatttcttgtcctatagacagtacgcactcatatttacaagcctgctctttagctgttttgttgtatatttttttttttttgaaacagagtctcactccgttgcccaggctggaatgcaatggcgtgatctcggctcactgcagcctccacctcctgggttctagtgattctcctgcctcagcctcccaggtagctgggattacaggtgcctgccaccatgcccggctaatttttgtgtttttagtagagacggggtttcaccatgttggccagactggtctcaaactcctgacctcaggtgatccacctacctcagcctcccaaagtgttaggattacagccgtgagccactgtgccaggcctgttttgttgtatttgaagttttaaataatgtagggggaaatgccagcttttaaaaattaccaacacatcattgaagtctatctctttgcttatagaacagctgcaagtgtaagataatgtattgtcatttggcgttaccttgagagaagaaacctgcacatcctcagttcctttgacttattactggagttctggcccaagtacagtaaaatgtcagctagccagtgataagcttacacttctgtaatgattttacctctgaaagggctgagaataaagaatagctactttttttttctttttttgctagtcaaaataatttcttagaaaacagctactcaaatggactcattcctcaaactttctaaatagcaggaatttttactgtaggagtggatattatttcctcacaggaagtcttgtagtgtgctaacaacaaaagtattacaatgttgtaaaatacttagttctttgttagtttaacctttgaatgaaatgaacagtttcagagaccctaattttgctttagagttacagtagtcccctcttatccacaggaggtaatgttccaagatgctcagtgtctgcctgaaattgtggattataccgaaccctatatatactatgttttttcttatacatacatacctatgataaagtttcctttataaattaggcacagtaagagatcaacaatagtaactaataataaaatatactgttcacagtttctttatagaagatttattcttaatctagatcttagccacctcagcgtatgatttattttctttccatttaaagtcaagagctttcatcttttcacttaaggaagcgctttatggcttctctttggcatatctttttttttttttttttttttttgagatggagtctcactctgtcacccaggctggagtgcggtggcgtgatattggttcactgcaacctctgcctcctgggttcaagcgattcttctgcctcagcctcctgagtagctgggattacaggcactcgccactacacccagctaatttttgtatttttagtagatttggggttttgccatgctggcttggctggtctcgaactcctgacctaaggtgatccgcctgccttggccctccaaagtgctgggattaacaggcatgagccaccacgcctggcctctctttggcatatcttaattgccagcatcactactcttgtgctttggagccattattaagtaaagtatgggtttttgaacacaagtattgtgattccagtaccactacagttgataaggggcgggttatgtctgcagtgggaatatgctggacaaaaggatgattcacatcccacctaatttgaagcaagatggtatgagacttcatcacactacttagaactgcatgcaatttaaaacttataaagtgtttatttctggaattttccatttaatgttttcagatcatggttggataaaggggactaatgtaaagactgtgctacatttttaaagcatgtatcttatttgtttcagaaatcatccagtttgtttatttgtacctgtactctggttttaggatatcttctggaatattcgaagtatttctttcccttaatgatcgcttgaatatatatagactaaagagaaaacttttagaagaatatttagtttagggatcagggatttgggcccaaatcttggatctgctactcaccacccttctttcttcttaacatctctattttcctattaacttctgaggaataatactggtattatgtctgactcctaagtggtggtgttattccatgctactattatgattttatgaaacaaaaagtggtgaaaggtatccccttttctcattcttagatctcagtttgttgtacaatgccttattatagagtaaatgcttaataacaatttaagtactgtggaaaaagaaaaggtagggcttacgtgagaaggatcaggagtgtattaggggagttgtagtttgtaagcatcacgggacaggtgagccttgaagcaaktgagggagttagtcatttggatttcctggaagaagagccttccaggcagggccgttagtcagtgcaaagcccctaatgtgggagtgtcccaggcatattcaagaaatagcaaggagagcagcgtgattgtcatatagtgaataagatacagcatattagaagatgaagtcatttagttaaaacatattttgcaaaagtgtacttgcccttactatgtatgttgtttactgataattgtttttctttttctattctgtgctttattttattttttaaaaattgctgatctgactcagtagggaagaacttcctaactgggtggctgatattattgatctcttcagccttgccccatttgcctctgttgggagtagcctttgttgttttgattctcygttacaggagggrtcccaacttgcagtgtgaaaaatactgttgtagtaacttaaaatgttaaaccaaaagatttcctgacgtgttttttgattcccgaaagtgataacactttcatggtacagaaaagcataatgaagaaaaaaatgcgtacactaaccactgataacattttagtgtatttcctttcggttttattctgtgcatatgcgtatggatttttaatagtaatgtgtatattttgaacaatataagattgggctctttttgtttaatcctgatgtagagtggtagacttctggttcatagaaatatagaaagaaaagataccacatgcktagatgtattctaccacttggaaataactcctagcttgaccatgtaacttcaaaaagttatttaacctttctgagtttccattttctcacatatcagatagagataaagacctctcctgcttagttctggggcagctaatgagactgaatgtgtctgtagtgcattataagaaactaaactctcctggtttttgccacataataggtgttcaataaatgttaagatgagggactgagtgaatgaatgaatgactaaatagataccctttttttgaaactttcaagttgtctgtccaatggtattaaaattgtgtgcactgatgtaatgagttcacttgaccagcttccggcctttgtggtctgtggtcttcttatcctaataattacattgtcattatgccaacaaaaacagcttaaaaatgtgactgttaagtgaataagttatcagcttagctctgttttataactgtattttaattagtgttatacataaatttgttatattattttgaaaaaagcttatggagggagttgtgttttgtcgtatagtccattggttttagaattaaaggagattagggtttgaattctgttctgccattaatttggacacgtcacttagcttatttgaatcttattcatttaataaatattctcccttttactgtatgccagagactgcaaagtttttttttttatttataaaatagggataatgtaattcctacttcacgttcagagttgctatgatgatttaaagagataatatacatgtttgtaaactgttgatagaagatactgttagattaaaatatttgtggatgcttcaaacatgtgtttgttgtgtggattctttccccagaaggctaggtgtgcaatgtatttccctttcagggagagttgatcaattatggaagtagttctatggtctggatttctggggtaactgagagtactagaaggtagagtgactttgaagctggaaagacctgcttcattcctagctccctctctttttagctgttgtgatagtaggcaaatttctttatctttttgaatatcagtttttctaaaagtgggaataataattctgcaagattgtgagattgagatataatgtatgtaaaggacattgtatgatgtctggcatgtaggagatacttgtttgtaaagtaatagtagagaaggaaatgttgttaagtgaatggagtcgttgtgaaatggagaaagcaccttagaaaaggatagtgcttgtgctgaccatccttctgtgattgttatcttttgactctctgaaatgagtaratgggtgaggcttttaattttaaaagtcaagtctagatattagtggtttcttaaagtatttgttaacttgtctctttcctttggtaagttatgrcatagccttatcaaaatagtgacaactataattatgattgatagaaataaaaatctaacttgatatgcatttcagcttttaatacaaaagcaaataaattcctgtaagtggtataaatgaaagtgaggaaacatgcgttatgccctgctgtttgaaaggtatcatttgcactacatagaaaaacatcgtttctattaccttgaacattcaaaatcattcaaaaaagattatctctgactgttgtaattgactaggtatatggaaaatgatgacaaatctttagaaaaatataatctttctctagttgaatttagtaaggaaagagtagattatactgcagatttctcattactgaaaatatgaaaaaataaaaattcygtttaagtgtggaagattttttgttttgtttttgagacagagtttcgctcttgttgcccaggctagagtgcaatggcatgatcttggctcactgcaacttctgcctcccaggttcaagcagttctcctacctcagcctcccaagtagctgagattacaggcatgcgccaccatgtccagctaattttgtatttttagtagagacgaggtttcaccatgttggccaggctggtctcgaactcctgatctcaggtgatccacctgcctcggcctcccaaagtgctgggattacaggcgtgagccactgcacccagccagtgtggaagatttcaaattggtagttatgcagtttcatttgctcctgtaaccttaacttacgtacaccatagttatcatagttctgtggtctggaatattgcttccatgggggtatagtttttttacacaaaagcatatgtagtatttactacttttagtaagttttggcccttaagctaaatctgtttatagacttgatgaaactggggatttaacaaatctatttaagtttagatactgtaatgaaggtatttggtgagaacctgttggcagataagattgattatgatggatattttaatttgagataaagaaaagttcattatatggtcttgcttttctgatctcattaatagttacacatatacctaccattggaaagatggagagttggttaaaagaggagggtaaattgtattttccattctacaacgataagtaaaattataaagacttccttgatacacactagttattgtcttgaataaaaaagtgttttaaaatatataataaccgagccctcagtaaattttaatagcttttaattctgagaagtatccaatatcctgtagcaaaataatcagagggttctgtttttcttcttcatttgtaccatgaggcaagataaaccacctggctagtatgactgaattagttaattgtggtaaggctgttgtgtttgttgccttagctttttgtggttgatgcctttcttagcttactttatttggggaatacccctttctacagtagtatctagtgtctctggattatctttagctcttacttctaatgcaaaacggattgtggtatttaaggaaataagcagggagctttatccatagttccgtatgatacgattttcggagagtctgtcacttatttttgaatattactttgaagtattagttaataaatattctggaatattgtaaaaataggataaaagatgttttcttggtatctttaaatgcacttttattcaggttgtttaaatggtttttagtttaaagaagcaacaagggtgtcttcagggcacaatttcttttaagagaaatatgaactcttgtattattatcagtttattaacccattgtcaggtaatgaagtaattcatatcagtcagatattttaggtaattaaaaccaataccattaaagcaaaacaagtttggttggaaatcatttaaaagtatacacagtcatcctctttatgtttaggttctgaaatggtgtttgttaatgcccttgtgcataagtccagagtggcacattgtacaagggatggctaattttatctgttggtgacaggcagagtcaatgtggttttgcttgatttgcatctgtgaaaacttttaagtttgtagttagaaagattataaatagaagagcgtgttgtctgacatactggaggctatcatacatgatttaactttttaagtgactgtgatgtattccctaggttggagtagcttcctaattacaaattataatatcctttggtaagtcttctgtaagactctgagagcatttcctactgttaactacctcattcttccctgttaggctattttctctggttcttttatgctccagtagttccatctgtctgtccgtctgtctttccctctgtatctgactgttttctcttgctttttcacggggtggaaaagggaaaaatatctacatttaagggacagaagaccgtaaggagataaatgtggatactctctaatgtactatcttagagcttttctcccgtcctattgcatcttgatagccagtcattttaattcataaccactattcaatttcacttttgcatctctatagatyggagtagctaggagcctgttagtgcttttattagtgccttgggcagtgttactttcttgatgcattagtcctgggtgtaaaaggtagtcaaacacgatttccaaatttcccatgctaattggtagaaggtgtctcatcttctgacagctattttyccattgactggagcaaggcatgtactagtgaaattgaagtagatctgtgactgcacagaaattcttttctctcaaatagtcttccctttcagttctcagtcacctaggtttgaagtcttacactttttgactcattgtactttcaacccttctcatggctttttattttttgctgtagctgatatcaacccccctatctggctttcagtggtctattttatatacaccttgcttttttcctttaataatgtattttggaggtctttccattagtacatagagaatgtccttatttttattttcatagtggcatagaattccattgtattgatgcattgtaatttatccactatctagttgatgaatattcaggttgtttccaatcttttgctattacaaataatattacagtgaatagcattatatgttcatcatctttgttcacctttttttttattgggatgttgtcttttccttacccatttccagagctttttataatttagggaaattctttttatgttttctcagtttcttttctctttcttttgtttattcattctttctattatttgttatgtggttttgtgtagtaagtgtgcttgtgtttgtggtttcatcaatcttttatggctttgggttatgattcataattagaaattccttctccattccaagatttgaaagtaattctcatgtattttctttggctacttttgtggtttcattggaaatatgtaaatctttatatttatttgaaatatattctcatgaggatttagagcatgctttttaatatacagttaaccccttgaacaatataggtttgaactgcatggatctacttatacgtggattttttttttttttcctacagtaggccctccatatctggcaagtttcacgtccacagccaaatgcagatctraaatactgtattcatagaatgcgaagcctgaggatgtggaggaccaattttttgtatctatgggttccacagggctaattgtgggtcctgagcatgcatggattttggtggagtgtcctggtaccaatctcctgtagktacccatggacgactgtatatgttttttcaggtggctgcctgttgttccaaaccagtttattgaagtgcctgtcttttctctctgacttgaggtgtatagcatgtctttatttggggttattagtggactttatcttcagttccttttttctgcatatatatatatatattattttttatatttcactctaagttctgggatacatgtgctgaatgtgcaggtttgttacataggtatacatgtgccatggtggttttctgcttatattttagaatgggcttttttggtttaaaaaaacattttggtattttattcattacattgcatgtatattttaactgagggaggcttgactgctctatgatgtttcctgttcatgaaggtggtgtatatttctacaagctcaagtgtccttttatgtcctttgggataatttaaaagtttttttgcttttttacatttttttgtttattcctagatatttggttccttttttgttgcattacaaataggcttttttcctcttctattatatactctagttgttttgtgtgtgtgtatgttattaattttgtatattaatcttatactctgatacacagtctctaactgtttgtggtgttattttagttaatttgtttttggttgtcatgtatgcagttatgtgatttgcagtgagtggcaattttatctcctcctttctcatttttatacctacaacgtttttcctaattgctttgtcttgtacttccaaaaatgttaaatgaatgttaaataatggtgttcttaatgacattcctgtcttgttctaaatttagtaataatgcctttagtatttccccaatagacgtgattatggctttgggctgagacagatgtatattttttctgttaagtgactagcattttaaatcaggaatgctgttggactttgtcaaatacctttttagcatctattgagatgattatatcagatttaacattaataaatctcacttaggtcatttttattaatatttatggttttttttttacttgatctgtcattgaaatgagagaagtaaattaaaatttatgttacagattcatttctctttctacttgtatctcccataatttctgctttacagatgttgctgctgtgctatttcgcatatagatgtttacaactattacactgtcattgtaaattgtgctgttagcttttgaaagagcccttttctttttgtcttattaaatgctttttggccccattccactttgtttagtaactaaagatgggtatcccccagcttttccattatttgcatttgctagtattattttatttattttttaatttccaacctgttggaattactatcttttataggtatatctcttgttttcagaatagagttgggttttactctgtgacctactatgaaaacttttaatagatcagttaaaccttttataattactgatataaattcttttataattactgatatagatgtatttagtcttgattttcatatttttttttcagtttttctaaatatattttactatgcaatctaggttttttgtttattttgaaaagtagttcttttcatatataggaagctttttttcttatattggtaatcactataattaaatcttatattcctcaatgtgtgtcattctacatactggcaggatactcatctttattaagatgctgtattatgttagtttcctgtacccacgtttgcaaggcagctcattggaggatcaactccatagctctttacagtcttgccccaacctaaccttccatctttatcttccaatgaggcactacatgaacttccatagccaggattcactactctcttcatccatagaaactactcgttgatccaacccatgcagtgctccctgcctttttttggccctgtctgtaaattttctctgtaatgctttctattagccttacagtatatgcatcatacatattatgtactttttatactagatcattaaaatctccctaagtgaattgtaggcccttgcaggacagaatgtatcttgaatttccttcaggccttagctggtgcagtgctttcatcttcataggttctcatctgaggactgccatgagcttgtggaagagtaggtagatatgttcttgatgagctgtatatgatagaattttcatcaatttgtagaagagaaaggtgagcagatgttcagtcctaaaggtgagcagatgttcagtcctgtaaggaaaaccttctagcggcattactttacaatggattgggttttcctgtaagctctctgtcatagcaagcgttcaattgtagggtaaatggccattctgccggggatgctgttaaggagaaagagaattgaaagggaaagagtattctaaaagtaggtaaactagggctcgcttcatctttgtaattctgaatacctatgattttgacctaaataaagcagaaaccatagaggatttatttatttaatatggggattgatgaattgacaaggataatatgataggaaattaaacaataatacacttactttatatataactgaataatctttgaagtttatgattctgttttttttttttttgttttttttaaagacagcactcactctgtcacccaggctagagtgcagtgctgcagtcatagtacaatgtaacctagaactcctgggctccaatgattttcctgcctcagcctcccaagaagctaggactacaggcatacaccactatgcccagttaattttttatgtttacagtgagagaggggtcttgctgtgctgactaggctggtctctaactcctggcctcaagatcctcctgcctctgcagtgctgggattataggcatgagccactgctcctggcctgattctattttccagtgctctttttacatctcatgatataaacaaaattaaaaattataatatatatttttatggctttcatgtttgatcatttcttagactactgaaagagtcctgttaagaagagggtcagccaggcgtggtggcagtgaacaatatgtttgtattagggttctctagaaaagcagaactaatagggtgtctgtgtgtgtgtgtgtgtgtgtgtgtgtgtgtgtgtgtgtgtgtaaaggggagtttattaaggagcattaactcacacaatcacagggttccacaataggctgtctgcaagctgaggagcaaggagagccagtctgagtgcgaaagctgaagtacttggagtctgatgtttgaggacaggaagcatccagcactggagaaggatgtaggctgggaagctaaaccagtctagctttttcacatttttctgcctgctttatgtcctggccatgctggcagctgattaaatagtgcccacccagattaggggtgggtctgcctttcccagcccactgactcagatgttaatctcctttggcaacaccatcacagacatacccaagattaatactttgcatccttcaagccaatcaagttgacactcagtgttaaccatcacaagtccaccccttatcaacttgaacccatatatatctcctgagatcatacataatctttaaataaagrcaatgataaagtcataattatgcctaacataatacaactatccttcgcacaacctgaaaggcaccaatccccaacccaaatactactacataaagttaacatacttaaatgctgatatgaagtcaataaatctcatgtcacgtgataaataaaatgaagatatttttctttacttttttttttctttttttgttttttgagatgaagtcttgctcgtcacccaggctggagtgcaatggcatgatcttggctcactgcagcctccgcttcctgggttcaaaggattctcctgcctcagcctcccaagtagctgggatcacaggtgcctgctaccacgcccagctaatttttgtatttttagtagagacagggtttccctatgttggccaggctggtcttgaactcccagcctcaggcaatccacctgccactgcctcccaaagtgctgggattacaggcatgagccgctgcacccggactttttttttttttttttgatagagtcttgctctgtcacccaggctggagtgcagaggcgcaatctcagttcactgcaacctccacctcccaggtttgagtcattctcctgcctcaccctcctgagtagctgggattacagttgcccaccaccacgcctggctaatttttgtatttttggtagagagagagtttcaccacgttggccaggctggtcttgaactcctgacttcagatgatctgcccwcctcagcctcccaaagtactggaattacaggcatgagccaccgcacctggcctgaagatattttcttagtacaagtgtatacatacatgcacaaacgtttttaacaaaaggaggaaatactcatgacagttacagtcctcatttctgcagctggccacatggtcgtaactggtattgatgactgccttgttctacccattctgtatttcctttgctttcagcaagcacctcagcaggttgtggttttttttcctggtggttgtgttttttttcctggtggagtgacccaaaccttcattcctgaagtgtctgggccatttgtagttctgcctggattgggctgttgtggttaatcacaaggcatagtaatactaagagacaccctaacagatctcctgtattccatgtatactcttccttacctctgttatggagtagtagactgattgcatcttcatagtctgggtcagtcaccccagccaacactgtacctcccttcttagcctgttggcttaaagataggaggagttcaaagtgtccagctggcaacctgaacttccagtttaatggaattgttgttgtgtcattcctccctctggaactaagacatctaggccagcagaacgtaatgttgtgggaacacaaagcaaaaattttgctagtggatcactaggggtgatggtgagtggtgccacttccaccccttgattactggatccatgaatcctggctatgggagaaatagtaccatatattggatgttgattcagagcatacatggccttctggagaactttgcccgagccctgcaaagtattgtcacctagttggcgttgtaattgtgacttcaaaaggcgattccatcgttctgtcaatccagctgcttcaggatgatggagaacatggtaacaccaatgaatttcatgagcatgagtccactgccacacttctttagttgtaaagtgagcgtctttgtcagaggcaatgctgtgtggaataccctgacagtggataaggcatgcctcgagtccacggatggtagtcttggcagaagcattgtgtgcaggttaggcaaacccatatctggagtaagtgtctattccagtgaggacaaacctctgccctttccatgatagaagaggtccagtataatcaacctgccaccaggtagctgrctgatcaccctgaggaaaggtgccttattgagggctcagtgttggtctctgctgctggcaaactgggcactcagcagtggccaaagccaggtcagccttggtgagtggaagtccatgttgctgagcccatgggtaacctccatccctgccaccatggccactttgttcatggggcccattgggcgatgacaggggtggctggggaaggaggcttagtggtgtccacagaatggatcatcctatccacttggttattaaaatcctcctctgccgaagtcacccgttggtgagcactcacatgggatacaaatatcttcacaatttttgaccactcaaagaagttcatccacatacctcttcccccaatttctttgtcaccaattttccaagtcactgaccatccccattggctacagcccatgaatcagtatataatcacatatctagccatttctccttccatgcaaagtgcacagccaggtacactgcttgaagttttgcccactgggaagatttcccttctccgctgtcctttacggatatcctagaaaggggctatggtgctgcagctgtccacttttgggtggtgcctgcatatcatgcagaaccatctgtgaaccaggccctagtcttctcttcctctgtcagctgatcatagggaactccccatgaggccattggtgcaggttggggaagagaaggcagggtggcaggagtggagaccatgggcatttgagccacttcctcatgtaacttatttgtgccttcaggacctgcttgagcccgatcgtgtatgtatcacttccatttgctgatggaatgctgctgtgcatgacccactttatggctagatgggtcagaaagcacccagttcatgataggcagttctggtctcatggtgacttgaagacctatagtcaaacattcagtttacaccaaagctcactaacaggccaagagctgtctctcaaaaggagagtagttatctgcagaagatggcagggccttgctccaaaatcctagaggcctccactgtgattcacctataggggcctgacaaaggctgcagacagcatccctatctgccactgagacctcaagcaccattggatctgctgggttatatggcccaagtggcagaacagcttgcacagcagcctggacctgttgcagagccgtcttctgttcttgactccactcaaaactcgcaaccttttgagtcactcgataaatgggctggagtaatacacccaaaagaggaatatgttgcctccaaaatccaaataggcccactaggtgttgtgcctgtttcttggttgtaggaggggccaaatgcagcaacttatcctttaccttagaaggaatatctcgacaggccccacaccactgaaaccctagaaattttactgagttagaacgtccctaaatttaagtcagatttatttctcatcctctggcatgcagatgtctcaccaagaagtcccgtgtgtctgctacttcttgctctctggatccagttaacataatgtcatcaatgtgatggaccagtgtgatatcttgtggaagtgaaaagcaatcagggtctctccgaataagattatgacacagagctggagagttgatatccccccaaggtaggacagtaaaggtatattgctggccttgccagctgaaggcaaatagcttctggtgggccttatggaaaggaatggagaaaaaagcatttgtcaaatcaatggctgcataccgggtaccgggagatgtgttaatttgttcaagtaatgaaaccacatctggtacagctgctgcagttggagttaccacttggttaagcttacgataatcctctgtcattctccaagatccatctatcttctgcacaggccagataggagagtagaatggggatgtgctgggaatcaccacccttgcgtctttcaagtccttgatggtgacactaatctctgcagtccctccaaggatgcgatattgtttttgacttaccatttttctaggtagaggcagctctaatggcttccatttggcttttcccaccatcatcgccctcaccctaccagtcagggagccaatgtgggggttctgccagctgctaagtgtgtctctgccaattaggcattctggcacctggaaaatgaccacaggatgagtccggggacccactggaccctctgtaagtcagacctgagctaaaagtccattaactacctgacctccataagcccctactttaactggaggaccacgatgacattttgggtcccctggaatcaacatcagctcagatccagtgtccagtagtccccaaaatgtctgattatttccctttctccaatgcacagttaccctggtaaaaggccagaggtctccttggggaaggatgggacaaagattcactgcataaattgttggtagtgtagtggggtccttcctcaaggggactcagcctccccttcattcaaggggttctgggtctataaactggctcaagtctggaaattgatcgaggggccatgattctcggtttataattcaaattagtcttttgtccattcgacctacaagttttttccttatataaattaagtaggaatgcagtaggcttcctatcaatttcactcctaggaacaccgtgattaattagccaatgctagagctctacatgagtcagaatattctgaatagtgttattcagtgtgataacccagcagtcttgaacgtttttggcaccaggcagtggttttgtggaagactgacgggggtggggaggatagtttcaggatgaaactgcggactagtactggtctgtagccttgggtttggggactcctgtgataacccactttggacatttggctctagcgaaatttaccttttcagaaagattaatccccaaaagtcttagctttgtaatgatggagtgtgttgaaaagcatggatcatggctttttaagggatttccaaaggagattttctctccaaaatattttgagcagtattgtttgaataagtgtataatagtctttagagcagtatttttggaactgcaaactgggatacattaatttgttgtattgggcttacattcaacattaattaaaaggataggaatagaaaatactactgtgcattgaatgtagtaaggataggtagttttgagaaacttttatttgtgtttctgtttcctggactgcagtgtaaagtgtatttcttgctgtggatcatggtcataaaaagtttgaaaagcctctgctgttagatgataacacacatttggatattaacttcttagaggttagtatatgtagtctcacctatgtagaatgtaattgaaaatttctgttgctgtgtatttgtcaaaaatgtgagaatgatttcttgtgaaacagtttttagtccagtaatgattttaatgtttatcttcaatggaagacaaattccactgaaagaaggcgtctccacatctctgctgaatcttagaacatcagaatcaaaagcagccttagattattagttcagcttatttatggacaaatagaactctgaggtcaggaggtagagaaatgcatgcctaaggttacattgtgagtggtagagctggtaccaaaacctaggtctcttgactcccaactcatagactgcagaaggtcaattgtagtttaatcataatctcaactaattctatgtaacagttataaaagcaagcttttatgagagttcatattcagaagaaaacaatgaccaattgtttagtttttttaaaaaaaacttgatcatgcattacttttaaaattctctttggctatagaatgtgaaattcttaatttgaattatgtaagcttatactctctttgaaaccgtacttgggaagttttgagtttgttacagggtacttatttttaaatcatctgcctcttgactgaaatgaactgttaccagatccaaatcaccacttaaaattgcttgaaatgtttgtcaactgcttcattaaagcccaaaggcagcatatattcagtgggcaattttgaagagtcagcatgaagttcaaacattaggaaattaaggacatcctatacctcattattttaattaatacatgttataaaaatctaaaattcagaaggattcaacgtttgaaggttgtggatgactcagggacttggaagattgcccttcttacctctaaggttgattgactgcctcaaaactccagaagatagagagttagagaactttttgtaatcccagcacttcgagaggcagagtgggcagatcacctgaggtcaggagtttgagaccagcctggccaacatggtgaaacctcgtctctactaaaaacaaaaaattagccagacgtggtggcgcacacttgtaatcccagctactcaggaggctgaggcaggagaatcgcttgaaccrgggaggcgaaggttgcagtgagccaagatcgctccattgcactccagcttggacaacaagagcaaaactctatctcaaaagaagaaaagagagagttagagaacttttttgttttttagttctgttttttagaaaaatgagttctcttcctttgtccctgcttgttggtcttttctctctacctcccaaatggttttgaggattaaagtaaacagtatattcctaattgtgccaatgcttacttcttctttctgtacctccatctcacagcaagtacaaaagtgaggacagacatgagcaaaggagatagattcctaaattcagatttccttttaacacaccaaggtcattctctgattagctttttggtaaaagtgcttagaaagctgaactactatgtggtagtaatgaagatcaaccttagtgacccttaatatataagaaagctttgagactgtcactgggagtattttagactaaatgaaagataaatctgtttgctttacaaagctaattcaaacagtatgtgtggcagatgggacagcattaaagattcttctaatgatcattaattaggataggcacctcaagaagtatatggcctctcaaggactacttctgattgatatttagaattaatttggttagaagtaacaatgtaatttttaaaacacagaggtttattttttttctggagacagagtttcactcttgttgcccaggctagagtgcaatggcgtgatctcagctcacagcaacttccacctcccgggttaaagtgattctcctgcttcagcatcccaagtagctgggattacaggcatccgcaaccacgcccagctaattttttgtatttttagtagagacagggtttcaccatgttggccaggttgctctcaaactcctgacctcatgtgatccccctgcctcagcctcccaaagtgctgggattacaggcgtgagctactgtgcctggccaaaaaatacagatctttaaagtcagtagtggattaatactttggatatatatagtaatggaatcattaggggatttggtaataaaaacatttttacccaagaatacgtacagtactctacttaagaataagaaactaggaagtctgagagtgattctggaactaagtgactgtggaaaataagtaagccaaggtttcactgaagacagtttttccttaaaggccatttactcacccaaaaacagtcagggccacatgtttagtaatgaaataaaggcattctttgacacataggagatattttcctcatactttggagtgtagaaatgtgtgtgccaatagcaacagctagtaaaagggctaaagaatgttatatgtttgctggatgtggtggcacatgcctgtagtcccagctacttgggaggctgaggtgggaggattgctagagcccaggaggtggaggtcgcagtgagccgagatcatgccactgcactccagcctaggtgacagaacaagaccttgtctcaaaaaaaaaaaaaaaaaaaccttatataatttaggagatactacaatctgttgagtataaactttgaaaaattgtgtaaaagtcaagtgaaaacattggtatttccaaagtttagtataccaatactatagctcacctgctatagtatattgcctgagtttctgagtttctgtccctgtctcacttctctgttcctcctttatctcccaaatacttgactccttgtgcttaactccttgtctcagagtctacttctggggggaggccaaatgaagataggctatcattgttttctgtaaaatttcctgtcatccgatatggcagcttgcatcctcatggtgtcattttacaagatgttcctctatagccaatgtttcttatacactagtttcttgggcttgattaaattgagatcatgttcaaattggttgttgttaagaatatttacaagtggtgctttctgtttcgtattgcatcccatcaagaagcagaatacttggttgttccacttttagtgatgttaaaagattgttcagtaacagtgtggatacattcattctgcactaaaattaattcaaagcttcatgaaaacccaggcaaaaacagagtactgacatacaagtaatctcatggtttaatgcccagcagttatcttctttagagaatatataatgactttgcaggaattatggatgacttttaaattaaaatatttgaatgagagaaccttctttctctcttttatttttaatgtgaaaatgaagtttgtaagattaatgtaaccatgtacaaattatgtttttcacagtgtctagcatgttgacactgtgatgactcagtgaaatatttgtggaaggagtgagtgaacaaaagatgtatgtaccaacatgtatgtagattctcttaaggtaactttctctcatcaagtttcctgggtaagaattacagtgcagcacaaagtagaatggtcacaattctcatcttgacttttcttccaattcccatgctttgttagtactgccattgctagaagtttgagttttagaagagcaaaatgtggtgattttaagagaataatttttttccgcacattgagaagttcacccccagctctgaaaaactttttataacaaaaatatactctttgaaggtcagagaaaaatacattgtctgttccaggtaaattagttaatctcatttttaaatacgctgaagaacgaaacacagataacatcagtttttaatggaaattcatgcatgatcaaataactaaaattcaagaaaaagtatgaattgcaacaaattttgtttctttttatttgtccatgattgtttttactggcagaatttgagattaaggatttgtattatctatatttgaactttttggaggtatggaatttgttttctcaagcatttctgcaccatattttgacttatttaacgaagaaatcttataattttttttttatttgaactgggtaattcatactattagaaataaatatatctattttgagatggagtctcactctgtcacccaggctggagtgcactggctcaatctcagctcactgcaacctccatttcctgggttcaagtgattttcctgcctcagctttccaagtagggagagacagccttagtaaatatctttgtacctatataattattaatgtctgaaagtagttttgtagagtattctaagaaatggatttgcacagtaagtagagcaggcacttacaaatatatatacagtacatataaatgcttcttttcttttttcttttttttggttggtttggtttttttcttttttttttttattgatcattcttgggtgtttctcgcagagggggatttggcagggtcataggacaataatggagggagggtcagcagataaacaagtgaacaaaggtctctggttttcctaggcagaggaccctgcggccttccgcagtgtttgtgtccctgggtacatgagattagggagtggtgatgactcttaaggagcatgctgccttcaagcatctgtttaacaaagcacatcttgcaccgcccttaatccatttaaccctgagtggacacagcacatgtttcagagagcacagggttgggggtaaggtcacagatccacaggatcccacggcagaagaatttttcttagtacagaacaaaatgaaaagactcccatgtctacttctttctacacagacacggcaaccatccgttttctcaatcttttccccacctttcccccctttccattccacaaaaacgccattgtcatcatggcccgttctcagtgagctgttgggtacacctcccagacggggcggctggccgggcagaggggctcctcacttcccagtaggggcggccgggcagaggcgcccctcacctcccggacggggcggctggccgggtggggggttgactcccccacctccctcccggacggggcggctggccgggtggggggctgacccccccacctccctcccggacggggcagccggccgggctgggggctgacccccccacctccctccccgacggggcggctggccgggcggggggctgaacccccacctccctcccggacggggcggctggccgggcagaggggctcctcacttcccagtaggggcggccgggcagaggcacctctcacctcccggacggggcggctggcccggcggctggccgggcagggggctgacccccccacctccctcccggacggggcggctggccgggcggggggctgacccccccacctccctcccggacggggcagctggccgggtagaggggctcctcacttcccagtaggggcggctgggcagaggcgcccctcaccttccgtacggggcggctggccgggcgcagggctgacccccctacctccctcccggacggggctgctggccggggagaggggctcctcacttcccagttggggcggctgggcagaggcgcccctcacctcctggatggggcagctggccgggcggggggctgactcccccacctccctcccggatggggcggctggccgggcgggggactgacccccccacctccctcccggacggggcggctggcctggcgggggctgacccccacctccctcccggacggggtggctgccgggcggagacgctcctcacttcccagacgrggtggttgccgggcggaggggctcctcacttctcaggcggggcggctgccgggcggaggggctcctcacttctcagacggggcggccaggcagagacgctccccacatctcagacgatgggcggctgggcagagacgctcctcacttcccagatgggatggcggccgggaagaggcgctcctcacttcctagatgggatggcggccgggcagagacgctcctcactttccagactgggcagccaggcagaggggctcctcaactcccagacgatgggcggccaggcagagacgctcctcacttcccagacggggtggcggccgggcagaggctgcaatctcagcactttgggaggccaaggcaggcggctgggaggtggaggttgtggcgagccgagatcacgccactgcactccagcctgggcaccattgagcactgagtgaaccagactccgtctgcaatcccggcacctcgggaggccgaggctggcggatcactcgcggttaggagctggagaccagcccggccaacacagcgaaaccccgtctccaccaaaaaaatacgaaaaccagtcaggcgcggcggcgcgcgcctgcagtcgcaggcactgggcaggctgaggcaggagaatcaggcagggaggttgcagtgagccgagatggcagcagtacagtccagcttccgctcggcatcagagggagactgtggaaagagagggagagggagaccgtggggagagggagagggagagggagagcgagagggagagcgagagcgagagcggttgtttggtttttttagagacaggctctcactctgtccagaaatcttataattcttctagtgtttctttataaatgcaggttggttctcacatgaccaagatgggttgcactgatgctataggaaggttgtactactgaacaatttaagggttaaagtggcttcccagtgttattctatacttagtcctatttttcccctctctttgaacttctagttcattatagtgcttctgggaatgtgaatagtgtgagatgtgccttgattgatacccaacttcaaggcccttatagttcctgtcagcctcagcttcttttctccagggacatttcaacatctcctgctccttgaagccaactggaaacctttatacttctcttatctgcgagcttaatgcgaaactgaaagcaagagtggactgattggagtcagggaagtggtccccagggaggagaagcagcctaggtctcagggcattgggacttcagatggtaggctgacttgtcaatctagattagaaatggaagataactgttgcctggtacattgcttgttttttgctataggagagacatagtttgtaaagaaagggctctgagaatctcccaacagaaaggcaagtcaatgaaagatttagcaaaaatacactaagctattacagcagaatgcctagcagatgtactgccaactgagaacagtaatgccacagggaaagaaacatcccttattgaagcttctattttatgacagtgatttcatgcagaaatatctgtttaagctgtttttttgagcagaagacagtatactttaaaaaattaacatctatgtacatctctgataggttacagattcattctacatttttctaaaagcacagcaatttgcatgtcaatgcattgtcacagatgagtcttacttgtacttgtgttcatatttgaggatcaaaaacattgtacagagtttaaaatgaatttacacgcttgctcctagagtaaaaaaaattgctttccaaaacagtattcctgaactttagtgtgcataggaatcaactgggcatcttactgaagtggagcttctcattcagtgggtctagagtggggcctagtattctctatttctcacaagctcctaggtgataccagcgtggcagtttcagagaccacactttaaatatcaaggttttaagatattgagctttaaataaacaaactcactagaaatacttcttgttttctaaactcatttactaagatattctaagaaaacacttgacacctagctaatgcgtctatgaattagaaatcttattaacaggagtaatgtttgataacctcttttacctgatgttttattagcctctagtcctgaaagtctcaaatcatttattttcatgactgaattaaaaaccttaaattatagcactgtacaagaagtgttgaatttttatccactaatgtaatataactcttcttctgttttgtggtaatttatggatgatttgctttattccaccatgcagctttattagggtataattgacaaaaattgtgtatatttatgatgtacaatgagatattttgatatatgtatacattgttaaatgattacatgaagctaattaccatatctgtcacctcacatacttatttttttttgttgtgagaatattatagactctcttaggaattttcaagtatatagtacagtcacgcatggcatgatgacggggatatgttctgagaaatgtgtcattaggcaattttgtcattgtgcaaacgtcatagaatatacttacacaaacctagatggtatagcctactacacatctgggctatatggaatagcctattactcttaggctacttgtatagtatgttaatgtactgaatattgtaggtaattgtaatacaatggtatttgtgtatctaaacgtagaaaagacacagtaaaaatatagtataaaagataaaaagttatacacatgtatagggcacttaacatgaatgaaacttgcaggactagaagttgctctgggtgagtcagtgagtgatgagtgaatgagaaggcctaagttattactgtaccttactgtagtctttataaacagtaaacttacgcaatactaaacgtattttaaaatatcttttttctttaatactaaattaactagcttactgtaactttttaactgtataaacgtttgactcttttgttataatatggaggttaaaataccaacacgttacatagctgtacaaaaacatctttctttataacctcattctgtttgcttgttttattaaaatatttttttctttttagcttttttgttgaaaaccaagacaaaaatacacacattagcctagacctacacagggtcaggattatcaagacatcaagaggctccaggaatttttcagcttcattataatcttatgggaccactgtcatatatgtagcctctcattaaccaaaacatttttatgcagtgtgactgtatgtgctgaagtgcctggaaatcgtaccaaagaacagctgggggaaccaactgttaagtagtgatgtagaggggtttctgcaataggtgggaagatcctttgtgagattccttctaagtctgtggatcatcaccaagtggtgtgctttttgctattatataattaaaaccaaattatagtatagactttatttttatttgataacctcagtttcctcaaacatgttaaaatgtttgttcgcaatttcaatttctggaccttttcctcctacttctcatatccaatatcgtctctctaaattcttagtgtgttaacatcatctacctattcatccatctaatcattcatttagtacatatttgaatgtttcttgtgtacaaacagggtacagtgatctgtgggatacaaaattgaataaggtggtctctactttcaaggtactccccgtctgttggaggaagtaagacaccagtgcaaataactaatttaaggatagaattaatttgtttcttaaagacagaataatatgttaacaccctatagaaagtgctcttggtgttcagagcagggagagatataaatttttaataaccatctaatggaagaaaacattctttccttgctgaagaagctcctgctattgaaagctagcctttcacttttattagtcttttaaatgaatttgggtatggtatttgccattttactggtatgcctttttatatgagatcccatcactaggctgaaatgttgtaatagttggtacagtaaatgcatggaggagttatctaatgaattatgagagatgattaaagatgccactctgctctgctttcttggcaagaaaatgagctaataarctggagagaatgaccaagttgtaaaatacttcctaagttcatatctgtatatttgtatatgttgtctaaatatttcatcattagagactatattcttcatgactattaagatctatgaaaatttccatgtaagtttttattttgtttttaacgtaaatttaaaagttttattcaagtctaaattgaaaacaaaaattaatgatccctatcaaaagctttatggtctggagtcatactttattttacttaagcactatagcatttgacacatgaagatgttttcccgggagaatcttgttgctgcccagggctgacaggaaaaaaaacaatttgtccgactagtggagcttactaacagttcaaataaacaacccgtctttcccttcatactgcatattaatagaaatgttaatgataagctaacaggaaactgcctcctttacaccctacagggagcagagattactgggtcagagagttttcttgctttgggccctcttaacaaacacaactgttagcaaaataccaatcttatcacttgcatatttattagcacagtatttttaaagtaatagttatctatttaatacagccaaattgatcattgcctcatttttgccattacttagcatgtaaatatttttgccatgtaagtatttcaaggtaaaatcaatttccctctctctctctcttttttttttttttttttgtgagacagggtcctgttctgtcatccaggctggagtgcagtggcacaatcatagctcactgcaaactcgaacttctgggttcaagtgatccagtggcctcagcctccccagtagctaggactacaggcatgtgccaccatgcctggctaattttttaagttttttgtagagacagggtcttgctatgttgcctaggcaggtcttaaacttctggcctcaaggggtcctcctgccttggcctcccaaagtgctgggattataggcatgagtcactgtgtccagctagtaaaaagctattaactttagattttaaacatatattctctctacatattttgatagatgataattaactcttcaaaaatatttcagaataaccaaaagagtggatttggagtgttcccaacacaaagaaatgatagatgtttgagtgatggctataccacttacccagatttgaggtagcgcacaccatgccgtatgcatttgtgccctcagtacctagtagacactgtaaatattattgaattatttaatgacttgacttcaataatgccaacttcattgttctatgataatatttttctgccttcttaagtttttctttagcacacaggtgtaaaatcttgctattaccaatattattgggttccacagttatctagaactggtcagatacttatgaagccaggatctgttattaagacattgataatgtagagtagaaaagatttcttacccatctctaggttcatatctgagactcctataataaaaggtagattaacaagagaaaagcatacaaatttatttaatataagttttacatgacatgggagccttcagaaattacaacccaaagaagtgggaaaaactttatttttattcataggttgatgtacagacatacgactggacaaagggggtatgatctaatagtaataaactggggaaactgttagtttagattcttcttggtatctctgtgtccgcagagattgggatattccttttctcagggtctagaggatacgtctcttagcggggtcttaagacctactttagagtaatgtcagagaattattttatgacctgttttagggaagaagggcaggagaaggtcagggagacctttttgcttctgctatttcctcaaatgccaatgtgccatattttggagtaatgtgttctaaaccccatcaatagtaactaatgactagtgagggaagtctgatctttctagttaatgtttgaggcactgaaaataatgaaattagttttataagtcaaatatttggagatttgcaattatttagcctacttttaggagagtataatttattggttgctaacagacatgatagttattggctacaccgttaatggtaatttaaaaataagacagtgttatccttaggcctttcctaagaacagaataaatatatatatttatatatatttctataaatatatatatttctataaatatayacgtttctataaatatatacgtttctataaatatatacgtttctataaatatatacgtttctataaatatatacatttctataaatatatatttatacatattttataaatatttatatatatatttatttatatattttgagacggagtcttgctctgttgcccaggctggagtgcagtggtgcaatctcagctcactgcaacctccacctcctgggttcaagtgattctcctgcctcagcctcccgagcagctgggactacgggcacctgccaccatgcccggctaatttttgtatttttagtagagacagggtttcaccatgttggccaggatggtctcgatcttttgacctcgttgtgatctgcccgccttggcctctcaaagtgctgggattacaggcatgagccaccatgcccagcccagaaatatttttaaaaattagttgggcttatgtatatactagcatcattgtatctctttatagcatttagattgaattgttggtgaattataaaagttttgagtctgtcataagtgctgaagtattcaggaaatgggtgggcaaaggaatagtcttcagcactttgatcagagcctgacattagttgtcattcagtaaaaagcaatgatttagtaagtgaatttccatacacaaactctatttcaaacaaaaatctcttcaggcagcaaacaccaagtcattgaagttggaaactaaaaataaaatacactaaattttactttttaaaataagtaaacatttgctagtttagtttaaaattttatattttctttgttttgtagatgggaggctaagattttctttgataaacttgaactttggatttcaggttcattaaagtgcaaaaacattcttattttctttttaatagcctctcatgtaacacattgttgtcaccaataagtgaaaattataccggaagggcttttggtttacaacttgcaaaagtctttcttgcattcttcattattttcttctgtcttagaaacatggcaggatagaatcagcagacttagctttggtttttatgtttatactttaaacactgataatctcacaaattttttcttgtggtgctataaagttcttgaaagtgttaatttgaaaagatatgtatattcccagttttcctaattccttagaagctattttgtatatttgcaagtatagaaagttttatttgaccaatttctaggtttgagaagctaatatttctcctatttcatttatctagtaaaagattagactagataataaagattcaattcaattgatgtataattttctaaggaacaagtggaatcacacatttatttttagacttcgcttttacgtatttgtcttttgtggacacatttattaatttctcattttttaaattttcaggtaacttgggtttttactcctgtaacaactgaaataacaagtcttgatacagagaatatagatgaaattttaagtaagtacctcaatatttttaaagtgtactctttcttctctatagagagttagtttatatatacaaaaaaaaaacccaataaaatctcagttagctagcacagatgaagagctggcattctgattaattccatgactttctgaattatcaaagcacttttggttacttttagtgttttttatttatttaacttgatatagataccattcttaacaattcacgaaatgttttgataagcctacttagagaccaatagttctcactgtgcagaactaaatgttaatgaccttaggacacagcctagacttttttttcttttttccctttaattagatcacctattctgatctcttttattgttattggtccagttaagctcagtactttttttattttttattttagagaaagggtcttgctttgtcacccagactggagtgcagtggcatgataatattatagctcacttcagccttgaccacctcctgggctcaagcaatcctctttcctcaaccttccaagttagctaggactacaggtgkgctccactgcacgtagctaattttaaatttttcttgtagagacatggtcttgctatgttgcccaggctggtcttgaattcctgacctcaagcagtcctctcatcttggcctcccaaagtgctgggtttacaggcatgaaccaccacacttggcctaataagttttttactgaatggtttgtttgctgacaatgtggttgtggatataattaacttgagagaaaccatttcttgttttttaaaaatagtaaaggaaaggtgaagatgtggttgatagaaaatcgtaacttaggagctttaagaaaatgtacagtgtgcataaatgatttctttttttaatcctccatctgacacatataatagaggcaaaaggagttacaacattcattgagtgtaatatattatgttcctggacctttaaatgctaaaagtctattcctgtcttatggagtctctttagaggagtggttccatraactttagcatgtatcagaaccacctggaacacttattaatatctatactgctaggaaactgctagacccctacctaaagatttgcatttcttaaggatttacatttctgtgagttcccaggtgatgttggtgtttctggtccaggaaccacagtttgtgaaccactgctttagagcgaataagcaagtatataaaaagtaacttgaaggtaaaaagggaagaaaggaattgaaactcacatgtcattctcacttctgtcatctttccaattctagaatatctttgtgttttattttcatgagtgcttgaggactttacgtttctctgaattagggataggcaaaaagcactacatctttctcatgtctttacatcttgatgtgcaaatgatgctgttatttttgtaggggggaataacttaaatggataggaattaaaaaactggcgtcttgtgcaacactattagttgtagattacttgttgcarctaggtggtatatgtgaggtttaaaaataacttagttatacaggtcttttctgtgatgtgggattttatttgcagaactaattctcagttattcatgaatatggaagatcaaaaaataaaatacagatcattccactttactttttatgatsgtagcttacttgccttatctggactttatttcacatttgctttaaattcatttaagatgcaacgaaggaagcccggtgtgatggctcatgcctgtaatcccagcactttggaaggttaaggtgggaggttgcttgaggccaggagttcgagaccagcctgggcaatataaccagatcctgtctctacaaaaaaatacaaaaattagccaggtgtggtggtgtttgcctgtagtcctagctacttgggagggtgaagtgggaggatcacgtcaacccaggagtttgaggctgcactgggttttgatcatgccactgcactctagcctgggcaatagagtgagacccagtctccataaaataaaagatacagtgaacttataaagataaagcatacagagaaaagagacaaagtttcccataaattatataagctgtccatgactctaggtttctgagtgagagataatagttactgtgtttttttaagtggacccttatattggacaaagatcataatgaaactgtatgtttaattatgtcaaaattattacaaatatcttatttggttttgtctttcaatttcagacaatgctgatgttgctttagtaaatttttatgctgactggtaagtaatcttattgtttgggtttggttttgtttttacttgctaaaggttaatttttctttgctagaaaggggaagggaaggctttttctatttcaagrcagtattccatacataaagtcaattaagtttcatccacaagggaagtagtttaatttggtaaggatttctgttttaagaaagaaatagagctgattctgttatcttatatcttaaaacaagtaacatataactcaaatatgactctctccacccccgactcaaagggaacacatattgcaattccgtatttgtcctgactgtggaagaagggtagtgtttataagtcatgatttgggtatgtcaagtttagaaggaaaaataatgttgacatttttaaatttatagaatctgctgcctctgtcttttgtgtttatacagtaccctatgtaccactttctttttcttactaaatgttttgtcttttcttgtttgtgccctagcaaacaaactttgagggcagagataatggcatactcagtattcccagcatctagaacaacatggtatatagtagatgttacmgaatatggcatggagataggaagaagggagattcagctggaaagattctgaaacacaagggagatttagctggaaagattcagcatagtctttatccctagacactctgtatcttatctgaccctttaaggcttactacctactggctgtcactaccatactccaggccacagtcctgtcatttacttaaaattcatgctacagtctcctcatttcttttctgtgcctctagtcttacgtatctccattctgttctctacaatgtaagccagagttatctttcttacagtgtaaataagattagtttataccccttcttaaagcccttaaaatgtttccattacctttgggttaaagtttaaatcctttactttgacccagaaggccccttatgaactggtctcttattccctctgtagctgttatgtctggcctctctccacttccacattctgctccagttatactaaacttctttcaattcctataaaattctgtatttcatcactggactgtgaggcatgatatttcccctgcctggatggatcattcttctgtcgcccacttctttacttagttaagttctaatctttcaagtcttagattagatgccattttcttcaggttatcttcctggatcaatacacctacccctactcttgactctgattaggagcccttctgttatttccggtaacacccatacttacccaatcataacacttgtaggctataatcctagttggtgactctctactacattgtttgctctgtgagaatacataccatagttttattttcaactttaatccccaagcactttgcttaaaatgtggctgataagtacataatgtctactgaatgaatgtatatatggtatgattatttaaagaactttagtaaaaagttgaagatacacagagaaaatgctgtttataaaatatgtctcaaaggtagcatttttcaaagtaaattagggttgtcaagatgtattaatagccaaaaaatttggtagaagattatgtagtccaatccattttaaaataagaaaactgagatccaggggattgaagtactttcccaaggttacccaactagatgatgtctgaagaaaaactagaacgactttctcctgactgagagattttgtgtgttgcaagaaagggtaatagaatgtgctgctgatcttttgaaaaaactgaattggaaacatggactgagttatttgggaaaacattacctaaagaataccttaagttgttgatgaattaatactcttttatatggctgaaaaagcttgggtaattggctgtaagacatagacttaatactatgtggcctcaaagtctagactctgagttcattctggaagttatggatgtggcacagtttaataattctgtaatagaggtgcttaaaaatactgcagctccttgagtaatactgtagtaggtggttaataatgctgttttgtgccagactattttttaaaaattacctaatatttatgggaacatagtaggtatatatatttatggggcacatgagatattttgatagaggtgtacaaagtaggataatcacatggctgggcacagtggctcacgcctgtaatcccagcactttggaaggccgaggcgggcaggtcacctgaggtcaggagttccagactagcctgacgaacatggtgaaaccccrtctttrctaaaaatacaaaaaattagccggacgtggcaggcacctgtaatcccagctacttgggaggctgaggcaggagaattgcttgaagccagcaggcggaggttgcggtgagctgagatcacacggttgcactccagcctgagtgacagagcgagactccgtctcaaacaaaaacaaaaacaaacaaaaaaaacacacatcagggtaaatggagtattcattaattcaaggattcatcatttttgttacaaacattccagttttactcttttagttatttaaaaatgtacaatacatttctgtttagtcatcctgctagatcttattcattctaactatatttttgtactcattaaccatccccatccagactctttacataggttttttttaatgctcagaactactctgtaggtaggtattataatttccttttaggttgaggaattgaggctcagaagggtcatatggctagtaagtggtggaactgggatttaaattcaggtatgcctaactgcaaagcttatttttttctctaactagatcatattagtaagtgccctcaaaatgtctctgcaaagacttatctatttggtagatttgttaaggattgatttaagcactagatggaagattaggtttagatgacccttaggcccttttaatagatccattgcttttgtgatgttccttttataaatgtaacatttccatgtgtatggatacacatgtatgaaggtacagtaattatggaattgaacttttatttcattttcccttttcgtcttttggtacaggttgagtatcccttatctgaaatacttgagaccagaagtgtttcagtttttggattttttcagatttggtaatgtttgccttatacttactggttcaacatccctaaccccaaaaatacgaaatccaaaatgcttcaatgtgcatttcctttgagcatcttgtcagtgctcaaacagttttagattttgaagcattttgaatttttagattaggggcattcaacctgtattaagacaggtcctattttaaacatgaaccatgcttaaatacttaatgagtggcaaactggacaatctagagaaaagaagcccttgatgtgtttttttacgtcgcccttaagccataaagaggcttgcccgctctttcttcactaggtcagatctaaatttttcaagaaaccattaatcagcccctactccttgcctcccttgccctccagctaccttattttcagcgaactgtaagaacccacaaacctgcggtcctagccgctccagttcctccattctatcaatttattgatttaatacatatattgaatgtttattagaatacatagtcaaataagacacggtccatgatgtccacagaccccatcctcttatccctgatgggagagatttaagaatgctaaaagaggaaagagccacttgaaagcaagagattgaagatacagatgtgtctccttgatatattctaggacatctccttaggaagtcaggtgagtgggctagaagagatatatatatacaagaagaaatagggaggaagtataatgtttgcatcctttcacaggctttccaatatttttattgtattaaagctaatatgtatgaactaattacatgtggattaaactgttcactgacatcatttaagtaaatttggtggaaaagggctctggaagcaacagtagcaattgtagtttgtttacatattcttaatacttcttccgtaagagaatggccattctaacccagctggttgctaattctgattcttccccttcttattgggtccctttaattacctagaacatagtcatccatgacatgatgtttaggtcaatgacagaagtcccatatataataccgtatttttactgtaacttttctgtgtttagatacctgctattgtgttacagttgcctacagtatttagtatattaacatgtggtacaggtttgtagcctaggagcagtaggaggctgtataccctatagtgtaggtgcatgctaggctataccatctaggtttgtgtaagtatactttatgatgttcacgtaatgaagaaatcgcctaatggtgtatttctgagtgtatccctgtcgttaaacaccacatgactgtatttgtgaaatgtttggcttgattaagggacagttagaagtaacaagtttgtagaatattgtgggggtttgtgccttgtgtttaaagtaaaagaaaaaagaaaatatagacaggaagtcttggttaggaatttaagatatttgcttctggacttactgtatttagtatgtttacagatataaaagcccattttatcaaggggtaaattttgaggggaaatagttaattatataccatatattcttttaatataacttatttatttagtgtgttaacttgcctgtgagatttgatagaactagccaggtggagaggtctaatatttgcaatacagttaaaatattttacacaatagtctaaaattttattattttgaggtgggaggattgcttgagccctggaggtggagggtgcagtgagctcagattgtgcccctgccctccaacttgggcaacagaatgagaccctgtctcaaaaaaaattaaaaataaataaaatagagaaagctaatttttcataaatgttcaagcctcagtagttacaaatcctaacagtactttgtagagggcttatttcagacttgttttatgacctctgcaagagatccttagctgtgtgctccataatactggcaattgtcttaagatgaataaaaccaaaatctattatacattcttagaattggtatacagtctttgaacttaaaattgtcttcatctccattgaacgaygtcagggtccatgattaaattaagtgtgtgattatctcgcagagtcgtttattatgcctatatcaaatgtcagtgggcaataacggaaataagattttattacttctgcttttcatttctaattggcatccttctctgtgtataggtgtcgtttcagtcagatgttgcatccaatttttgaggaagcttccgatgtcattaaggaagaatttccaaatgaaaatcaagtagtgtttgccagagttgattgtgatcagcactgtaagtacctcaataggaagtctagaagagactgtcccatcccaaacacaggcacacatacacattttttcttttcttttcttttctttttttttccttttctttttttttttaaatgctctgcttttaagtggagaacaaaccgaaaaggttctagtgaccttggttaaattgttactatttaatttttatgtacttagaacactactttccattttgcttgtgtgaaggtttttttgttgttattttaaaaattacagtaggtcaagcgtagggaacaaaactagcagtgttttctaccaaagcaaataccaaaatcagtaaataagattgaaatgtagtattagaagaaaaaatggatttctgttagttttagaatcatgtgaaaataccatttatagtcatttcaaataagatagtctcagatttttgtgtgtttctgtttttgaaaagattctgttttgaaaagattctggtttagactatttttgagtctaattagctgtagcaactgattataattattaagagtgttaagaaacttagcttaggctcttaaaatccaacctcttgcattttgcttgtcctggtggagcattctctataaaatcctcatggtttttcgtatacatgaaggatttgtctaacttgaactagtgatcttgctagtggtgtttcctcctgtgtgttcccattatacttgaactttcctctctcatcgtgctaaactcattgtatttcgtagttctggttcattgtgtcttagttgtcttatcagctgcattgtctgttcattaaggcaggaatttttttttctttctttttttaatgctcacttttaagaggagaccaaaccacttattaatctctgtgtctcaagcatctgacagttgctgggagacagagactgctcacgaaaagctattgcattgagttatttgtaagttggtgtgaatacagaactgtctcccattcttcaagttttctatttttttatacttaacctactgattaaaattagtatgtgtgtacacacacctaacttttcattttactgatgaggaaatggatatgaagtggcttaatcaatgttacatagctcagtgtctggtaaagcccgaatttgaatcctgattttctgaccaaatgccttcatttgctcttttctgttcaaacattttggggagttattggtatagctttgcgctaggcagcaaggcattttccaatagtaaatcatttcacagtcttctgagccccaccccatatttctgtctgctgaaattcataactagatagggtgaagggagcaataaaaggttgtcagtacaggcatgggctacattttcacactgcttcccagatcttttctccgacctttcgctgacagagaacatgatgtttttggtgtgggttctcatttcaaatctttctattctttatgtatttaattagatgttacagtgcagataagacttcctacttttactgaatttgaaccataaaattggaaattatgctctaaagcttacattcattgggaagaaaatttaatacttatatccttgaaccataaatatcatttattccatcttttaaacagataacttttgaagaaaatctgacatcattgctagtaagctttctttttatgggrgcaaatagcacagttcagatgcttttcaatccaccagcaagttatctgaggtattatgcatattttgaggtattatgcatctctctgaatattttttctcttctatgtaattcttttaaagaaatgattgttatgaaacccttattgattaatgtatttacattttccacagtctctttagagattgtaagacaaactgtagttttgttaacctcttatgtgccaattagattgtagaggttttggactggaagaaccttaagaattctgtgttctaaagagaaatgccttttaggcagattattctgtggtcgaatttttttttttcctaaccatttaaacaactttaatttatatactgatatacgtatcagtgctttgaaaaatagattgttcaatcctaaagcagtttttaaaagagatttattgaggtataattgacatatgttacacaaatttaaattttataattttataggttttgatacatgtgtgtatccatgaaaccatcaccacaatcaagatattgagcatagctgtcatcctccaaaattttccttgtgcccctctgtgatccctgtctgtcccttctatacctcaccttcatcatccttaaggaccatctactttccatcactggagattggtttgcattttctagaattttatataagtgaatcatacagtatgaggttttttttgtctgggtttttttttttttctggacttagtatgtttattttgagattgtttcatgttgcatatattatttcttattatttagtggcattctattgtgtggctatataccacaatttgtttatctgttcacttcctgacagacatttgggttgtttcgacttgctggctattacaagtaaagctgttatgaacattcagatataaatctttatacaaataaggattacaaataaagctgttataaacattcagatataaatctttatacatatgttttcatttttcctgagcaaatacctagatgtgaaatgctaggtcatatggtaggtccatgtttaactttttaagaaactgccaaactattttccaaagtatttgttctattttatatacccactaatagtacatgagagttccagttgttccatattcttgtcaaaacttggagtggatagtctatttaattttacatattccaatatgtgtgaagtggtgtctccttgtggtttaatttgcatttttctaataattaatgacgttgagaatattcttacatgtttatatacattcatgtatctgtgatgatgtgtctgttcaaatattacacattttttattggattgtttattttcttattgaaatttgtttatttatttgtttgcgacagggtctcactgtctcgcccaggctgtagtgcagtggcacaatcttggctcactgcagtctcggaccttccaggccccagtggcctttccaccacagccccccaagtagcatgtgccaccacacccagctaatttaaaaaaatatttttagagacaggtctccttatgttgcccaggctggtctcaaactcctgggctaaagtgattgttcckcctcggcttctgaaagtgctgggattacaagcatgagccactgtgccctgccctctgagttttgagagttctttatatattgtgaatacaagtcttttttcacatatgtaatttgcaaatattttcgcccattctacccttgtatttttttaaaaaaattgtaacatatacataaaattactatcttaccattttaaattgtacaatttaatactgttaaatgtattcacattgttgtgcaaccagtctccagttcttcatcttgcaaaactgaagctctacacccgttaaacaacagcttcccattgcccattctccccagcccctggcaaccacttttctaccttctttttctacaaatgcgattactctgggtactccacataagtggaatcatacagtatctgtctttttgtgactggcatatttcacttagcataatgtccrcaaggctcattcgtgttgtagcatgcgtcagaatttccctactttttaaggctgaataatatttcgtggtatgtatataccacgatttgtttatcatccatcaagaacactggttgattctgccccttggctattgtgaataatggtgctatgaacatgagtgtactaatatctctttgagacctttaaagaaagttcccagtttttttttaatatatatccaggagtggaattgctagatcatatggtagtttttaattttttgaagaaacatcataccatctttcacagcagctgtatcattttacattttcattaggagtacctaagggttgcagtttctccacaccctcacctgcactcttattttctctttgttgttgtttttattttttttaaattttattattattatactttaagttttagggtacatgtgcacaacgtgcaggtttgttaacatatgtataaatgtgccatgttggtgtgctgcacccattaactcgtcatttagcattaggtatatctcctaatgctatccctcccccctccacccacccaactcctgggctcaagggatcctccyactcagcctcctgagtagctgggactacggtgtgtgtgactctgtgggctctattttctgtttttgttygtttgtttgtttatagcagccatactaatgggtgtgagatggtatctcattktgttggtttgcatttccctaataattagtgatgttcagtattttttcacatgcttattggtcatttgtatatcttccttggagaaatatttattcaactcctttgcccattttaaaatcaggttatttgggtttttgttgttgatgttgagttgtaggagttctttgtatattctagatattcacccctcatatatatgatttgcaaataaattctcctgttctataggttgccttttcactctgttaattgtgtcctttgagtcatagaaatttttgatggtaatgtggtctatcttatgtatttttacattggttgactgtgctttagatgttatatccaagatataattgcaatctaatgtcatgaagctttactctcctatgttttcttctaagagttttagagtgtttagagagtttaagagtgttaggtcttatattcaggtctttcatttattttgagttaatttttgtgtatggaacaaggtaagggcccaactttattattttgcatgtgtacttctaggttttccagcatcatttattgaagagcctgttctttccccattgaatggccttggcatcctcatcaaaaatcattttactatatatttgaggggttatttctggactctgtaccatggtctgtatgtctgttttatgccagttccacactttttgattactgtagtcttgcagtatgttttgaaatcaggaagtatgagacctccaacttgagtgtcttttgaagagaagatgttcttaatgttggtgcagtcttactgtcagtttttaaaatggattatagttttgatgttgtatctaagaagtctttgcctcacacaggatcacaaagattttctgctatgttttcttttataaatgtggtagtatgaaggtttatacttatgtctgtgatccatttggaattaatttttacatgtggcatagtgtatgaattggagttcaattgtttgcatatggttctggcattatttgttgaaaagactatcctttcttcactgtcattgcatcttgctgaaataaactgacactgtatgtgtgggtctatttttgttctgtctcttctatactgttgatctgtttgtgcttataccagtacttcgtagattactatagcttataaagagttttgaagtctggtcaggtaaagctttcaactttgtacttttttttcagagttgtttggcagttctggttgatttagatttccatttaacttttagaatcagcttgttaatttttaatgacaacataaaaggcgactgggattttaactggggttactttgaatcctcagggcaatttgtgggaaattgttattttaatgatactgattcttcgaatccatgaagattgtatatctctccatttatttaggcattttcagtttcttccagcaatgctttgtggtttttcagcctacatgtcttggatagctttatcagatttattcctaagtatttcttatttttttratgctattgtaaatgatactttaaactttatttctggaataattgtagatcatatgtagattatagttgcaaaaataatacagagaattcccttatattccttacctattttgccctaacatcaacatcttatattactatggcacatttggattttatttggattttatccctcttccacttaatatctttttgttgttgttgttctagagtatcacttttaggcataatgtcttcctggttacctttgatctatttgtttctcagtcttcattttttacaaccttgacagttttgagtaatattctttaagaattttgtagaatgtccttcattttgggcttgcctggtattttttttctcatgttttggtcatcttttgtgagatctctcagtaagtatttcttattttggggtgctgttataaatggcattgattgttaaattttaatttttagtttttttgttgctagtttatagaaataagattgattttttatattgaccctatatactaaaacttattagctccaataagttttataaatacagtccatagattttctacttagacaattaggttttttttgcaaattaaaagctttaattcttgtggtctgtatttccttacagtattctttccaaccaagtgtacctacttgttgctttaggattagtttttgttaggcagaagatctgtaagaagcttcctagcaaggacagaaggtggcctcagaatcaagatatcatcatgcccacgtatgtcttgtttgtatcaatcacctgtctggtattatgttagcctactctgtcctgcccttgagtactttagtctgtctgccttgcttccaactcactgcttcactgagaccttttatccaaagtcacagtattatttcttggaaaagttcctgtaaaaagtttctagtcaaattgcctgggaaaaaaccctactacttattgagtgcttacttgattttagacatgttctttcggatattttagttatctttaccacgacgcattacacctctagttaagtagtattattcatttaacaacaaaaaaatttatgcctaccttatgtaatgctatgtggaaggttctatagctacagcaatgaaccaaacacacccagaaaggcaagagagtacaatacacaatcgcaaattgtgatatctattctgacgggaaggtattgaatgctacaaaatgatgagtctgacttagtctgcagggatagggaagacgttttcgaggaaatgattaaaaaaagtgaaggaagagtaggaattttcaagtgaagtagtggaagaagagtgttttagatggaagtagcagtagatgtgaagtttctgaggtaggagagagcactgacctttcagagagttggactgtgttaccattttactgatgaagaggctgaaagatacagagaggctaagttatttcccaaggttgcatagtaaatggagggagccagactggaacccaggacgatacagcttttatcagttaactatgctayttgaaagtcaaaataaagtaatttaaattgaattccccatagaaatggagaattcgcccatttctgaataaaaacaacttaaaatgtcctattacagkttataaaatagtctgtttaaatagtctataatgggtcattatataaataaaaatgcaattgcaattttttggtaagtttgaaattttacaaatttttagaaacttggtattttaaaagtcctgaacctgtagtttgtcattgattaaggaaaaagctaggagcgccttacttccttggagtttttgaaaaagtatgtgtaagaagctagaaatctgcagtatacagagtattgtgatattgttaattgtaatttgcttattttcactgtaataaatgaccttcaacacaattattgaatttttaaaaactttctttgaataggcttttgccagcattttgaggaatgcttggagttgagctacttgatggcttctagaaactgacccacagttctctgtgtggttgtcctgagtttttcattttcattcatttaagaatttcgtttaatatgttcatactgttctgtccattaaaaaaaaaaagaatttcatttaatattctagcctatggaaacaactagtagtagcagcagcagcagtgatgttaataatgacaataataatgataaaatggctctatgagagtagagaccttatgtttttaccyttctattcctagcactggaatggtatctagcacatagtaggtgttcagttgtaattgttgaacagatggatagataaatgaatagtaaacagtaccagcacttatgaactgttttgtaggcactacagttatcattattttccaaaaatgaaataaatactgccatagtttatacccagtctaactcatcattgatcgtaaggcaaaattttatgtacaaaagaaaaaatgaactacaacacaaagctttcttatcagttatatttttaattcatatgtgataaacatttatgagatacagagtaatrtttgaatacatgtatataatgtttaatggttacatcaggataatcctctcttctagtactcaaaaatatacaataaattattattaactacagtcaccctacagtgctgtagaacaacactagaacttatttctcctgtctagaggtaatttatttttatctaacttttgtagatacatagtagggtgtatatttttatggattacaagaattttttttttttctgtttgagacagagtcttgctctgtctcccaggctggagtacagtggcgcgttctcagctcactgcaacttctgcctccagtggtcaagcgattcttgtgcctcagccacttgagtagctgggattacaggtgtgcgccaccacggccagctaatttttgtagatttagtagagacagggtctcaccatgttggccaggctggtctcgaactcctgacctcaagtgatccacccgcctcagcctcccaaagttctgggactacaggcgtgagccactgcgccaggccaaaagatattttgaagtccgtaatagtcacatcagggtatccatgacttcaagcatttatcctttgtctttaaaacgattgagatcgaatcatacggtttaagttatttttaaaagtacaattaaattagtttctactatagtcaccctgttgtgctagcaaatactatgtcttatttatcyttttttttttttttttttttttttttttttttgagacagagtctcgctctgttgcccaggctggagtgcagtggcgctatctcggctcactgcaagctccacctcctaggttcaggccattctcctgcctcagcctcctgagtagctgggactacaggtgcccgccaccatgcctggctaattttttgtatttttagtagagactgggtttcaccatgttagccaggatggtctcgatttcctgacctcatgattcgcccgcttcggcctcccaaagtgctgggattacaggcatgagccactgcgcccggcctattgattctttcaaactacttttttgtacccattcaccatccctccctgaccctcgactaccctttccaccctttggtaaccatccttctatgctctatctccatgagttcagttgttttaagttttagctcccacagttaagtgagaacatgcaatgttttcctgtgcctggcttatttcacttaacctagtaacctccagttccatccatgttgttgcaagtgacaggatctcattcttttttttatggattagtaatactccattatgtgtatgtaccacattttctctatccatttgtttgtcaatggacacttaggttgcttccaaatctagcctgttctgaatagtgctgcaatgaacatgggagtgcaaatgtctcttgcatatactgatttcctttcctttgggtgtatacctagcattgggatcatkggatcatatggtcrttctatttttactttttttgagtcacctccaaactgttctccatagcgattgtactaatatacattcctaccaacagtgcaagagggttctcttttcaccttatactcgtcagcatttgattgcctgtcttttgaatgaaagctatattaactggggtgagatagtatctcattgtagttttgatttgcatttctttgacgatcagtgatgttgtgcacgtttttatatacctgtttcccatttgtatgttttcatttgagaaatgtctattcaaatattttgcttattatttaatcagattattacatttttgagtatagagttgtttgagttccctatatattttcattattaatcccttgtcagatggatagttggcaaatattttctccagttatgtgggttgtcttttcactttgttgattgtttcctttgctgtgcgaaagctttttaacttgatgtgatcccatttgtccatttatttactttggttgcctgtgcctatcggagattgctcaagaagtctttgcccactccagtgtcctggagagtttccccaatgttttcttgtagtagtttcatagtttgaagtctgagatttaagtcgttaatccattttgatttgattttttgtgtatggcaagagataggggtctagtttcattcttctgcatatggatatccagttcttccagtaccatttattgaagagactgtcctttccccagtgtgtgttcttggaacctttgtcaaaaatgtgttcactgtagatatatggatttatttctggattttctgttgcactgatatatctgtctgttttttgtttgtttattgttgttgttgttgttgttgttttgagtcggaatcttgctctgtcgcggggctggagtgcagtggcgcaatctyggctcactgcaacctccacctcccaggttcaagtgattcttctgcctcagcctcccaagtaactgggactacaggcacgtgccaccatacccaactaattagtgtatttttggtagagatggggtttcaccatgttggccaggatggtctcgatctcttgatctcgtgatccaccagcctcagcctcccaaagtgttgagattacaggcgtgagccactgcgcctggcctgtgtctgttctttatgccagtatcatgctgttttggttataggttggtgcaaaagtaattgcgatttttgcccttttttttttatggcaaaaaaccgcaattacttttgtgccaacctaatactatacctctgtagtataatttgaagtcaggtgatgggattcctccagttttgttctttttgcttaagataactttggctattctgcgtcttttgtggttccatataaactttaggattgtttttctatttctgtgaagaatgtcattggtattttgatagggattgcattgaataggtagattgcttttggtagtaataacattttcacaatattgattcttccaatccataaacatagaatttctttcctttttttgtccctttcagtttcttccatcgatgttttataattatcattgtagagatctttcatttctttggttaattcctaggtattttattttatttgtagctattgtaaatgggattacatttttatttcttttttagattgttcactgttagcgtataaaaatgctactgatttttgtaagttgattttgtatcttgcaactttattgaatttgtttatcagttcttatagttttttagtggtctttaggtttttcaaaatataagatcatattatttacaaacaaggatattttgactttttcctttctaatttggattccctttatatctttctctcatctgactgctctagctacgacttccagtactatgttgaataatagtgacagtgggcatccttgtattccaaatcttagaggaaaggctttcagtttttccccattcagtatgatactagctgtgggtctattgtacatkgtcttcattaagttgagatatgttccttctctgcaagttccttgggggtgtttatcatgaaggaatgttgaattttatcaaatgctttttcagcatcaattgaaataatcatatgttttttatccttcattttcttgatataatgtatcacattgattgatctgcatatgttgaaccatcatccttacatcccagagataaatctcacttggtcatgattaatgatctttctaatgtactgttgaatttggtttgctggtattttgtggaggatttttgcatcaatatttattggcctgtagttttccttgtgtggatgtgcctttgtccggttttagtgtcaggataatactgttctcatagaataagtctggaagtattccctcctcctttgttttttggaatagtttgagtaggattggtatcagttcttccttaaatgtttgggaggattcagcagtgaaaccatcaggtcctgggctttttttttgccagaagctttcttattatggcttcgatctcattatttgttattggtcggttcaggttttggatttcttcatggctcaatcttggtaggttgtatgtgtctaggaatgtgtcagtttcttctagattttccaatttattggcaaatagttgcacacagtagctgctaatgatccttagaatttctgtggtatcagttgtgatgtctcctttttcatttctgatgttatttatttaggtcttcgctctttttttcatagtctggctaaaggtttgtcaattttgtaaaacttaccaaaaaaccaactttttgttacctgtgcttttgtattgtctttttcaattcaatttcatttatttctgtcctgatctttattatttcttttcttctactaattttgggtttggtttgatcttgcttttctaattctttaagaggtatcattaggttatttattggaagttttttcttattttttgatgtagccataaacttctctcttagttctacttttgctgaatcccataggttttggtatgttgtatttccattattatttgtttcaataaaattttcaatttccttcttaatttcttcattgaccactggtcattcaggagcatattaatttccatgtaattgtataatttctaagatttctcttgttatccatttctagttttattccattgtcatcagaggagatgcttgagataatttcaatttttttgaacgttttaagacttgttttgtaacctaacatgtggtctgtccttgagaatgagctttgtgatgaggaaaagaatgtgtattcggcagccattggatgaaatgttctgtaaatatctgttaggtccatttggtttatagtgcaggttaactgtgatgtttccttgttgattttctgtctggaagatctgtccaagactgaaagtagggtatttaagtctccagctattattgtgttggggtctctctttagctataataatacttgctttatatatctggatgttccagtgttgggtgcgtatatatttacattgtattacatgcattacatatgtatatgcattgtatttacatttgttatatcctcttgctgaattgacccatttgtcattatatgtgaccttctttgtctcttcttatagtttttgtcttgaaatctattttgtctgatataagtatagtgatcttgctcttttttggtttccattggcatggaatatctttttccatttctttattttcagtctatgtatgtctttagaggtagagtgtgttttttgtaagcaacagatctttgggtcttgtttttttttaaatccattacaccagtctgtgtcttttgattgaagagtttagttcatttatattcagtgttattattgataagtaaaggcatacgccttccattttgttatttcttttctcattgttttgtggtcttctcttccttctttccttccttgctgtcttccttttagtgaaggtgattttctctggtgatatgatttcatttctttttattttttatttatcagttgtatgtttgatttgaggttaccatgtggcttccagatactatcgtataactcattattttaagctgataacactgcataaacaaatgaacaagcaaaaagagaactaataaaaactgtacactttaacgtcatctccctgctttttaactttttgttgtttctgtttatatctctgtgtactttttgtcttgaaaagttgttggggttattattttttgattggtccctaatttagtctttttacttaaaagtagttgacacaccgcaattagtgttataatattttctgtttgtctgtgtactttctattttctgtgactttagtacgttcagatgatttcttattattaacgtctttttctttctcattaatatactcacgttaacgtttcttgtaggacacatctgatgttgatgaaatccctcaggttttgtttgtgtgggaaagtctttatttctctttcatatttgaaggatgtttttgccactataataatagtgggatgttatcccactattctgggataaaagtctttttccttcagcagtttgaatatatcatgctaccctcttctggcacgtaaggtttccactgaaaagtctgctgccagacctattggagttccattttatgttatttctttcttttctcttgctgctggttattcaggccaaagggctcttcagtaagcaggtgatgaatcctgtcgagtgggtccttcttttcaaagcagcaggttcccttccagcccaggatgtatctagaaatgtcatccaggagctagggcctggaaagggtgcttcacgactgtctggtgccctgtcttgctgtgactgagctggtatcccagatgcgagacaaagtcctcaacattcttccctctcctctccttgagcagaaggaaggggtctcttttggagtggtgagctatgcagtctggggttaacggaggggtgatgccagcagccccttaagccatcctggttggtgtctcagtaggtcatatatctgccygccatgtccattggctctgagtccagttcagccctaagacttgccaagaagttgcagttcttgtggcctacactgcctttcaagtttatttaggggcccagagcactgtggcacaaggtggtaatgtttgccagaactcaagttctgactgctgagatgggtgattttcctctggcttgggctagtttaaatactccctccatgtgtgggcgtcagctgagttctgttcaattttgctttctgctataacagggaagccctgagttcaaggcaatgtctcacaattgctgtgctctccttctcccaatcactgtttattgtactgtgcagctgctgccaggggatgagtgaggggtggtgttggtgattcaagacagttttttctaccttctcactgcctgtttcagtgaaacgaagttaaaactaggtagtgtgagtgttcacctgatttttggttcttatgaaggtgcttgttttgtgtagatagttgttaaattggtgtctttgcaggagggacaattggtggagctttctgtttcaccatcttgctccgcctctctctagaggtaattttttttaatctgttaagcaatctctccctatcctcccctccccactacccctcccaccctctaataaccacagttctactctctacttatatgagctcaactctcttagctccgacatatgaatgagaacatgcagtatttatttttctgtgcctggcttatttcacttaacataatgtcctctagttccatttatgttgccacraatgacaggatttcatccttttttgttcattttcaacttttattttagaatcgggggtacatgggggtatatgtgcaggattattacagtaaggcatattgcggtgttttgagatttggggtataactgcacctgtcaacctgctgtgagcagagtacccaataggtagctttttagtccttgccccacttgcttttgcctctctctagtagtccacagtgtctattgttctcatctttatgtccatgtatacctaatgttttgctcccatttaaaagtgagaacatgcagtattttgttttctgtttctgtgttagttcacttaggataatggcctccagctgcatccaggttgctgcaaaggacatgatttcattcttatatatgtggctgcatagtgtaccatggcatatatgtaccacattttctttttcagtctgccattgatggacacctgcagaggamatgattttgttgatttttatggctgcatagtaatcagttgtgtatatgtaccacattttctttatccagtccactgttgatggatacctaggttggttctgtggttttgctattgtgaatagtgctgcgaggaacatatgcatgcatgtgtccttttggtaggacaatttattttcctttgggtatatccccagtaatgggattgctgggttgaatggcagttcaactcttagttctttgtgaaatctccacactgctctccacagttggagtagtttactttcccatcaacagttgtttaagtgcctcattttctcttcagccttgccatcatctgttcttttttgactttttaacaaaagctattctgactggcatggggtggtatctcattgtggttttgatttgcatttctttgatgattagcgataataagcattttttcataygtttgttggctgcttgtatgtcgtcttttgaaaagtgtctgttcacatcctttgtccactttttgtttttttatttactttttgtttttatttttattcttatttttttaagacagagtttcggtcttgttgcccaggctggagtgcaatggcacaatcctggctcactgcagcctctgcctaccgggttcaagcaattctcctgcctcagcctcctaaatagctgggattacaggcacatgccaccatgccgggctaattttgtatttttagtagagatggcgtttcaccatgttgcctaggctggtcttgaacacctgacctcaggtgatccatccaccttggcctcccaaagtgctgggattacaggcctttgcctactttttaatggggttattcgtgttttgtttattgatttaataagttccttatagattctagatattagacctttgttgagtgcatcatttgcaaatattttcttccatactgtaggttgtttgtttgcttccttggtagtttttcttgcagttcagaggctctttagtttaattaggtcccacttaccagtttttgtttttgttgcagttgcttttggtgtcttagccataaattttttgccaaggccaatgatgagaaaggtatttcctaggttttcttataggatttttatagtctgatgtcatatgtttaagtctttaatctgtcttgacttaagttttgtatatgatgatatgtagaggtccagtttcattcttttgcatatggatagccagttattccaataccatttattgaatagagagtcttcttccattgcttatttttgttgattttgtagaagatcaggtggttgtaagtgtgtggctttatttctgagttctctattctgttcctttattctatgtgtctgtttttgtactggtatcttactgttctggttatcatagccttgtagtatagtttgaagtccagtaatacgatgcctctggctttgttctttttgcctaggtttgctttggctattgaggctcttttttggttctgtatgaatttacaatagttttttctaattctgtggaaatgaattgatatcgttaaaatggccatactgcccaaaacaatttacagattaatactattcctgtctttctctttttgactggctgggttgtatttctttttctttttctttgttttttgtttttttgttttttttaattaagtgaaagcaaattaattaggaaagcaagggaataaaagaaatggctgctgcataggcagagcagccgcaagggctgctggctggctatttttatggttacttctttattatatgctaaacaaagggtggattatttgagttttctaggaaagtggtgggcaattcctggaacttcctgccttttttagatcatgtaaggtaacttcctgacattgccgtgtcatttgtaaactgtcatggtgctgctgggagtgttttgttttttagcatgataatgcattatattaataattatcataatgagcactgaggatgaccagagttcactttcattgtcatcttggttttgttgggttttggccagcttctttactgcaacctgcaaggtttttgtgatctgtatcttgtgccaacctcctatctcatcctatgacttagaatgcctaacctcctgagaatgcagctcagtaagcctcagccttattttacccaacccctatgcaacatggagtcactctggtttgaacgcctctgacagagttgacctggttgagtggcctctggcatattttccctctctcttttacaagggaacccttaatcctaaggattgtagagggacaaagatccatattctgtaacttgagcttgaataggggcaatgatattcctgcctacctattagagtctcttgtattcagggtagagaggagctgagtcagaaagcattgatatgtcgagggccattcataactctgagttctaataaaagttgatatccatccctcttgcttctgagtaccagccagagatgactggttgattcacaggaataagcagagtcagtctcaatagcagaaaaaacctcaaaaacaactgatgagacaggtgtaccatagttctctctccagtcctcatttttactaaagataaatcatggtaagactgctttgctttattatacttggcctagttatttgtataaagtgcagcaagaataattatttttcacacaggctttcttaattggctttaatgggattttctttcatagaaggaatctcaggttagacttttttaaaaagttgagcccagccatgggtttgtatcctcaaatacctgtgagtttagtaaattcctttcctcttgaggtcccaagataacttggggctccttggcctatcagaaagtgacattctttacttaccacaggtcagaaaccatgtacagggactgtgtagacaaggtgtaaggccagttttctcaaggggcttttattggctctacaagtcaacgttgattccttaaaggaaagcacaccattctagtcaaagccttggtaaaataacaaatttttccaattgtgtcatgatgcaaaagaaaacattcttattgcacttatgcaaataattgtattgccataagttaagaatacttacaaatagtttccaaattctggagaaatcaggtagaaacaaatatgctccaaattttgttcacaggartatactttacttaattattaaaagctgttaatagctcaaaagaagagtttccttgattcttaaaaactaaacaaaggatcagcaacattttaagcaaaaagtcaaaaaagattatttttgtcctctattagttaggtccatgtggttaatacctgtcttgcttaatagtcacgaacatttcagctctccatgagtcctgaatgctttttcctctaaagtcagaatctccaaagatcagaaacctgcattcaagaatacctgttagagttctagagttgattataaaaccaccttctgaagaggatcaatacaagacaacattgtctgtggatgccaaaaagtcttaggacagccactattaaagccacaattgacaagttaattttgcttacttctgtgccatacaacaattttacatatcaattataattattaataacatagactaagtcatttcagagtaataggagtttcttataattttagaacacataccagtaacatatttatacaaatacggcccaaagaaagccaaataccatctcatatttggcaatgcttcttgtatgattttcataccaaataagccaaatatgtcattttttgactttaggggacctaatatctaaaagattaattaggtcagaaaagacataatttataacttgatttaagcacttattagttttaagccaatagatgctttttttacactacacacaacatatataaatacacagaagatctagtagttgtaagattttttacttcccagttttttaattggattactggcttcagggtggagccctggaggaacagggccagggaagtgtgcagtttctacagcctaataagcgggcatagctggaatgcaaaatagatcccccaaattaagggtcccatttttataccagatcctggatcccaaaaaaaagagggagccagcccatctcccatgggagtcttatctctcagtggggtgtgaggacattttcataccttctagggggccaagagcatgcttctctaatccaaaagtgcagagtcaagtattaaactataactgccattaagcatgcccaaaaatacatttcttaagtagttctctcataattcaaagtaatttctgataccttccaaagtcaaaaacgtcagataacataatgcaaaacagaacagaaccttagattttgagaggaatcttagctatttctaatttctagggtttcatgaggaaaacagaggtttttcccaaaacagggtctgtcgtgcctcctctgtttttcccagggaatcccaggctgttagagcttgaatatctgcttttaattaagctaacttttaaccatagcactcttaaaaaaaaacagttcttttaaatttcttattatctgactttagccaggccaaatgaccagtatttctgggttttgaactttaccaaaggtaacctccaaggtgctcagagaaaggaaaattcaagatggttcgtggagagggagggagtcaacaaatgataaaggtcttacagatatcaaaccagaaaggacttattccctaagccaggaattgaaccctcaacctgtgccaccattgtgaaaagacaaagccttagctactaagctacagcattggacagtttctattgctcttccctgaaggaggctagagcagtcagttttgagcttgcaaaggcttttaatggcttaagataattttttgagcaaactatgacatggaccccaaaactcctgttccctggatggcagagaccaacagaaagtactgacccattcttacaaggtcaagctcccaaagacatagaacaaaatgagaaggaaacttcagcatttttttttttcaggtacttgcagcaaagtctgtaattaaccagttttccaggctggcttgaacctgggcttatgggatcctaagcccgtgttctgtccataaaggtattcttctttatgacagagcaatgtagaaagacaaagttgcagcacaaagtacaccagattcgctacagtagccactctgcttagtatgcaatatggaattggcaaggttcaaacttgccctcagatgggccctgtcatctttaatccaacctctgctgtcatgtggtctcagggcacagaggataggaaagggagaaaagcattcattgcctgcagcaaggtggggaaggcaaggtgctcagggaggccagagaaagacctacttattgcagtgacactcaatcaaaagttcaggcggtcacttgtcagttgcaaaggggttttccaacagtctcaccagctttcaagtttccccttttggggagaaaaaaggctctccatgtccagtgatcctgtacatgcctaatcctgtcacccacagctgtcagcgaagagtacaaggcagattaatccaaagagaatagtggttaacwccccataatgccaaatccattcatagctgagaggaactttactgagkggggcctctaactccctaaattttaggaagtattctaaccatcctaagctgggccttgaacccaagttccaccagatgtccttgccttttattaagaggggcctttaacccactcttttttaggagacactctaactcccctcagttgggcctctaacccaatcccatcctttacccggataccccactacttacccagagttggccatttggtgctgcagtctgtttccttttgggttgggggtttcctcaatatcgtccctccatggttcaccaggaggatattaccagaaaggagtcctgatccagacccctagagaagattcttggatctcaagaaagaatttgatgtgaatccatagagtaaagtgaaagcaagtttattaggaaagtaagggaataaaagaatggctactccataggcagagcagccctgagttgtattttattgtgtatatgtaccacattttcttttttctttgtttttgagactgagtctcgctctgttgccaggctggagtgcagtggcatgatctcggcttactgcaacctctgccttctgggttcaagtgattctcccgcctcagcctcctgagtagctggaactacaggtgcgcaccaccacgcccggctaatttttgtatttttagtagagacggggtttcgccatgttggccaggatggtctcaatctcttgacctcatgatctgcccgcctcggtctcccaaagtgctgggattacaggcatgagccaccgcacccggccccacattttctttatccattcatctgttgatggccacttaggttgatttcatattttgactattgtaaatagtgctgcagtaaacacrgtggtgcagatatgtccttgctatactgatttccttttctttggataaatacacagtaatggaattgctagatcatgtggtagttctatttttaggttttgaggaacctccattttgtcttccatagtggctgtgctacgttactgtctcatcaacaacatgtgaatgtttccctttctccaaatcctctgcagtattaattattttcacatttttgttaatagccattctaactggggtgaaatgatatctcattgtggtttcgatttgtatgtaaccacatgattagtgaaactgacaattttttttcacatgctttttggccatttgtatgtcttttgagaaatgtttgttgagatgccatgtcctttttaaaataggattttgttgtcgttgttgttgcttgtatattctggatgttaatcccttatcagatgattagtttacagatatttccactaattctcaggttgcctcttcactctgttgagtgtttcccttgccctacagaagctttttagtttgataaaatcccatttgtctatttttgcttttttttttgcctgtgcatttaaagcagtatccataaaaatctttgcacagaccaatgtgctaaagcatttcccctatgttttcttctactggttttatagtttcgggtcttagatttatgtctttaatccatcttgagttgatttttgtttatggtgagagatagggacacttagaatttttttatacctattgtgaaaactattttagactcagaaatagattttaaaaattctgtcattattgtgtgtgccttaaaaggaaaataaatttgttcaagttattctgaaactagagtctgactcttgtgcatcatttctcaactgagtcgagttttttgtttttgtttttgtttttttacacagtattggcctccatgccattaagagtattggtaatgctctactctctctaggaatttcttccaagctgctaaaacccattctgcaagtattgatgctatcactttactatttgactaacctcagagtttattttttctgaattgaaatatatctctgctagttaagcaacttttcttcaaagttaccaaaatataagccaaaatgttaatagtggttttctccagtggtggttggaagtggttcttgttttcttctttgtaactgtctgctttccaaaatttcgaaacacacatagacacacatgtacacatgcatgtacatatgcacacaattaaaacatggccttgcttcaacttgcttcacatcttatcttctgcagtcttatcatttggggaattcaggagcgtaattcattattctccttggtggtcatgcttgctgccttgaatctagaaagtcccatcagtcagcccctggtgggaccaggttctctgctgacctccagtggccttaggctgtatggcactaagcaagaggcattcatatgcttgctggtcagtgcagaacagacccacacttgtgtttttaggaaagtactttgtaattgtccttgattaggtagcacatgcacccatatacctgagttactcttacctgtcttccagtgcaactcgaaccttacttattggaaattgagaagctttttataggaactatatataaatatcatagtaagaacaagaaaatatgaagtgaagactttatgtgcatagaacagaatttggatgagcagttaagcctgagttctgagtgaacttctaggctttgcttattagttttctgttgaggtattttgttttgttttttggggatgtttgtctttttggggtttttttgtttgttttgaggggtgcagtttgggaatgggaagaagtacataggcagcagtggtccttctcctggaaccagaagaacaataagactttcctgttgaaatgatctgcctctttgtattttctgccatggataaccattgcagggagagacgttgctgaaacgagtatgaggcaatttccccatttggaaccctgctgggtattagtgaggcaggcaggcaggacccatcaaggaaaagtaagtgaccattggagcaaaaatatatgctaattttccaatcagtgagctgttaaccttctgggatttataattcctctgacatccattttaacatttgatctatccagttaattttaaaaacccatttattataccccttaagtcattttttgttatattgtcaaagtgtcacattctaattatcttaaaatcacttttggccaaagcttgtaaaataaaaaaaaaagcattatgtctgagattactgatcaatgtaattttaaggtttttgcttcttaataattaaacgccactgcattatgcagcatacctgctgccaggatgttgtttgagaatgaagcaaatgaatatctaatcccataatagttttcaaatattttaaatctttttctctctgtaaccagaattttaaagcaacctaaagattgtaatgtttgttaatagactcttgtgatttttgccacaactattacagtactagtctccctggttctctactacttccaggtgaattttttgaaagcccagctctacagctcagtggctgcttatcacaacactggataaaattcaaactccatcagcttagtgcttaagaccctctagagtccgtctctaaccttatttattctactcctggtttatgcatacttgctgttagcacactactttctcattgcgccccctaattcatcaagtttagaaagttgaaagcattatattgtctcctatagtgcatcttgctgtccattttcatactgatacttaggacacaggtggaaaatatatgttttgtattagactagtttctttgcttctgagtccatctcatatcctctctgccagatcctttgggtattaaaaagtcttagggtattaaaaaagattacttgacttcttgttgacaaagtaggcaccagctaggctagtttacctttattaacattgaatattggacctaaatgaaacctactaggaatattttactttcacagggtttcatattattgaattttagtttaaaacatttttattattactgattttttgccagtatgaaagacaaaatgttatctgggagttttaatttgtaactttctgattacaactgaacatatgtaatagtttattggcaatctgtgtttctttcataaactgatagctttaactcacttatctttttggtagtctttttttagttcattctttttatattctgaatattaatcagttgtctctagtacatgtcacaagtacctttcttcctgtctgtcttaaaaattcgtgtttttcttttaatgtctagatgcttcctaatctttgtggcttcaaaatctggcaaatgtcttggctgcatgtggtcttgatacagggttgcaggtcctttccaaagtagacgttgtctcctaagtaccaggaggccataggagatttttcgtctttgtgacccaactccccaggtttgtatatcaccccagcactcagcagatgtcctctggagacatttctcttgcctatgcaggtataattctcagccctaaatctgcaactgcaggcttaatttccaaaacaaattacacaggaaacctataagaaagaaaatggctagtgatctttgcttaccttaggaatggttcttcctttcctggaatgtcagttcctttagtcttcattgttttcatgatttctggtatcttaaaaatatgatacaaagttttttctagttgttgcagtaggaccaacacatttttgcttcccactacaccctgcttgaaaatggaaatccatttgtagattcccttttggattttctgtgaactcaataaaaacacctgcaagtaatgacatttcttcctttacagtcttttattattattattattttgaccaagaactccaaatcagtattatatagaagtgatagcaggcatcttttttcttttttgatctcagcatgaaagctgttagtatatcaccatttcagttgtttgttatatcagcttttagtatatcacaagtcagttgtttatttaaatatcctttttttcaattaaggaagttctcttcctagtttgctaagagtgtttaagcatgaatgaatatagatttttatcaaatgtttttctgcttttgagagataacaaaatttgtctctttcattctgtcagtgttgtgatgtacattaattggttttcaaatatttatctaaactgaagtgctagactaaatccagctttattgtgatgtattatcctttgtatgtagtgctaagtttgttaatatttctattcaagttttgcatctatattcttgagtaagattaacaaatactttttttttctcataattttcttgtcaggattcccgtgaagattacgttgacctcaaaaactagttgggaagtgttccctgtttttgtattctctggaatagtttgtgtaaaattgccattattggctccttaaatgtttggtagaatttactggtgaagatgtgtgggaatggagttttctttgtggaaaggctttgaattagatttgggttctttaataattgtaggattattttttgagatggggtcttkctatgtttcccagtctagtcttgaactcctgggctcgagcaaacctcctgcctcaatcttaccatagccggggctatgggcatgtgtcactgtacctggcaataattttaggaccatttatatcttctgtttcttctagtgtcagttttgattagttatattttcatgggaattatgtgaatcatcaaacttattggaattaacttactgataatagctatcagtggaaggagcttagaagtatattttttgaaagagaacaacatgaggtcataccagtacttccaattcaaattatagggtttttacttaattactcagttttatatatgttttccttatgctgaaaatcttgattcttaatggcattagcatgattactcatgtgctttatctgtaatatatgtgtatgtatttaatttcaaaataacaatgacagtattaaattgttttaaaatttcattttgttttaatgttaaacatttccatggttccaaagtcaaaactataaaaccaaagtatagtcagggaattcatccctgacctctccattttctcccattggtgttttttttttgtgggtagaggagagacaactatataagcaaacatatatagacatgtaaatatgtgtgcatgtatatacatatgtatttatatttcttccccaagtttcttctccctatttcttacacaaaatatttgacctgtacacactcttctgcacctggcttttttttttttttaacttgtcttgaagattgctccttagcagcaaacagagatcttttttatttctttatattacagcctagtacttcattatatgggtaccatactttattcagccagtctcctattgatggacatttagagaaatagtaactttgttgttgttgttgttgttgttgttgttgttgttgttgttgagtcagggtttcactctgtcacccagtctggagtgcactggcacgatcttggttcactgcagcctcctcctcccaggttcaagagattctcgtgcctcagccaccagatagctgggattacaggcatgtgccaccatgcctggttaatttttgtatttttagtagagacaaggtcttgccatgttggccaggctggtctcaaactcctgacctcaagtgatccacccgcctcattctcccaaacttctgggattacaggcatgagcccctgggcctggccaaaatagtaacttttaaaaaggcattttccattctcaagactacaacactgtagtgtaggccattagaactatttgatctaattttttaaaactttttgtttatacatcatgcaaaaattcattttatggctaggcacagtggctcacaactgtaatcccagctttgggaggctgaggcgggaggattgcttgagctcaggagttcaagactgacctgggcaacatagtgagacctcatctctacaaaaaataattaaaaattaaaaaaatttaagattagccaggcatggtggcacacacctgttgtcccagctactctggaggctgaagtgggagaattgcttacgtctaggaagttaaggccgtggtgagctgtgatcgtgccactgtactccagcctgggtgacagagcaagaccctgtcttcaaaaaaaaaaaaaagaaatcaaagtttcttattttttttttttttatgatttctcaggttatttatcattgtaagtaggataagctcaagtctttgtggcttgtgctttattacaggtgtctctattttatttaaaagccttctacttgtttatggtaccactctctcatttctcaatttgtagtaccaatttaatctcattaaatccttgctcaggtaataggacccatcatctttatagcaccccaaagacatagtctctccttgtaatttatcaggttgaaaagggacatatagttgatatgtatctattatgcatctgcttcaaggaagtaccagctcctaaagcagacagattattgtctatgttaattatgtataaattaaaatgtcttcagatttctgtgatttgatgaataaagcattcttctcaatctcagtatgaccagttgttcccgttgtttattcatatttgtcttctgtttaaagaattttagtaatcatgatttctactttataaatccacatggaatttgccaaagtgctatataatcttagttacttcgtttgccaaagtgttatataatcttttcctccagccccccttctgagagctcatattccattttaacctctaatatatttttagtatttttgattgcctatgctagagagaataaagtacaaccttgactaaacaaaatattgtaagtacttttgcctcttcctggaccatgcaaagactttagaatatttaacataacttacctcccctccccagcttatatgctgctgtcaggtattttaatgtctgtcgaaccccataaggcattattgctgttttttgtagtcattattcatgtgccatgcttactgtggcgtctgttgtattatttaatttgatacttaagacaatcttatgtggtagaaatgattatccttatataatagatgagaactaaggcatggagagtttatgcagtttaccagttcacatggccagtaagtcgcaaattaggatttaaacccagtccagaacctggtctcttaaataatgtaaactcaagtcctgattattattatttttttctctctcactgaaaaacaatgacttgaaccaaaaagttctcactaagcaattgtaagatttttgaccattaggcaaacaggcttgccctgactacatatgagggtaaataattttttttcattcttttagctgacatagcccagagatacaggataagcaaatacccaaccctcaaattgtttcgtaatgggatgatgatgaagagagaatacaggggtcagcgatcagtgaaagcattggcagattacatcaggcaacaaaaaagtgaccccattcaagaaattcgggacttagcagaaatcaccactcttgatgtaagttgtaacttttgctagattaaacaaacattccctgattaatgtaaacaaattctaatgcaaacaaaaaatctggacattctcctatagtctattgcagtggatttgacatacgtatacttaatgagttgaatttttttgaattaatctcaaggcaaatscttatgttatactgaacttctggataaaagatatagcatgcagtaaagctgtactaatttgaattaattgagcacaaaggaaagcctcaattataaagaaatggaagttaaaagtcaagtatatacaaccagagcttctgtatttttcttgtggagagcttcagggtgtctgctctaattacttttgtatgagctctttttatgagttttaatgtcctcttaaatagcctcttcttaataataagtttagcacacccctttctttgtacactaggtagtgttttaaagataacaaacaacaaaagcaaaaacaattgagtttgggctttatcacaatcaccaatcatcactgtcaggtttgagatttgactttaccctacttgcaagctaagctaaccaattaccatttcatggattcttttagaagacacaagactgctgggtcagagacaaaggactttattgctcacatcacagcaagtagtgtgagcatgtttgcatttgtttccttgccctccaaatcctatggaggcaatacagagggctccccagatggatacctgcacatgcactgggttatgtcacaggaaagggacactgggcttggggaactcactatttcagagcaagcagtaaccctgctatttgtcctggctagaggcattacctcgtatttccgtgttgctcgctacaagcacaactctgagaaatggcctggataaaggatagtcagggtcttgcattttttggtgtacccagtaagatgggtaggagtgtgagagagccatggaggagtctctccaacagtcacaagttatgattgatacattgttttaacacattttagaattagtccccttacttaggaaaagattgtcactgatcaaatagttatctatttcttaagaattttgaacgctggaaggaaatgtttatgattgtatttattatagttaagattgttttcaacccaatgtaatctttaacagttttggactaggtgttaaaaactaaatatgcatttatagtcatacttcatttgaacartgactggacttgtttaggtactaagataacgggtaaatgaaataacatgtttataaaactatgtatgtttrcaaaataattgcatactttattttacagcgcagcaaaagaaatatcattggatattttgagcaaaaggactcggacaactatagagtttttgaacgagtagcgaatattttgcatgatgactgtgcctttctttctgcatttgggtaagtatcttatttaaaagtgtgttagtgggttggttggctgccatgttaaattgctgttgtatttggtcatttcctgaagatgatctttccaaaaatgatctcaatccttttaaaatcactaaacagtctttatacctgtctctgaattctttttaaggttttaaaagtctgtttttctttctgtagtattatctatttcagaatgtgggcaagagggaaaaaatggacaagttaacaattaactaattcatgcttttattcaactcatttactaactcttaccctatgtcagacaaaatgctaatctgtggggtaaccacagtgaaacaacacactgtctttcttgttaagaagcatgagttttatcgtcttcattcatctccatctctccaccacctttttttatagatcttccctgtctcaggggaacaattctttctaaggctaacctcttcactgatgtccttgtaactggtgtccttcaaactcctctggggctttgatccatcagttgttcctgcttgtgttttcaacctgacccttttcaagaactgctttccttttctgaaaacacgcttctttctttcctgacctgcctcttctcttaagctataatttcacctttctttttctttttatttttttcaaagattagtttatgcctggctaccttgattttcttaaattctaaccagtaaaaaacttaaccttttggaagctaactttcacctccattgctctaatgaaacttgtctctacacagtcacaaaatgacttcttaattaccaaatcgagtggccttttaaacatcttactccttttcaattcctctgaagggtgtgatgttcaactacctttttctttttttgctgtgtcaacacttacattgaatccccctggtttgctccctacctgtctgaattctgtgactttatctcccttttttttttctttttctcaagatggaatcatttttgtggttctgttcttgaccctctctcctcattggaggttatctcaaccatcctttgacttccatgcagtattatttctcttttcattggctcatgactattaggcttaactgtagtagctatcttgaatggagcctggatgtctggcacaatatatcctctccattttttgacctttattgtttgtccttgctttaatgcttttgtgagattttgtttgtatgttttattgtgcgcattatcagttttttgttttttaagcgattgaggtctcaccatgttgcccaggatggtcttgaactcctggcctcaagtgatcctcccacgtctgcctccaaaagtgctgggattataggcatgagccacagtgcccaacccatattcattaaatgctgcaagcacagtcctgcagcagagcctgaatctggaagtgcttctcccagatgtcatctcatcagaaagtccttgcctgataactttatttaaagtagcactaccattatttaatttgtcattctttacttattccacttattttcttcatagcatttttttgtaaccaccaaagataaatatatctacttgttagtctgtctctactcaccaaaatgtaaactccatgagagagagagttttgatagttttgttcactcccgtttatccaatgccaagaccatagctggtacaaaggaagcacatagtaaatagttattgaattaattaattaatggaacacatttttttctgttcccacggttatcaatctaggttagcaccccttgcctctatctcctggactactctagttagaaactagagataaatcagtgttcaattaatctaaaaattgattacaaaaataatttgttgtagtactctacaaatgtttattaagcaacttctgtgtgccagatactgtactaggttcaggaaacaacaatggacaaataaacaaaaaattacttatttatggaactatattttagtgatgtgggttatttcgtttttgtttttttttaattagtccatgtgaccaaaccaatgaccttgatccctagttgccrgaaaacagtctggggtcaaaaacaaccttttagtgcyaaaactcccaatctaaacttacacaaaacacaaaaacaactaactaaaattttcctttaaaaagtctgcctcatattaaacgttttctttaaatgtatrcttttcttggtattgcatagtcttgtaatagggaagatgatggataagtatatatttcaagtctgtaattcctacattgcaaaattctgtcattcaggtttattactatttctcccttcctatagggatgtttcaaaaccggaaagatatagtggcgacaacataatctacaaaccaccaggggtaagttgctatttcttaatgttgtatgataagatataatttaaatacatgcgtaagatgtagttttatatgtgttaatgttcatagactaatagaactttagaattgaaaggaagtttgaagcatcatcttgtgctgatctaaacccttcaaaatgaaggtgggaccacagaagcctaaagtcacacaggcattagagtagcagagctggcattagagtagcagagctggcattagagtagcagagctggcattagggatctcctgactctcaggccttttctatctctctggcattcagtctgggagccagatttttaaaatgctccagttgtctgtgattgtcacttctacccgtattgtactagccaaactcccaaatcttctggggtataaatttacttggtacctgccagataataaggagcagctaggttgtttttaacctgtggggtaagaagttttaagtagctgcttaggccctaccaggtgatggtagccataactaagaggcaaaaatcgtagcacatgttatcccaaattcaccaagcgtctgccattgcaattttttttacatacmaaaaaaaattgaaatttatggatattttttcaatttatagttttcattttaatgttgtttacagtgttttgacactgagatttttaatttttatgcagtcagataaatgaatttcttgcttagaaagttcatattctattttgaattcacataggtgtttgcttatattttttgcaagtacatttctttgagtagcttacttagtatcatcatctctagattatcagaatccagtacctatctctcagtggtagtgtggttgttcagagcatgggctctggtggtatcagactgggtttgaatgtcaaatgtgccaccttcttagtatgttactctgggaaagtttcttcgcttccccgcgcttcagtttcttaattagtaaaaacgggatgataaaaacagtacttgctttattgggatgttgggaagattaaatgaatcaacacatataaaatgttcacaaccatgcctagacccagtaagtttactgattaatattagctattatttttatcatcattttagacacttcatagataattgattttgagttaatgtagaaacagatatgtaggtaataaaagaaatagtcgtgccttacatccatatagcatcttgtatgtttcaaggctttttcactatccacattttcttctaaaagaagaaatttctaaaattttcagctcttaggaatagctaaattaattcatttggagaattcttttcacaatgccttcctgcctttggtgaagatactgataaagagttaattgacctaaatccaagaaaaagcaataggcttgggtgtcacaggttagattattagctccctggtaatcacagaattatctgctttttgycacccatggccctctttcttggaagttccatgatctatgtttcttttgtattaccagtagattttctgggttcatggatggatataagaatgtactttttagcctgggcaacataacaagaccccatctctgcataaaataaaataattagcttggcgtggtggcatgtacctgtagtcccagctactctggaggctgaggtaagagaattgcttgagcccaggaggtcaaggctgcagtgagccatgatcatgtcactgtactccagcctgggtgacagagtgagaccttgctttaaaaaatataaagaaaaaaaataagaatatacttttgccagcacaggttagatttaattttttttttctgttttgtaatagcattctgctccggatatggtgtacttgggagctatgacaaattttgatgtgacttacaattggattcaagataaatgtgttcctcttgtccgagaaataacatttgaaaatggagaggtatgggctttctactgtgcattgttactttaaattcaaatgtctgaaaccacaagcttcctccacctgtcttactatgttaacagagttatgaattgtaagaatcatatagtgaacataactatatcatagctgtttctgtaatatacaccagtgattcttcacctttgctatcccagaacccctctgttacatttccagtaatagtagtagttcactacagccttcaaaatgagtttgaaaatgcctttcaggtgattctgatacccatctgttggttgaggatccctgtttaggtggatgtcctttagaacaagggtccccataccctgggccgcagacctgtatcagtccacggcctgctaggaagagggctgcccagcgagagagcattacggcctgagctctgcctcctgtcagatcagtggcagcattagattgtcatacgaatgtgaaccctgttgtgaactgtgcatgtgagggatctagggtgcattctccttatgagaatctaactaatgcctgatgatctgaggtggaacagtttcatcccgaaatcatatcccccaccctgatcagtggaaaaattgtcttccatgaaaccagtccctggtgccaaaaaggtgggggactgctgctttaggagcaatgctttgcagattttagttacaattatttctatacaatgaataatcctttgccactagaagatttttctgttttttgtaaagcagttaatgttgtcttttccattataaataatgaaagcaggtagcagtgataggtaaccgacctcagtcatcccatgcatctgaaatcaagcccatcgaaattcttacaactcccaccaaaataaaacttaaaaacctaagaggctggaggaacaagtacaaagagttatgtctgtaaggacctctctcctttctttactttatgtaagacatatctttcattccaggtcttttgtttttaaaaccaatggcctaagaatgcaagtttttaaaaactttgtattaggtacagtttttaaaaactttgtgtatgcatatacacttcaaagaattgtaagtgtataaatcacagtttaaatatctggtcccccaaaattatcacagagtaaacatacccatataatcactacttagagtggtatggaccaaatatttgtgtgtcctaatattcatatgttgaaatcctaatccccaatgtgacagtattagggaatgaatcctccattcatgagatggagtcctcatgaatgggattagtgaactcataaaagagacctcagagagttatgtagctctctttctgccatgtgaggatacaatgagaagtaggcagtctgcagcctagaagacagctctcactagaactgaccatgctggcaccctgattttggatttccagcctccagaatgatgagaaatgaatttctgttaatttgtaagccacccagtttatggtactttaatatagcagcccaaactaagagagagggtggacaatttttttcaacaaagggtcagatagtaagtatgttagcctttgcagttcatataatctctgtggcagctactcagctttgcagttgtagcacaaaagtaaccttagacaatatgtaaacaaatgagcgtggctgtgtttcaataaagctctttctggacaaataattttcacatgctgtgaaatattaaatttttttcccaattatttaaaaatgtaaagaccagggccttgtgccatggctcacgcctgtaatcccagcactttgggaggccaaggtgggtgggtcacctgaggtcgggagttcgagaccagcctggctaactaacatggtgaaacccccgtctctactaaaaatgcaaaattagccaggcgtggtggcaggcgcctgtaatcccagctactcgggaggctgaggcaggagaatcacttgaatccaggaggcagaggttgcagtgagccaggatccaccactgcactccagcctgggcgacagagtgagaccccgtccctccaaaaaagaaaaacaaaaaacaaaaaacaactaaagaccaattttagcttgtggacctaacagaatcaggcagcaagtcagatttgacccatggctataatttgccaatccctgagctaagtcaagaaataaagtatttccaaaccccttgtcttccttctcagttattacccccacttaccatcttcataatcaccatacttattttcaataggactataggaagcttttcctgtttttgaacctaaaatggaatcatgtcttttgtgtctggcttctttcactcaactttatatttatggagttcattcatattgcatgaagctgtagttcattcattttcatgctgaatataattccctatataaatataacacaatatatccattctactattggtggacatttagactgcttccagattttgactaccgtgaataatgctgctatgaacattctttatctatgtctttggtgaatatatgcacagatttctactggatatatatacctatgaatagaattgctgagtcatagggcatatatacattcaattttagtggataccagtttttccaaagtggttttagcagtttacattcctaccagtagtatatcaaagttcacattgctccacgtccttacccacatttgataccagctatttacatttttaatctattttggtgtatgtgtagtagagtctcattgtggttttaatttatatttccctgatgatcagtgggattgagcactatcagttgccttttccggaaagacagatggtcgtagaagaaaagcagcttaaaatgccatgcttaatgttctgggtttccttctattccagtcttggcccataattctttttttttttttttcactcttagatgctttcaaaaagtgttttattattattattattattactctggtttttctaattttcccagtagtaagattagtccagattacatccattattactccagaatgcaatttttagcactatagcttaacctaattgtaatacaacaaaacctggagttcttaagaaagagtataatttcagatttgatgtcttctgttactaaggtgtatgtatattgttaagtgctttcagatttggagataatatatgtgaattctccaagattccctgaatctttccagaggcttccagctcttagatcttactatctctttctccctttcttggggaagagagagcaacacttaacttttgggactgaccattgtgagcaaaccagaatgctctttgccccctctttgtcttgagaatgcattcttggggtatttttgatctgcgtccattgccatttccaacacttagactgggatatataaggcaaaaagaaaacccaaggaactgagtactatttcttggatccttaagtccttagccagtctgctttcttttatttgcttctcagggccttatgtttgtttatataatgtccaggatttttagctgaacttcctgggagaaatagagaaaagtgtctacttcatctttctggaagcagaagtctatgccaacagcatttaaaaactctttaaaagacttttttttacctgatttaaacgttgcctttgcattttagtacataaaaataagttagtatttttatgtcagcatggtacatttttggtataccttttccaccataaaataatatttaattcttattaagcttgtagcaatttcaaatcaaatgtatgaatgtttgtatgagattctctgggtgtgtctgcttggacagatcattgcaaacctaaatcatcttacattggctctttgctgagtgtttcatagaaagaggattagtgctgccaggatccagtttaacatgtcagaataccccactgggacatcctacttgtttataatagctatttctcaaatcaaggttctaaaaatggcttctcatgaaatgtgattaatatatttttaagcctgcaagcttaaatatcataaacttatcaggctctattgcactagatatgcaatagatattgcaatagatatgcaaattcattgcatatcttaatgcaatgccatattttaaaatattttggaattttgaattatagaagacttttgagtgaaaattctaacacaagccttttcttggaaagtctcttttttttggtttgaagaagttgctttaccaaattttctagtttcttttgttcctgagattctttggttctacttccttttccccagttttttagaatttcggggagtatttctaatttgaaaatctgaaatgctccaaaatccaaaattttttgagcacctacatgacactcttggagcatttcagagttttagattagggatgctgcagcggtaagaataatgcaaatatttcaaaatccaaaacacttctgatcccaagcattttgaataagagatactcaacctttatttctatatgacagcttggcattttaagtccattcttagtgaccagagtatttttttattcagtaatgttctgttgcttttttcagtgttatttttgaacctgcttctcaaagtagtatttccctggattctgagtaattcatattgttaagatgcatcttgagtcattgtagttgttttatatgtagttttttgagatggtttgaataaatatgctcagattgggtgtctttctatctttaattatgtgtcattaccccccatgacacactggatgctcaggtacaggagttcaaatgtttggaccaaatagtggctttcaaaccatttttcattgtaaggcaaagtaagacattttcactagtatatacataattctcatttttcattgaataatacccttctatgtgcactgcactcaattttatattctcttcttttctttttaatactggatatatagattggacatagcatgcataatcttgtcttgcctccatctctttcctatcattaatagcattttaaggtagataagacatttcacagaattcaaaatactgctcctacaatttgagtgtttggccacaaggtgtcagtggtgtgtcatagttttatagtaccagaagcctagaagagattgggatttaagctccctctgctttttaatgcacattcatacttatgtttttttttaacttagaatttattaatagaatagttaagtacaagcaattgtaaagcagaccgtttgaagtcctttatatcaaactttaaggaagtaaacatttaaaaaatatttctttatatttgaattgttagtcttttccattttgatcttaaacttggttttgaaagagagggtggattagactttttctgctaacagtttataaaaatgaatgtcctggctttcttttttttgcttttctctttttttttttttttgagatggagtttcgctcttgtcgctcaggctggagtgcaatggtgcgatctcggctcactgtaacctctgccccccaggttcaagggattctcctgcctcagcctcctgagtagctgggattacaggcgcccaccaccacgcccaactaatatttgtaattttagtagagacaaggtttcaccatgttggtcaatctggtctcgaactctgacctcaggtgatccacccgcctcagactcccaaagtgctgggattacaggtgtgagccaccgtgcccagcctgtccctggttttcttacttctgtaggcctcaggtatgtttagttggattacttacaatttttaaaaaaatttgcattcactcatttagtcctcagaggcccaggaaaatttaagaatttgtcatgactatttgcctgctgtggtagttcttgcaggggtagtttttaaaaccagatttaaaggtatagacctggaaaatcttaaacagtgaaacggcatctcccttccccgtggttgttggcacatctaataattcttgagatttattatgttgtaagcaaccatttaaccatttaaccaa

SEQ ID NO: 93704 - DNA, 20211 bp, Homo sapiens
atctgccaggcacttggcaaacaggaggaaacaggtcagagcccggttctcagggagctcacgtgccagcggggatgagagagggcacagtcaccgcagagaatggtgtcttagtctgcttgggcttctatcacaaaataccacaaactggacagattagaaacaacagaaacttatttcccaccgttctggaggccagaaagtttgagatcaaggcgccagcagatttggtgtctagtgaaggctggtttcctggtttatggacagcgccttctggctgggtcctcacatggtgggaggggagaacaagctcccttgtacctcttttataaggcagaatccattcatgagggctccaccctcgtgacctaatcaccccccttcccaaaggccctacctcctaataccatcagtttgggggctaggatttcaacatatgactcttgggggaaaggaaacttttagactgcagcagatgggagagcatatgatgaaaggggcagcagagagtgtggggcctagagccggccaccagatgtagtgccaggaatcagggaagccttcctgcaggggcggggtgcttggtacttgtgctgagtcttgatgcttaaggagaagtcagccacatggccagcccattcctccctattctttgagcttggtagggagagagaatccatgcttttgttctctgccaggtcaggaaagcattttccaaatgatactttacaaaaaaacaaaaacaaaaaaactaaagagaaatcaaaatgaaactaaataatgatatacaaaagcacaaaatggccccatatctagagggccaattcctggatagacaggaggctggaggttgtatttataaggaaatgagttgcgtgagagaaggaggttgcccagagtacacagcaatggagatgagccaatctgggtctcctcccacagccataagtcctctttccccagccacaggtccccaaacccttaagagggtatatggcttctgccatgacacctgtgtcccatcccctttgcctggccaagtccatgcatcttgctttcttctggaagtctttgccaggtgagatgccccttccatgggctgagccagcaccctctgttggggaaggcccatggagaccctgtctcctacatctctgtagcttaatggtcaagggtctggcttgagccaggtgtctgacttcaagtatcccacttactagctgaaggaccttgggcaaacttttagcttcagtttcctcccccataaacgaggatgataatagtgtttacattatgctgttatggtgaaggtcagatgaattcattcattcaaagggctggaaagagtgctggcaccggtgaacacttgggagatgttagctgttccatgtactgcctcaggacccctgcacctgcacacactgagtgctcctacctgtttgctgaattttcccaatgggggaaataaaggcagtcacagcacagccttgggggtgggggctctggcttatgggttcccttctcgggcttcacatttatatagctaagaaggaccaggaccacacctgccctctctggtccctcctgaggaaatggtagggggatatcctcaaagcccccctcccaattttattcctataacagcctggcccagcccagccctgccatggaaggagccggcgatgtggtcacgacaggaccatatggggacctgccccttgctatttctcactattttgggccaatctgttgacatgacaaccaggcttttagaccctgccgcccagggctctgtttccatccttacgcttgcattctgcaaaacacagcctccattcaccagctgcctccgcgtttggaggggcagagtcacagattctgcaagaccccctccccttaacagctagagcaggcagcaggtaagacctcccaccagcatccctactcccaatatgcatgggaattggcagctcccctccccaaagcctgcaagccttaggcaagcactgagggaggccaggcgactacctcgaagctttgcatgaaaccccagggctgactcgccttccctagcaggagctgataaggcccacccctatgctgtgctcagtctccagatactcatattttaggaaatattaggtcaacaagggatcccaggggttgtctgggccaagcactgcattgtgaacccaagtggtgcagcttatctgagatctgcaggcccccacccgtcagcctaggattcaggccaccccaccaagattccatacatgttgctctaaaatagatggcaaaaaatgtgtgtgttctcctgcacaacagagcatacagaattttattcttatgctgggaactttgtgatcacaaacaacatgccagggacaacatgccagggacaacatgcatgggctgagtgcccactagggtggcaataacagcagccagaaataataataatggcactgaactcctgaagcttgctatgtggcagggaaaatcctgcacacttcacaagcatcatctcatgaagctgcatgtccacagcaacccccattttacagagttggaaacagaagctcaaagagtttacataaccaactccaggacacacagacagcaggagggaagctgggcttgaggccagcctgtctgtgcactcacccacaacctcatgaatcttggtggttggagggctcaaggatgaagtggcagcaagcatcactgccttcccagaatccccagagccacctggggtgagggcacaggtaaggaaatttccagcaatgcactcagagcaataagaaaaaatgctggggaggggaagggtagatgattgggaagagcagggaagagagtattcacttataagtaagctctttttattttatttattttcatttttatggagacagagtctcactctgtctcccaggctggagtgcagtggtgcaatctcggctcactgtaacctctgcctcccgggttcaagccaactctactgcctcagccttccaagtagctgggatttacatgtgtgcaccaccacctccggctaattttttgtatttttaatagagatggggtttcaccatgttgcccaggctggtcttgaactcctgagctcaggcaatccacccgccttggcctcccaaagtgctaggattacaggtgtgagccactgcgcccagcctacttataagcaagttctaggagctgtgccctaagctaggctcattcaatgacaacatccacctgaaaaatttctttcttagaagaggccagtgactagaactgaggaggccagagagacatcttggaggagcaggcttttgaaaaggaaggacaggagcgtcttcattttccacagttcaggaagtgcatcacctactctacaggtagaaagtatgagattcatacgccacacccattgcatcctccacactctctagaaacagggtgaacacaaaactacacagggagatctattgttaatatcgtgcataaagaagaaaacaaaggaattttgctaggaggctggcgggtgcagtcagctgaaataaataaattaaaatgcggcattgttgtctctgtgtacatttgttttaattactgtttactgaaaaactaaaacttcacataggaaagaagaagaaaaaaaaaatccccaaacgtgcgtaaccagtgtctgtacgacagatctaacttggggcgggtggggtgggactttcgtcttcagctgtcacagcagcacccaaccaggggtgcgcacacagcagatcaagcatctggaacgggcttccacatggctggcagacacttggacctaaaagctcatccagcgagcatgaacctggctacctaggaggcggcatcacacagcaacccagcctccaagcccacctacaggccacgtgagatgggcagaattttccctgttccatcacagtacaccacatgtcctctatatggttttcactctgtcttttattaacaagcctcttatagacataaatggctcccctgccccctacctccttagccctctgaagtagacctacctgaaggcaagaaccatgcctgtgccatctttcttgggcctggcactgagctcaggctgaccgggagacaagacgggcacccccagctgctgtatctgtggggaatggcagagaaggcctcattcctgggtgggatctttggtggccttgaaggtgaggactccaacctaggggcttcaaactcagttcctcaggaggcctcttgaagaaagactgacatggcatgaccctactgggcaaggctctgagtccccaccaccatttaaccagaagggttcccttctggagattttatatgtgggcttctagcacattttgttggaatggaaggttctgtagacaagcagaacaatgaacaccaggagactagagcagccccctgagggccttgccatagtggctgggcctcactccatcaccttgggtcctctcaacctgggacctgcaatggacataccaggcctgtttagcaaatgaacagagaaaacaaaacaaaacctctcaagaaaccaggggaatcttaaagtttcaacacagggtgaggggccagtgttttctcctgacctgatggaggttgaattacacatgaccttcaatcccaggctgagggggccacctctgtcctacggagcatgtggccccaggcccctcagacacagtatgcagtggtgctgacgggctctgagcagggcatgcgggtatacagtgacctgcccaaggaggcttaggtgtaaactcaggacacaaaacagacctggggaccccaccccgcatggcaccaggaggctttggccaagttgagaagagggggacagcacagtgtctgaattagaaggtgaggtaggaatgccagggagagatgggggtgggtacaaggcagtttgaggactgaccagcccggtctggctaaagcaggcagtaggagaaatgggcagagcaggagctccacagtattaatagaaactgcctggatgcagagagtgggaatgcgaagagtcaattaagaaaggggcaggcacgcgctggctaattgctgaagctgggggatgggctcatggaggcagcttatcctactctttctactgaggcatgcatctgaaatcatccatcataaaaagctcaagaaaaaataagaagaacaaggaagggctgtgcagccccccaaatctccccttttctcatttcaatgattccaggcacatctgcaggaaatatacaaccagaggcccaaatcacagctaagatgacaggcatcagggctgcaaagatggaacagctcctccttctctgctgggcagagcacttcttcccagggagtatttctagctgacctccccgctccaatagcatcaaccatcatctgtaggctgatgaccccaaatcccaacctccacctccctgaagctccagaccacacatctccacctgggtgacccacaggtccaaacctggactggccatcttcccctaaaatgtggtcagtgtcccagaaggcagaatacagatgtgactgggtgagagaggggctctagattctgactctgagaaacctgctttctctgcataagccttctgcataggcatggtgctcagcaagtgcccagtacaaagaagggctcagtaaacatcagctgtcaccatgactattgttatttgcattcatgttagtatcaacgttcacctctgcaggttccccaaggcagaaaactgggagccgtccaagactccatcgttgcgtggcccctcacacctagccagtctcaagtcccgtacgttctactcactgagtatccacggaaccgtgccagcctctgcaccgcaccgccacatgcgtgtgtctggcctcactgtggcaggtgactctgcttccaggcctgctacctcccctctgctggtcacctcccttcagagtgatctccctaaaatgaaaagcttatcatgtccctcactgatcaaaaggctttcatggccctctggtcccccggtgagcaccctattactgtgctttccaaggctcagctcacatgtcactttctgctccaaatcctccctgatcycagtaaacaggactgaccacttccaccctgtgccccactgacctcatacaaacttctacaacaataacagtgctgctcagactgtcataaaacacacaatttccaaacaaaacaaaacgtatcagaataccaatgtagattgtcaaattttattttctcaagtaaagacattaaaaaacaaaacatgggctgggtgcagtggttcacacctgtaatcccaacacttcgggaggccaaaaagggaagatcatttgaggccaggagtttgggaccagcctgggcaacacagcaagacctcrtctctacagaaaaatttgaaattagccgtgcatggcggtgcacatctgtagtcccagctacttgggaggctaaggcgggaggatcacttgagcctatgagttggagcctgcagtaagctatgaaaatgccactgcactccaacctggaggatgaagcgagaccctgtctcttaaaaaaagaaaataataaatgaaatamataaatcaataaacaaatcctaatgtctgctatcaccacaatttaattttttaaaggacataagaargaaggaggaggagggaagggaaggcaccatctcaaagtgaagggtgttctttaaaacaacaaagtyagctctgttaaaaacttacccttattttcctcagggcaccatggtctcttgaagctctgttaaggccagtatgggccaagggctggtcattgtgaatgtttmctggtttgttcccatctcccactggaagctgtgagtgactttcaggtgggcactgccaggctgagcctggagatgcaagtgtggggtagtggatgtcaagccccagctgcctgcgattgccaaagtcaagtacagcacaaacaatgtgaccacagggaagacccttagctgagttgctgagttggttttagaaagattttacttgaacggctctttattttttcattgttatttttttgagacagagtcttgctctgtcacacaggccggagtgcagtggtgtgatgacagctcactgcagcctcaccctcccgggctcaagcaatcctccctcctcagcctcctgagtagctgggaccacaggcttgcaccaccatgcctggttaattttttttttttttaattgttggtggccgggtgcggtggctcacgcttgtaatcccagcactttgggaggccgaggcagatggatcatgaggtcaggagtttgagaccagcctggccaacacagtgaaactccgtctctactaaaaatacgaaaatcagctgggcgtggtggcaggcacccgtaatcccagctacttggaaggctgaggcaggagaatcgcttgaacccgggaggcagagggtgcagtgagccgagatcgcaccactgggtgacagagctagactctgtctcaaaaaaaaaaaaaaatggtaaatgtctcattatattgcttaggctggtcttgaactcctgagctcaaatgatcctccctcctagacctcccaaagtgctgggattacaggcgcgagccactgcacccagcctacaactcctcattttaatatcgctcaggaagcacaccctgcaataacgatgatcataataatcctaaaacaaacctgcccaagcactagggaacaatttgaaattgttaattgattcagtgggaggggagaaaactggaggaaagagagtgcaagttctcacggagatgctcggtttctttttttagcaaactaccttgtgcctgtcacagtcttccctgaaacacccaaacattcactggattccacaacgtggggccatagtctgtactggagagtccagtatgctacaggcaggagcagacatggcctgggttcagctgtgtggccttaggcaagtcactttgcttctctgggccttccaatcctatctataaagtgtagtgattccttatctagctgtagggagggccggcagacacaggaaaacacaggctctggaaacacgaggacttggccacccccaagggactactgctggtattcttgttgttgctaagaagactgaatgctcagcaaatttggactaagagagaaatgggtttcatgtcaataaatacccccactctctctgccccgtctcctacagagcacctcatttcatttgccaaggcattccctgtttcagaaagataaacaagatccccaaaggctggaaatcattcttccagcaacttcctcattgtcctgttacaactaagatctgggtggacattctcaggcaaaggatttggtctggaacttttccactgtgtttcctcaatggccaaggttcattcatgctagagagaggaggaatttaatatcgctaattactttttagggagcagtttcatcctggaaattttgaaattgatttcttatccagtttccccttggttgatattattctctcaagatccttactgaaccttccaacaacacttcttttattctccttcatgctccagctctacgtttgctttttttgtcctccctcaagggcaaggatcayctctctgatttttgcctcccaccctgggcctggcacacaagtcaggctccaccagtgcactagagaaacaaagacacaaagatgtgattttcccwaagcatgctttctgcaactgcagctcagaaatctcaaacggttcaagataagaaactggcccaaagctgattaattttgcaaaacagaccttccagggtagcacacaagatcttcagaaagaatattctggttcttacttcccactgagagcttcagggaccataattagagcagcatggagcaacagactccgctctggttcactaaaccccaagaaccttcctaccaacatggacaaaaataacgtcccgttccatctgaaaatatcacctagaattcagatgtgtgctctctcattgtgttctgtgcatttttaagtagctctgtttggctgggttttgacagctggaagctgaggcttggagacccgcccgggcacagggtggtgcttttcaaagatgcagaccactgcgtcagaaccacctgggggcttggtaaaatgccgcttcccaagcgctattccagacctaccaaaccggaatctctagggctgctccatttttaatacacatccctgatgatccgggtacacactaaagtttgagacgccagctcattttcctgccaaggagcttygcttattcccccacccaacctcccacacacatccatttcatcggctttattgagcaacagtttctgcaggacaggacatccatgcagctctatggagtcacagactgcaggttcaccgaagttctcagtgtcttggtctctgctccaacatcgccctcacccttcctaaaatagccaccagccatcctttgggctccgaatgtttgcttttgttccagaagattgtgttgtcatgcttttcccttctacccacaacatgtagaaggctgggcagagtagggcctcagaaattgcttactgattgaccaacacctgcataaattggaacactcactggaagattggtccttacatatgcatttgtttttaatgctggctggatgctcatactaatagagacaacaatggtaatcataagaatcataatgctggtgagaaagatctttatataaggccctttctaggttacaaagatatgtcacacattttccccttgatagtcatctgtaacactcaaaacaaacattatcacacccactttactaatggcaaactgaggctcggagagattaagtggctttcctgaggactcacaactagttgtttgcggggctggtactccaatctagacccctcatctcccaggagtcaatcattctttccctgatccagtaaataatgactgagccctcatgatatgccattcaccacaccagagctaaggaccaagagccaaggctgacgtggtccctgccctcctggtctcccayccacatcacccctaatgacatggaagctgccatcagccaggagacaagatacgtacatggcaaggccaaaaggcagaacaagtcagggtgtgcccatgagacgaaaccagggcagcartgcccctctccttctgttgaggcctccacagggatgtacagtgcaacagcggagtagccatccccaggtcaggtttccaactgcacctgccctgccagtctcaggtgctgtgagccccagagcttggaggcaacaaggggagcacagctctcagcatgaacacggggattttcagaaagggtggagcaaggtggccttggtataagctgccattccccaggacggtactgcagatctgcagtgggccactcgccaccctgaggctaagcttgcatctgtatctcaggctacggactctcacctgccttacagagctactgtatgcccacatgaacgtgatggggaaacccacaagcccagcttgaggtcggcaatcaccgtgattcctcaggggcccacttccttttcttaatggatcttctaagggtctagggactgctgctgccatttggggctatggcaaggagtgcctctaggataccctgcacattcacatctttctttaactgaggcttcaaactgcgtgacataagcagactagtcatgagactccagcacatcacttaacctcgtagcatcccatttcttcacctgtaattcgggataatggaactgttctcctcgagttcatgtgaggattttttttattatactttaaattctagggtacatgtgcacaacgtggtctgttacatatgtatacatgtgccatgttggtgtgctgcacccgttaactcgtcatttacgttaggtatatctcctaatgctatccctcccccgtccctccaccccactacaggccccggtgtgtgatgttccccttcctgtgtccaagcattctcattgttcaattcccacctatgagtgagaacatgcggtgtttggttttttgtccttgctatagtttgctgagaatgatagcttccagcttcatccatgtccctaccaaagacatgaattcatcctttttgcggctgcatagtattccatggtgtatatgtgccacattttcttaatccagtgtatcattgagggacatttgggttggttccaagtctttgctattgtgaatagtgccgcagtaaacatacgtgtgcgtgtgtctttatagcagcatgatttataatcctttgggtatatacccagtaatgggatggctgggtcaaatggtatttctagttctagatccctgaggaatcgccacactgtcttccacaatggctgaactagtttacagtcccacctcatgtgaggatttaaagggtaaatacatacaaactgcttgtaataatgcctggcacatcagaagcactgtggtgtctattatcttttttttttctttttttttttttttgagatggagtctcactctgttgctcaggctggactgcaatggcacagtcttggctcaccgcaacctccacctcccaggttcaagcgattctcctgcctcagcctcccgagtagctgggattacaggcatgtgccaacatgcccggtcgattttgtatttttagtagagacaggatttctccatgttggtcaggctggtctcaaactcctgacctcaagtgatccgcccgcctcggccccccaaagtgctgggattacaggcatgagccaccgtgcctgacctattatcatttttttatgataactttccttttttaaaaaaaaagtacaaacagtgcgagagccactgctgctgaggagagaagcgtccacagcagcaccatgggaggtctgattgatccacatgaattcctaggcattcagacctaagaatcatcttcttcctgcttgcccgcggctccgcckgcatccaaaccgctgctcgccccatgtcgctcggtagctcaacagaagacccctgaaggctatgtgggatttgccaatctcccaaaccaagtatacagaaaatcagttaagagatctggttttgattcacgctatggtagtgggtggaacaatccaaagttttaatcaaagaaggtggtgttcagttgctgctcacaatagttgataccccaggatttggagatgcagtggataatagtaattgctggcagccttacaatcgactacattgataataaacttgaggactacgtaaatgcagaatcgcatgtgaacggacgtcagatgcctgataacggtgtagcgttgtttatacttcattgctccttcaggacatggacttaaaccattgaatattgagtttatgaagcgtttgcatgaaacagtatcatctcacttattgccacagaagacacactcacaccagaggaatgctaacagtttaaaaaacagataatgaaagaaacccaagaacataaaattaaaatatatgaatttctagaaacataataaagaagaaaataaacttgttaaaaagataaaggaccatttacctgttggtgtggtaggtagtaatactatcatcaaagttaatggcaaaatgatcagaggaaagcagcatccttggggtattgctgaagttgaaaatggtgaacactgtgattttacaattctaagaaatatgttgataagaacacacatgcaggacttgaaagaggttactaataatgtccactatgagaactacagaagcagaaaactggcagctgtgacttataatggaattgataacaacaagaataaagggcagctgaccaagagccctccggcacaaatggaagaagaaagaagggagcatgtagctaaaatgaagaagatggagctggagatggagcaggtgtttgagatgaaggtcaaagaaaaagttcaaaactgaagaactctgaagctgagctccagcggcaccatgagcaaatgaaaaggaatttggaagcacagcataaacaattagaggaaaaacgtcatcagttagaggatgagaaagcaaactgggaagctcaacaacgtattttagaacaacgaactcttcgagaaccttggaaaagaacaagaagaaaggaagatcttttaaactctctattgaccaccagttacgtattagttgccaatatgccagcttggacatcagtgtttgttggatccgtttgaccaatttgagccagttttatctataatgatggatttaagagcatgacacacattatttttgttgttgttgttcttgatggagattaagatgccgtcaattgtctagggtgttgtgtacttagaaagtaacagctctacttttcctactttttctttttctttttttattaaacagattatcttcagttgaatgcaagataacattttactgttgtataatcatgttctgacggtttgattgtttacaagatattccaaaataaaaggactctggaaggttttcattgaggataaaaggccataatatgatgcaaactatgcttctctatgataattataatacaaaggttccattcaatgcagtatatacaataatgtaatttagtctaacacagttgaccctatgttttgacacttccattgtttaaaaatacacatggaaaaaaaaccctatatgcttacagtgcacctagagcttttttataacaacttctttttgtttgttttggattctttaaatatatmttattctcatttagtgcactctttagccagaatctcattactacttcatttttgtaataacatttaatttagatagtgttcacatattggccctgctgaaatagaatatagcatctttcatatggtaggaaccaacaaggaaactttctttaactcctttttacactttatggtaagtagcagggggaaaatgcatttatagatcatttctaggcaaaattgtgaagctaatgaccaacctgtttctacctwtatgcagtctcttaattttactagaaatgggaatcacggcctcttgaagagaaaaaagtcaccattctgcatttagctgtaatcatatattgcatttctgtattttttgtttgtattgtaaaaaattcacataataaacgatgttgtgatataaaaaaatgtacaaacaacatgcatcagtggagaatctctgcaattgacatagaatcatttcttataaaaccattgttccatctcttacagactggcatcccagacagcctgaattctgcccccactcccccttccagcccctctgtcacccacctcaggtgccctacatcacagtcatcttgcagttggcatttcccaagcagaatttatcttttcccatttctgtgcctttgctcctcacctccctgcagtttctcgcacctcgaatgcccttacccttccatctatgaaatccaaagcatgcccatatttcaagtgaacgtcggggaggagtgggaatggtctcctgacatttcattgggtgatttttccacataacagagcacctaacccctcccagctataacccatctgggtgggctgagccctaagccctaagcaatgagtggcaaaactggttgaagggcagggctccaaggtgggtttttagcagtgagcaaggcatggttcaggggagatggtgctcagggcctccagctttcggccccctcagaagggtggggctgctgggagtggcctggggcagagctgggctccaggctccttgggtgccagtggcacagcccttacatcctcaaagtctttgtgatgccccgtctgctaccctactcagtttgtgtggacgctgagagctccaaacccaggctcagggccaggacactgggcagtggcactagtggttctgaagagggcttgccatcgaagcactgggaggctgtttccacaagccaaaagggcagaggggccatggccaagatcagaaacccagacacggaggctgcacttggcaatgaaggggacacagaagcacgtggatgtcaggggctgtggctcaccatgccccaaaccaaactcctgtcctccctgcgcccctctcccagatgcctcatttcagtgaacagcacccatcctccatccgccccgcctaggagggcagtgcagcctgccaagcgctccagaaactgctgcctggactcaactcccagttggtggcttcctggtggcgtgacagtgggcccatttaacctctctgagcctcagtttcctgcctataaagagaggatgacaatagtgcctatttcatgaggtttaaaatgagtcaacccatctggagcagtcaggacacagagcctggcccacagcctgcactacgtgagggctcacttctatagtcaggtccttagcactgcgctggctgaaaggcagcctgcaaaaatatgcatccatgccctaactcctggaactgtgaatgctgccttatatggtaaaagagggaatattaccttacatggcaaaaatgtgatttagtgaaggttcttgagaggaggagcttatcctgtaatattcaggtaggctataaatctcatgagtgaggcagaaatagactagacaggcagaagagagaagacaatgtgaccagggaggtagagattggaaccctgcagacccaagtcagggaatgccaacagtcaccaaaagcagggagaggcacaaaaggattggttttcccccagggcctccagagagaccctggccctgccaagaccttgatttcagacttctggcctctaggactgtgagaaaaaaaaaaaacgtgtgctgttttcagccaccctgtttgtggcaatttgttctggcagccacaggaagcaaatacaaggtgcctccttaatcccagttactcaggaagctgaggcaggagaattgcttgagcccgggaggcaaaggttgagtgagcagagattgcaccattgcactccagcctgggtgaaagaatgaggctctgtctcaaacaaaaacgaacaaacaaaaaaaacaaggtgcctccttgacatcgctctccccaccttccactgctttctcaagtctccctctgtccagggaggtcattcctccccgctgcctacagaaccaccatcctgtcctctcccaactgggctacttccacccaacaatgggctcctcagccccccggagataaagattgggataaagatcaatgccaccccctgcctcctgccctgtaaggccctctgtggcatggycgctgccatttccactgcctaccttgtcccttgctcaccctggtgtcttaggcttcactcacagtcccttgtagctgcatgtctccttcagcatggagccaccacacttactgtcaccccatcccatccctgccctaactatttcctacttgagcttctccaacaatgaaaactgctatggattccttcatcacatcccaagtgcacccgagtgaatgaatgaatgaatgaatgaatgaatgaatgaaattggaagattcctatatcccaggcctagctaactggacaaggtatgtaaacccaagccataggctagctgctgacccataaccttgtagacccaggaaaaatgagctggcaaggaagagattttctctcttgaaaatctggatttggaaatgttaagaaaacgagaaagtgctcttcagagcacacaccactttcttagaaaagcctccccaattctgggtaggttccccagccacgcacactcccaccaccgggtaccttgccctcgtggctgtggtcacactacatctgtctgcctcactagacctcacgttccatggcagccttgttcagcactgcttccctgatgcgcccaaggagtgaatgaatgaatgaatggcaattgaccgaggagccatgtgagttcatctcacaacacagctggaggctacaccaggagaatgattcattccagaatcaaggaggtggagaacaggcctgctcagtttctggttggtctatccaaacccatctttgaggctctatctgggccctgcccaggaagagagaagggaccacctgcagattgtccccagagtcagccagtctggagagaggacagccaattatatcccacgagtcttggctgcagagcctgtaactgttcagccagtagaagggccccctcaggcccagcatggcctgcacagctctgaggggctctcagaggcagagagcacagatgcagtgtgtttggttccagaggaaaggaccagaactaggatatgggggctggggcagaaagctgcagggagacaggcaccagctggagaataacggcatttttttcaaagccagggctatgcttggatgcaacagaaacgtggccggtcagccagccctggagctgtccaggtgttagatgctcacctgtgtgacaggctgaggagggattcaagcactagagggccccttctaacccagagagtctgcacttttgttctcactatcacagttatgtacattctaatgtgctgtcacagcctcatctgtttcctggagaatgtgacaagcactgttttatgaagaaagtaaacaaaagaatcccagccaaggtggtatcgcaaattaaattcacattttgaggtctcctcctccttgctgtaataaacacacagcaatgatagctgaaatacaaaaatagaaaatttaaagacatagcattactcaaaaataaaattctcaggggggaaaaaaccacaacatggtaagtggagatgaggctgcaggcttgatgggctctgagtgcaatacagacagaggtgcctggcattgagaattctctggggtaacagagactcatagcacgcccaagtaaaggcgggggccagagccacaatcaatgcaaaagagaactatagtcaagctcactatttgaagcaaagggttggagcagagcaggtagagaagggcttcctctgctctagaggaaagctgggatgaagttctaccaactgctacctgctgcctcagcccacaggaagctgcacgctctggatggcaggacaaggtggaaaactgtgacagatggaatgcaaacatggccagttattcaccccttcctatacccatagcctttggaatgactttgactctcctaccatcaaaaggtgagttggcacccatgaccaccagctgatgcctataattccaacaccttgggaggccaaggtgagaggatcacttgaagtcatgagttcgagaccagcctgggcaacataatgagacccaatctctataaacatttttaaaatttagccaggcatggtggtacacacctgtagtcccagctaatcaggaggctgaggcacaagaatcgcgtgagcccagtagattgcggttacagtgagccatgattgtaccactgcactccagccttggtgacggagcaagacactgtctcaggggaagaaaaaaaaaaaaaagggtggagtctactttctaccttttgaatctgggctggccttgtgacttgatgtggccaaaagaatatgataaaagcgagaggaagcctgttccaggcataggcctcaagagttaccagaaaaagacagtttctaaggagtcaataactggatggacagcagacatctcttcagtaacaagagacccaaaagacaaattctgcagggaagtaactgcatgcctggaattctgaactctgctaaagcagtattcaaaagtgagaggaaaacagagacattttaagacatccaaatattaagagcgttgaccatccttggcactcaccatatgcgctaagtacaacttgagaatgaactcagccagaagaaaagggaactcagaagaaggaatagggcacaaaaaacagtggcgagcaaaagcattaggaaaatgtgttagcaaagttaatgaactactaactgtaacacgaaaataataacaattaaaatttttggaaccaaaattctaggaaacaatgatagaacaggtattagtgggttgtgatgcatgattacaattctcatcagattcagtaaaggagaatgatattgaatagcaatagatttgagtagaaaaaaagaaattaatttaggatatatgctaaagtgttaaggatataaccacatcagcagaggaaaaagggggagtggcagaaggaacactcaaaataagagagtagaaatatatcactaatcacaataaatataaaccaattaaaaccacctattaaaagataaactaggctgggcgcggtggctcacgcctgtaatcccagcactttgggaggccaaggcaggtggatcacctgaagtcagaagttcgagaccagcctggtcaacatggtgaaatcccacctctactgataatacaaaaattagctgggcattgtggtgcacgcctgtaaatcccagctacttgggaagctgaggcaggagaattgcttgaccctgggaggcagaggttgaggtgagccgaggttgcgccaatgcactccagcctgggcaacaagattgaaacggtgtctcaaaaaaataaattaattaattaagtaaataaaagacaaattaaaatgagtaaaacaaaatgggttatagaatgttatatatagtatgatgtctacataaagcttaaaaatactatagattgtttatggacatgtacatctgcagtaagatataacaatagagatgagaaacatagaactaacttctagatagctgttgtttctgtggagggaagaagggggaaatgagaatggagaaggataaaaagatgctttggggagggagggagggagagagacagacatgcatgaagatcaaccctgcagaacttgatcacaaatggagactgtaaactcaattcatccaggagctggctctttttaacacaggtctcagtgatgctattgcccagaaacagactttcagggtatattaaccttccctctgcctgttgttctctcaacctggaacagcttctctgtcctgtagccttttcaataaaaatccttcatctccctctgttcagctgacacaccactctgatggatccttccatgagaagaaatgcccccactcagggacaacctcaggtcagccctgggctggctggccacctctgcctctctcactttataggc

SEQ ID NO: 93705 - DNA, 103014 bp, Homo sapiens
  misc_feature (1)...(103014): n = A,T,C or G
gagacgggttttccctgtgttagccaggatggtcttgatctcttgaccttgtgattcacccacctcagccttccaaagtgctgggattataggcatgagccagtgtccggctccttttttatatatttttaaaggcaatatagatttgaacacttgggcatgaaatcgtttttagtatactcccatatttttctgatctttgaattctctttagcattgccctattttccattcctaatgtttatttgagtcttttctctatttttcttgattcatctcaccagtggtttgcctacttcattaatcttttcaaagaatcaacttttggcttcgttgataatttctattgtattttttaaaattactctttaacttctgtttattttttccttttattctagtttctttaggattagcttgttgtccttttttaaagttggaagcacaattaattttcagcttttcttctttttcaatatgagcattttttacactttagcaatttcccacaaactttgatatgcagtatgattattcagttctaatggatgttgaaacaccaggactcaggggatgaaatatgaatataagttcatttattggaacaatactcattcaaacccactttgagaaccatttttttcttcatattcttgaaaggcaactaggaaaagtctcatgattcttctagtctctcttgataataaaaaaatcctggggtcacttctagccactaaaaagagacaaacaaaaagtcagtttggtaaagtccatgtaataaaaaaaattaagacttcaacacttgtttaaccttaaagacttcccctttcagagctcacacttggtacaggcaagtggttggcaggggaaaatgtgggggtgattgcttcttttatatgatttatgcctcaccttcctctcctactttctaagctgcttccaacttctttagggatgattcggaaaaagagacaaaaacaaggaacaagggccaggccaggatgtgcatgcttctttctagcaacctagatacagttaaccaggcactacattatgctattatcttggcttggagtttcttaggtaacgcagattgtatacattcaaatcctaaatttgagggcatagctgtggtttcaaaatttcagagggaattaagaataccccttcaaaaatcccatgccaaggcagacaaatccctcttcatcctccttcttttctgctatccagacttttttcttctagctcaccatttcactaaggatgttacctttcaagctttctgatttcaaatgggaggctcagtttcaatgtgggaacttgtgggagcttaagaccatgtcttctgctcccacaagcctgtgaaaattcagacctttttgtaactgagccagacaaatgtgtccaggaaaggagtggtataagtgccatcttaataactagttttcagttccttccttatttttgatctatgagtatttcacgtacttcttgaaagctcagctatgcattgagatttttttatttttaaaattttatagattcagagggtacagtacaggtttgttacatgggtatattgcataatggtgaggtttgcacttctagtgtacctgtcactcagagtgaaagttgttcccaacagataatttttcaaccctcacctctctcccatcctacccacttttggagtcctctgtgtctattatttccttctgcatgtccatatgtatctattagttagcgcccacttttaagtgaaaacacgtggtatttgattttctgtttctgagtcatttcacttaggataatggcctccagctccatccatgttgctgcaaaagacctgattgtattctttttttttttatggctgcaatatattccatggtgtttatataccacattttctttatccagtcatctcttgatagacacttagatcgattccatgacgttgttattgtgaactttactgtggtaacatacaagtgtgggtgtcttttcaatataatgatttattttcctttgggtactcagtagtgggattcgtgcatcaaatggtaattctacttttagttctttgagaaatctccatactgttttccatagaggttgtactaatttacattcccatcaacagtgtataagcattcgcttttatattttgagagtttttataaacatgtttcaaccagtatttcttggtgttttgttgcaggatttttatacttatctgacatgaggtattaaatgttctattatttgagtctatttattgagtctatgaagtaaaaatggtgttggtgaatattcaaggtgtaatgatattcattatatgggaccatgatatacttctaacactgactctatatatctttcactatacctcattcaagcctcaaattttcctttctttggccggagcttttttgttgtgttttgctttttaaattgtgataagaaagaacatattatataaaatgtaccttcttaaccatttttaagtgtacggtttaatagtgttaagtatgttcacactgttgtgcaacgttgagttttaaactttaagatttaggttatttgtggcaaggaaggacaggtctattttatcttctttctcttgccttcactcatctttgcttccttattggctggaacgacgtatgaagggagaaatgctgcaacctaaaatcatctaactaaaactcaaaagacttaatttcttgtgttgtcttagagtttcatatctatttttttctggagcctttttgctagattaactcacaattctggagatctgtcaaccacatacagatatatatttgacttttgcagtgtgaagataaagagagactattttttggcaaattattggtgggtttaatcatccttccatgagcctgttttgaaatgcctgtgttatcaccatctgtgttatttttttctcttttgtagttttaattggcttaatttttgctagatcctcctttgccaaaagttttgtatgtgattcagttcattcatgtgatttatccaacatcacacatattaactacaggaattccttaatattttacaagatattcagtttaactttgaagtgactggtctgacagcgttagatgttcacaatatcagcacctagacaaggatgtcaatgcaaagacaaaagctactgggggaaggaatatttgagaatgtctaactttatgaggcaactagttcactaggacatattttcatgtcatgattatttctgcttcagtatacactgtaagtacagcagtgaggttaaataataaacactcagaaaatgagggccgggcgcggtggctcacgcctgtaatcccagcactttgggaggccgaggcgggcggatcacgaggtcaggagatcgagaccatcccggctaaaacggtgaaaccccgtctctactaaaaatacaaaaaattagccgggcgtagtggcgggcgcctgtagtcccagctacttgggaggctgaggcaggagaatggcgtgaacccgggaggcggagcttgcagtgagccgagatcccgccactgcactccagcctgggcgacagagcgagactccgtctcaaaaaaaaaaaaaaaaaaaagaaaatgaggtatcctcctcttttgttagtcacaagggtattccttcaaccagatgatacctcccatttaaatcaaaatttatttctgaatttgcttatcacttctattaagaggtctgctctgtcaagagctacatcttaactcaatggacctctggaaaaataagacaaaattacacaactagtcatttcagagaggggaaaaaaatcaaacttcttccctggtagttgtaggggaaaaaaagaagcttgattaaaatttcaatttgccattttgattttagagacaatgtgaaaagagatataatccatcaataacaagcagcagatttttctagattttaagatttccaatatcagggtgcatgtcagaatcaagaattacaattataattagtagtgtttttcgctgtgtcgccagattagagtgcggtggcgcaaactcggctcactgcaacctctatagacctcccgggttcaagcgattctcctgcctcagcctcctgagtagctgggactacaggcatgtgccactacgcccagctaatttttgtatttttattagagacggggtttcaccatattggccaggatggtcttgatctcttgacctcatgatccgctcaccttggcctcccagagtgctgggattacaggcatgagccaaccgcgcccggcctattagccaaaatattaaactgacataatggctatgtagaatgcaactttcaagtggatgcattccattgataataatagtaataacaacacatatattccttactatgaccagctactgttttaggagttttacttaattatctaattttttacaattaccatttttaggtagtttactattattagcttcactgtaatggtgataggtgagtacaataaaacacggagaagtgatctggccaacaactcacacatagatggctgagttagatgtttcacttaggcttaaagttattgcctgctggtaagcaaacaagtcatattttaaatgaagcattttatgaacacatactactagtttttagtatctgccatagaattgagatctatttgcaaacagccatattgttttcttaagacactactgtaggcagaataatgatcccccaaagatgtttatctcctaatttccggaattcgtgaatatattagcttacatggcaaaaggattctgctgatgtgatcaagggcagagacctggaaatgggaagatgatcctggattactcaggtgagccctcagaatcttttccagctgcaatcagcggtagacttgaggatggaaggttcagagagatggcatatcactggctttgaagatggaggaagggaccaaagccaaggaatgtggacagaagctggcaaaggcaagctaaggattgtcctgtggagtcaccagaaaggagtgcagcccgggtgacacccaggtagcacttctgatctacagaaccgtgagataataaatgcattgtctgtcagatgataaatttgtgctgtttcaagctacaaagtttgtggtttttggttattgtggcaatagggaacggatacaggccctgtcaggtatttcactcaatccatgaaataccttacagtatacaaattttaacatgcgcgggagccacttacggatccgtctatctgtgctgcctgggagtgtcaagaggccgtgtccttcattcacctcgcgcgtgggcggcgctgccctgaagatgctcccgggctcagtgcagacggctcagcgttctctcgcgttcaacgaaccgccagaaacgtcagatggtacggaggaaaacactttacactttaacagtatttttacgtttatttgcagcaaatgttgttggctttgtatttaaagtatttatgactcactataaagtgtaggatccaagaaaacgcgctagtttcacttggcccccgtggctgtcccggggagctctccaaggaaggactggttcctgaagttcctggggtgctgcaccaccacggaagaaccaagctccacagagaagccagaagccgcgaccgcggggacgctctctgccaggcctccaccgcctcagcggccctttacagccaccgcattctccatgcccccagttatttctagcttcgcacagcgcccggcccaccgagcgacctcaaacctcgcgacactcgcaactcccgaggcccttcctgctactggcctcagagggaagagacatcgggaagattgctccgcccacagaaaggaagatttcgttctcgcgagatcccaatgacaattcgggagcccgttctcgcgggattttccaagaccgggttggaatttgcgggggttaggagacggaagtcagagcctaggaagatttgggggtcgccttgccggcctcctgtcctcctccggcggcggcggagcccgagagaactaggtgaacaccgctttgccagcctcacacagcgtcccctggctctgccgccgctccggacgtcgccctcccgttctgcttgggtccccttagtcgctacctttgctgggatccccctcctccatcctgtggcttcgggttgccgaagagcgatgctcggagggcggccggaagtggcgttggccgccattggcctgccggccagccaccttgctgtcctccgccgccttccgggtgttacrtgcagccgggctcggccyctccccctggccggatggatccgtcggcgccacagccccgcgcggaaacctcaggcaaaggtaccagctccgcgctcgccccttacgcagaggcctgtgtactgcgtcgcgttggaccagttcttgccggtgcccttcgggttggggttttgccctgtagatcctcttcagtgacagctgcagattgtgaacccctccaggcctggaaccaaatctccgattcagtgttgagaacctggactcgggagtcagcccctgggatctagtgctgcctctgacagttacttgctgagcaactttgggcaggctcctcatctgtaaaactgggttcattactaggttcttgcgattattaaatgacgtggggaatacgcaaagtatttatgtgaccccgcgtgtggcccatattaagcactcagtaaatgttattttcattctttattcttgtatgccccagttgttagtgaatggcagaagtttgttgtaagtagataaatgaaggttgagatatttagttcagttgagttttattgcckattgagtcagggcattatattctgccttaaataggaggtttaaagaaggtgtgattatctaccacaagtcacctgggatgccttctggcacccaaatgagtagttttcattaataattgtgctgtataacaaaagctaccaggtattgagtgattttcctgagcccagcaatatgctgattgtttacttgctttcctttgaggaagatatcgatctcattaaatagatgaattcagagctaaagttcagagagggcaagttacaagcctgaattctgaggtctaggaattgatgacgctgtaattcagggaccaaacatataaatacctataggagactggcagctaaaaatagatgaagctgccgagtggatattgtgactgggaggctcattccttttgataaatctagtcactcttggtatttagggaaattggtggaaggagcagaaagctccagggccccgaggtgggaacacccttgaggaatgcttgaggaggcctttggagtgaaagagggagagagagaccctatcaccagaatgagttgagttggtaattagtttaaaccaaaacaaatgatttcgactcattaaattttaggasacttaacccatttccctgttaaatccaacaggaaatcttaacaatttaagcagttgttctgtagtttggatactgagagattccatttctaactcaactgaatttatttcgtcctagaaattatccgaactcaaacccaaaatactccaataagttgtgtgattcccttaaggcttttttttttttgcacatgctgtacacttatctgagatacagttcttagacccctttcccttttaaattacatttctcaatactcccttctcatagcactcttcttccaatgcagtttttacagttatgtatatgttggtgtactttttagttttctcgcaagatatcaaggatttgtgagattgataatttgtaataggccaggcgcatggctcacacctgtaatcccagtactttggggaagcttaggcgggaggatagtttgaggccagcctggacaacataagcgagaccctgtctctactaaaaataaaaaatttagccaggcatggtggtgcacacctgtagtcccagctactcaggaggctgaggcgggaggatggctgagctcaggagttggagtttacagtgagctataattgtgccatgacactccagactgggcgacagagacactcttgtctaaaaaaaaaaagaaaaaaaaaagaatgtgtaataaattcgcatgttcactgaatgtctgctgtgtgactctgtgttggtcctggggataaaatttataacagtacaaacttttcttggaaaggaaattactctctactggaaggaaaagacaaaaaacmagtggacatgataattaaatgttatgataagtgctacagaggcaataaaatgatgagatagagaataatgggtaccctacgctaaataggtggactgggagcagagagactggttaggcataatttagggaaagttgatggtggcatgctttaagacagaggtctgcaaactactgcctgtgggctaaaactggtctgacacttttttttgtaaataaagttttattggaacacaactgtgcccatttgtttatgtattgtctggttgcttttgcattacaagggcaagagactgtatggcctacaaaatctaaagtaacaaatagctaataactgactctagagaaaatgtttgccagcctttgctttagagagatagtggcatggaggaaagtgattcatttttgaagtagaaccaggatattcygatggattggatgtaaggagtaatattaaatgaggtttaagggctgactaatggttttctaccttgaaaagttggttagatgatgatgccagttttttgtttttttttaaatgccagcttttttttttattatactttaagttttagggtacgtgtgcacaatgtgcaggttagttacatatgtatacatgtgccatgctggtgtgctgcacccattaacttgtcatttagcattaggtatatctcctaaagctatccctccccccttccccccaccccacaacagtccccagagtgtgatgttccccttcctgtgtccatgtgttctcattgttcaattcccacctatgagtgagaatctgcggtgtttggttttttgttcttgcgatagtttactgagaatgatgatttccagtttcatccatgtccctacaaaggacatgaactcatcattttttatggctgcatagtattccatggtgtatatgtgccacgttttcttaatccagtctatcattgttggacatttgggttggttccaagtctgctattgtgaatagtgccgcaataaacatacgtgtgcatgtgtctttatagcagcatgatttatagtcctttgggtatatacccagtaatgggatggctgggtcaaatggtatttctagttctagatccctgaggaattgccacactgacttccacaatggttgaactagtttacagtcccaccaacagtgtaaaagtgttcctatttctccacatcctctccagcacctgttgtttcctgactttttaatgatygccattctaactggtgtgagatggtatctcattgtggctttgatttgcatttctctgagatgatgccagttaataagatgcaggaagactattagtcaccatcatttttgacattagttttcttcattttatacccattgtgtggtataatatttggtgaataatttgtgcttaaatcacatatgttgaataatagataataaaataagtcttaagaaatgatagggtaggcaaacacataatgggaaatataagtaatgtgttaagaattgctgtaagggttgctttaggttttaaggtgcaaatagtactgttatgaaaattgggcccattgacctatatgttgttctacttgtacagtggatcgaggctttagtttgacattaaaacactcttttagaatggtgtaacagttgtcaacagtttgggtccagagagtagagtgggagagaaggtttttccctctgtactcattattgttatggtaaaataacctcatcaaagttagtggctttacttttaaggaacaactgatggatgaggaatttaatragctattcttgctttagatagtataaacatgtcatgttgtagttataaatatctaactggaggtcatcaggaagaccctaggaaactgccagtggttatctgatctcagtgagaaatgtataggaaaaataattcctagtgttcttatgtttgtagccatagaattatttttggattcttgccataagaaattccatttggaaaattatttttacttagttttctttatttgatactttttaattgtaccaatagtatactgtggactccctcctcattcatagtggtatattttctgggaaaataaaatagctgtatggttagtcacagaataagttcataaagagagaggtaatactctttaaagtgtaataggatctttgcagaaagagatcttagaattcatctcttaaagtaaatattcaaaacccggaagaggaaaagctgtgacatcactgtagttgaattggaggttcccatggttagctgtatacaagcagtggttaaagtaaaggcttagaggcaacaatattgcagtgaaaagaaacagctgtttctagagaaaggcaatggaataactgtaaaaaagacagatgaaccacaaagcattgctgtccagaggattttagtttactcattaccaagtcctattcacgattactctaccatatcatgaaatatatgtatatatatatgttcatgagtcaggaagaatattttagtcagtggctctcaaccctggctgtgcgtcagaatgatcttttgaattcaacaataacaaccaaacaaaacaataaaaccagatgcccgtgacccctatccactgaataagaatcactagaggtggtgtctaagaatgtatatttttaaactccaggggagatgatgacacacagttagggtaagaaccactggaaataaagtatgtaccctttattctgtttattataggagaatatctgaaaatctattttagaaaaatatctatacatgttagaatttatcttgttccagttttttggaaaaggcatttatgtgaggtatatattgtttctcacagctgtgaataaatgaggtgttactttataagctagctttggaaactttattttctttattcttgcagacatatggcatccaggagaaagatgtcttgccccttctccagataatggaaaactttgtgaagcaagcataaaatctatcacagtggatgaaaatggcaagtcatttgcagtcgtcttatatgcagattttcaagaaaggaaaatacctcttaaacagcttcaagaagtgaaatttgttaaagattgccctaggaatcttatatttgatgatgaagatttagaaaaaccttatttcccaaaccgaaaatttccatcatcttctgttgcttttaaattatctgacaatggagactctattccttataccatcaataggtatttgagagastaccaaagagaaggaacccggtttctttatgracactacatccatggaggagggtgcattctgggtgatgacatgggacttggaaaaacagtacaggtatttaattatgttataacagtaaagtcactttactgtgtacatgagtggatactatatgtaaatctttatttgtactgctgttacgatagctattttgtgtgttcctgtgtatgtttgtgtttgtctcactaactagatagtgaagtcctcaaagttgaggacaatgtctcagttattttatcattcttcagtacctatgaaatattttattccaaaataatgttttggtaccacttggtttgattttacctttggtaatactggtactaagatatcaatatatttgaagtcatttaactttcttcatacttaatggaaggaaagcattctaacatttgttatgccacatagcatggttaaattgttcctataggccttttgtgcatattgttcgaagtttatcatgttagaagtttcttaatctggaatccctgggtcactagcagttctgtttgtgaacttcagagagacttcaagattccctaaaatgtgtactagaatttgtacacatacatactttcctaaagaggggatttgttgtagttaatctgtttctgtataacaaattatgccaaatttagcagcttaaaacaatattcatgtattgtctcacagtttctgtgggttgggaatccagctgccgcctagcctggtcctstagctttgcctctcacagggctgcagtcatctcaaggtgactggggaagattcacttcctagcccacctgtttgttggcaggattcagttccttgtgggttcttggcctcagtttcttgtgagctgttggctggaggcctcctttgcttccttgacacatggacctcttcatggggcatctcacacaaggtagcttgcttcataaaaggagagcaagtaggagggcaagagacagcactagtaaaacagaagtcatagtctttggtgatgtaataacacaagagacatcccttcacttttgtcacattcttctcattagaagcaagttgctaagtccagccagaactcaagggaaggagattaaacaggactgggaatatgaagaggtgggtattattgggagtcctgtcagaagctgcctgctacagggtctttagctttccttagattttcaaagaggtttgtgatccaagaagaatagagttttgaatctagattttatactaaacgatcactttagattttcaggagtgtgtgcctagtttgtgattaagttattctgcttcctttcttataattgagtttaacttattttcttcttcatattacctccattagttattggaactcaaaggtttaagtggaaaactaaatttaacatttataaatagccaaatttcagacaccaatgatggaataaggaaaaagaaaagaaaaaaaaaatagccaaataatgctactgtgtgtaaaggtctggtgtgaaaaactaggctaaaataaagtcttttaataatcatattaccattaaccatactctatgttccttcaagcctaggcagtgcagatagtttagacatgcacactggacgtgctaaatgattgtttgtggaataaatgaatttaccttcttcgtttattccacaaactatcatttagcatgccggcctgtaggtggaggatagacagcaagaataaagaaaggagccttcaagaaattacctctgaaactgacccaacagtcccacagacagttttgtttgtttgtttgcttgtttttggataaacatagaaattgacccttctggtcctaaagctttaaacttgtatttgttttatctgagttccttcctcaggaaaggacccccaggcctctcaaaaagtatcaaagaactgaaactcaccagatcgtrgaattcagacagtgagacaccaggcctctcattcatcagattacttccttagccctcccaacttcctgttttcccatacattgttacatttcttctctgctgtaaaaactcctaattttaatcagggagatggatttgagactgatccttggctacagtgcctgattaaagcatttttccttggcaatacgtgttgtctcagtgattggctggctgtatggtgagcagcaggtcttagaccgaacccrtggtgtttcagtaacgccatctgtgaccaagattacagatgagtactagaggaaaattaataaattaattaaagccctgctgtaactgttttcgcatatacttctactgtttttgcctgtggtagaatgtttgttaccacaattctttgattagccagtgcatgttcaacttcaaaataaacatgaggctgggtttggtggttcacacctgtaatcccagcactttgggaggccaaggcgggcggatcacgaggtcaagagatcaagaccatcctggccaacatggtgaaaccccatctctacaaaaatacaaaaattagctgggcatggtggcccacgcctgtagtcccagctacttgggaagccaaggcaggagaatctcttgaacctgggaggcagaggttgcagtaagtcgagattgtgccactgcactccagtctggcaacagagtgagactctgtctcacatacaaaaaaagaagaaacatgagggtactacatacaaaaagtgatctgtttgggaaccaccatcctgcagcttaaatacaattcgaattcaaattcttgcgcacattttagtctcaaatttgaaggctgtctttcatctctgaggcccatgttacaaagaaatttactttattttacagttcataggattatttttaaaggagctgattttactgcagaattttctattcctgatacactgtaatcattgaaggacttggagatgttctggtacatgctgttagtgtgctgtgcaagtctttgagggagtaccgtctgaagattaggaaatggtttctgcactaattttgatactcagatggatttgtctgatgcttggggacctagttctctggttactgttgttgtaactcagggaataatttctacatagataggtggtttgaaagacccatttaaggtagagcttctatagatagataaagcttctatagatatgactaagccagttgaagaaatgtgaatgattactgtgttaactaaaatttcagaatgtagtaaaattaattgataatgaaaatagaccattgacatttactgtttgagctatagttttatcttcttttcttcttttttttttttttcctgtttcttgatttcatccctttagtttccccctttttatattctaatttggccatgatatgaaactgaagtctttttaaagcttgttttacataccaaataaagtttccttccctcatttcaaatttaaaagtaggtgaatttaatattttacactctacaggggatgagaattgaaaaatgtccatttgttctagtgacatagaaatcattggtatgctgagcaagagccattttgctggagctttcagacacaagccataatggagtaggtgaagacgtggacatagaaagaacgtatatttacctctttaagaaatatggcttcgaaagggaataaaagtgacctagtagtaggtgaagagagagacgagaatttgagggggtttcttttttgtttgttttgtattgtttgggggtaggaaagacttgagtatttttaaggtgaattggaaggacagatctggtgaagagggcacagataaatatgcaacatacataatgatatgcccacatatacatgtacttctgtaaacacacacacaaacatacatatgcaaaaaatggagtcacataataactactatcttataagcaggttgcagatttttttttgtcaaagattatgaactaatttttcccgataccttctgacatttttctaaaacatagaagagttaaaagaatggtacaatgaaaagccatattctcaccacttagattctgttaatatttcattatacatggttttgtaatatccatccatcttttgttgcattttaaaatagcagacattaatacattttatcccacatacacatatccaagaaaagatcatcacagccaagacgatgaacatgtctatcactcctagatttcctcatgtccattgtgcccttgatatgttcaacaccatgcagttcatcacctactatttttggttttagtgggactgaaaaattaaagatacttgaggaaattttaatacaaaatccaagatttttatgactatctcccaatatttcacagaattttcacatctaattcaacaggtaacttgaaaatgaatcccttttgtacatttacgtgataattagctagtttaagtacaataaacaatttcaactggagtatacaggtttgggaacctgacctttggtaatcagacaactcagtgataggaaaagaggtgagtgggtgcttaccatggagtagtggttctctaaagtggatatttgggtcagcagcattagtgtcacctgggaacttgttaggattgtaaattccggggtctcactgcagacatactgaattgtgaactcggtgggagtaggagaggatggcaatctgtgttttaacagatgcttcaggtaattccaaggcccactaaagtttcagagcctttgctcagacggtgtgtttttcagagggttagaaaactttgattaatctggtgagttcagtgaacattggttaagggatgtttggtctacgtgaatcttttttgttgttgttctctttttgtttttttgagatgggggtctcactctggcattcagggtggagtgcagtagcgagatctcggctcactgcaaagtccacctccggggcccaagcgatcttcccacctcagcctcccaagtagctgggaccatagttgctcaccaccacgcccagctaattttttgtatttttggtagagatggggttttcccgagttgcccaggctggtcttgaactcctgagctcaagtgatctgcctgccttgacctctcaaagtgctgggattacaggcaggaactactgtgcctggcctctgtgttaatatgtatacataggatgatgatcatttcatttaaaaaaaaaatacatttagaaatggaaatgatattagagataattttgttcagctttttaacttagtacgtaaaacaggcacaggaatgacttccctatctagggtcaggcacagaagtaataattttcatttctattctagaactgttatttttttcctcttctatcatctactgccttcttttgacttaataatacagttaattaaaagccttttactcaacttttaaccatttgttcaattggttgacatttgataagtactcactctgggccaggcactgtgattggcactgaagagccaatatgaatataaatgcatataatacctactgtgatggttactagtgagtgtcaacttgattggattgaaggatacaaagtattgatctaggttgtgtctgtgagggtgatgccaaaagagattaatatttgagtcagtgggctgggaaagacagacccatccttaatctggcaggcacagtcttatcagctgccagcgtggctagaagtaagcaggcagaaaaatgtgaagagagagactggcctagcctcccagcctgcatctttctcccatgctggatgcttcctrtccttgaacgtcggactcaagttcttcagttttggaacttggactggctctccttgctcttcagcctgcagacatgctattgtggcacttcgtgatcgtgtgagatagtacttaataaactcctcatatatctctattccattagttctgtccctctagagaaccctaatacacctgccttacagagttcacaaaagagtaataaaaggaaatgaggccaagagtcatctagtctggtaagtgggttgggggggagaaacaagcctgcctgggggtgtcaaagaagactccacagggaaattggtgttttcatactttgcttttggaaacccaccaaactttgagttttgaattgagttttaatgaattttattttttactgaaggcatagctctaatatagtatttgaaaggtttatcacaagagaagagctcaaattcattgaatcaaaataatttagtttttaatggtagtgtggtaattagcttttacagacaccaaaatcttaaggactactattaagcagatgcagtaatatgtcttaccatattattttattttctcatctgctatgcaaagaagataatagtactttttgagtagcagagatagaattttgcaaagcatgaagacattctttgaatttttgtttctatattattagatattacattattgaaaatgtcattactgaaggctgtcttattaaaaagatgtatagtaaacctcactcttgagagaaatgggattgctgataattaaaggtttcttaggttattttcagtaccttttttggataataagatcttcagtrgattcaaaacatactaaaatatgaaggttcttgggatctcaagtcatgttattcactcaggaatatagtaataaagagaaaaataatattgtctttattttcattcattgagaaaatgctataatatccagtgtggaaggttaattagcccccagatccctgagcccttttaagcagaaacaaaaatgtactagtatttcacagataaaattgtatttcttcttttggcatgtagttctgattttaggggagagctttgtaaagataagtgagctagaccccatttcaaaacagcactttgtggttttttttttttttttcaaagcgagcaaaaatacttttgaagtgtggttctgaaccactctctctgtacctttgtatctcccaggaagttgaaaaataaggtagtaaacatttttttctttttgttctgtaagaaatagacaatttttgctatgccttcctcttctggtctaagggaaggtttatgccctttttcccagcctcagatttactcagtatgtcatgagctgactctgtgaggaaagatgacttataaaactgttggcttgacagagtttagaaaggaatacatgtaaaaacagaaagctttcccagagtgatatttcatttctgaaatgcagtttttggcctttcactattctagaggtgactgattwaaatatttgtttttgttcttttcatctataagcaattttagaactattccacaataaaacatgttctggctttttctttgcagataagttttgtaaaccttcattgtaaatgtgtctttagtcttctgtgaattaatattttgatagacctctactggaccaccatagtgtggtaagatggctagatctccacccaaaatacatatttcctttgccttcttagagtttgggctagctgacagagactgcatttcccaaatctccttgcatgtcagtggagcttgtgactgggttccgccagcagaaataagggtagaagtgatgagtgccatttatagtcctggtccataaaatccacctgtgctgttcttcacattctcccttccctaactgtcttttgtgtattgacactttgctgctagcattaccacaatacctattagtatattttaattaatataattaatatatagctaagagtttgttagtggttttagctagcttctccagtttgtattctcaactaaagtttattactatttcaacttaagtttttcgggggtgggtggataagtagtgttaagaggtagtgtagatgatttaaatgagatacaaagatttttaaaaatcattagtggatttagtgaattaaataaagctaatctatacttagagtttataaatttagctgccacmtatgaaatatcttccaaagatctgagattcttaaacacaaggaacatttcacatatctttgttttagagaatttgacaaatgaagttagaattaagatcgtatatcaccttggatagatgagcaaattgaattatgaatttgcacaattaggaatataattttcctataatgaaacaatctgtaggtgagttaagagcaaatcagtggatttgatcttatattacctcatttaaattgttatggtatctaataggtatctctcttgtcttttcagtagcctttgaggaccagttgcctaaaattaaaaagagtatatctgtcaatatatgtgtgtgtgtgtgtgcatgtgtgtatctttaattctttaattaaggtacacttaaactgtaaaatgcacagatctcaggtatactacttaatgagctttgacaaatgtctatgtctgtgtaactaatatactaatcaaaatataggacaattccattaccctaaaaagttttttcatgcccctttccagtcaatatgccaattacctatacttttaattataaattttctgtgatcagtgtaaagttatattccaaaaggtagttagaacccaaaatgttatgcttatttacaccatcaaggaattcagtaaattctaatattaggtgatgtatttttaaatagaaaacataactttaaaaatatttataaaatgaaaattgtgaacatgcatcaaagatcttttacttaggtggtgttaacaatatttaaattgtccaatgcctaaactcagttatttgtggagtatccgttctctttcttttaatttatgttctacatcagccagtttgcgcacattaatctctcactggattctttagtaactgtttattttctgttcatttgtccacttttttctcaaccatgctccttcaacacatctcctaactacctcttccctgtcaccccaaatcagcttgatttcatactactgaatgatagaaatagcctttcatctagactattccagcatctagaaatagcctttcacctagactattccagcatcttggtattgagtaggtaataaatatatttttattgaatgtgttagtgaattttaagttgaattggataacattatggttctatggttataacttatattgcctatatttgccaggctctatgataaacattttccattaaacattcatgttaattagatattcttgcctctatttaattggtgaaaatattaaaatttatagaaagtttatgtaaattgcccagtgtcacatagctagtatgaaactggttggtcagacaccaaagtctttgtgataagtcctgcaaattgacatgcgaattttgttagaatattttaaaacttaggacaagtttaaaccatcctatttttcatctttttataatattttagacaacataatttgcaaaagctactttgtttattatatacaagatcatatgcaagaaacaaagccttctaccttaaggaatgatgccagaaaaatagctaatgtgtttttgttttttgagacagtgtctcgcttttttgcccaggctggaatgcagtggtgcagtgttggctcactgcagccttgacctcctgggctcaagtgatcctccccacctcagcctcccgagtagctgggactacagatgcgcactaccaggcctgggtaatttttgtactttttgtagaggtgggatttcaccatgctgccyaggctggccttaaactcctgagcttgcccgcttctgcctcctaaagtgctgggattaaaaatagctactgtttgcctgtaatcccagcactttgggaggctaaggtgggcagatcaccagtggtcgggagttcaagaccagactgaccaacatggagaaactctgtctctactaaaaayacaaaattagctgggcatggtggcgcatgcctgtaatcccagctaactcaggaggctgaggcaggagaatcacttgcagccgggaggcggaggttgcggtgagtcaagatcgcaccattgcactccagcctgggcaacaagtgtgtccctaactctgtctcaaaaaaaagctcctgtttattgaatcattgatatttactgacttgacactttacgtacatactttttaacttttttctagaataaaaataattctgattacactgtaatacacaaacgcattcttataaaaatgcaagctgtaatttttaaattgaggataagtccacacagcattaattcattatataaaatgattaattgagtgcatttaatgcattcagaatgttgtgcaactcccacctctttctagtttctgggttgtttccacttttagttattatgaataatgcttctgtgaacatttgtatgcaaacatttctcttgtgtgtattcctagaattggaattagtgggttttatggtaattcagtgtttctttttttttttttcgaggaactgcaatactattttccacaatggctaaaacattttacattcctaccaacaattgtccaggtttcctatgcctccrcatcattgccaacacttgttattttttggttttcttcattatagccatcctactatgtgttaagtggtatttcattacggttttgatttgcatttctgtaatggccaatgatgttgaacatattttcatgtgcttttttggccctttgtagatctttagagaaagaaatatatatttaagtcttttgcctgttttttaatttcattgtctttattgttgagttgtaagaatttttatgtattttggatactaatccctcatcagatatatgatttgcaaatattttctctcattctatagttgtctttttatttgcttgttattttactttgatgcacgaaagttaagttttatgaagtccaatctgtttttttatttggttgaacaagttgtaattttaatgtatgtgtaaataaatttaaaaaataggactattatttctatatgttattctactccttgtttttttcacttaaacataggtcttggagatctttttatgttggtacataaggattgtccccattcattaattaataaattactgcatactatagattatatgttctgtaacttattttaccattcctctagggacctagggagaaggatttttgggttgttgcctattttaggaaatagcaaatagtgaatatctgtaggatagaattctaagagtatttctctgtaggatagattcctaaaagtcaagtttctcggtgaagtgtataaatctttttttttttttttttttgaggcaaggtcctgctccctcacccaggctggagcgtggtggtgatctcagctcactgcaacctctgcytcctggttcaagtgattctcatgcctcagcctcccaagtagctgggattataggcatgtgccaccacacccagctaatttttgtatttttagtagaagcagggtttcaccatgttggccaggctggtctcggactcctgacctcaagtgatccacccacctaaacctcccaaagtgctgggattataggtgtgaaccactgcgccaagccagatgtgtctatttcttttaatctgctagttttaccttcatatattttgaagctccgttattagggtcacaaacctttgtgattgttatatcttcctgatgaattgaccatttttttactatgaagtgtcccttgtagacagctcttttattcattctgacaatctctgatatttaattggaatatttagttcatttacatttaatgtaattcttatgtatggatttggatacaaatctgttcattcagaaacagtctgatttgccttttgggttgatatgatattttttagaattttattttaatttktctattgactttttatctatacttctttgctttttatttttagtggttgctctaatgataaaatatacattctcaacttcttgcaatgtacctaataatgtactgcttcagataaaatatgtttcttgtaaataggtcattctattctcattttaaggaatctaagagttaggaatgctaagtgtaatgcctaatatacctagctgataactacctaatacctaaatttcaaaggttaagtcaaacttatatttgcagaatatacccagtttggttttggtatatattatttccttttttaaatttctgtgttctgtgtgctaatattttgtttaagagtttggcttctatatgagtaagataaattggcttgtaaatttcctgtattataatgttcttgtcaggttttcttatcaaagttacgctgaactcataaaacgaggtcacagtattttcccctttttctaaaccctgaaaggktctgttacagattggcattacatttttcttaagcattaggtagaatttgttggtgaaactatctggcccttaactttctttgtggaaggtttataattacatattcaggtttatttcatggttttatgagtatttaaatttccttttcttgtgttggtttttgataagttctatttctaaatttcctctaaattttacatttattggcaaagcattattatggcttatacatattttttgtttgccttttctctattttttcttcatcaattttgccaggggtttattgaaaaaattctttcaaaggatgatcatttggcattgttgatcattttcattgtatgctttagtaatttctgcttttttgtgttaaattttctgttattttcataagtttttgagatagattctttgataactgattaatagtccctcttctttcctaatacagatgctccttgacttacagtggggttatgtccccataaacccattgtaagttgaaaatattataagttgaaaacacatttaatacacctaacctactgaacgttatagcttagcctatcctaccttaaacatgctcagaacacttacgttagcatatagttgggcagaatcatctaacacaatgcctgtttcatactaaagtgttgaatctcatatagtttattgaatattttgctaaaagtgaaaaacgattgtatgggtacttgatttacagttatactgaatgtgtattatttttataccattgtaaattgaaaaattgcaagttgagctatcataagttggggactgtctgtaatattcatttaagtccctaaggtacagctttagccatattctacaaattcaacatgtattgttactcattatttaattcaaatattttataatttatattgtgagttgtttgaactctgttccttactgtccaaacatttggagattttctgcttatatttttgttatttctagtttcttgtattgtgatcaaagaacatattctgtatggtttctgtctactgaaatgtattgagacttctgtggcctggcatatgtcagcctttttttttttttttttttttttttttgagacggagtttcactcttattgcccaagatggagtgcaatggcgtgatcttggctcaccgcaacctccacctcctgggttcaagtgattctcctgcctcagccttccaagtagctgggatcacaggcacacgccaccatgcccagctaattttttatatttttagtagaaacgggatttcaccatgttagccaggctggttttgaactcctaacctcaggtgatccgcccgcctcggcctcccaaaatgctgggattacaggcgtgagccactgcaccaggcccggtatgtcaactttggtaactatttcgtgggtacttaaaatgaaactgctttgcagtagtgtgcagtgttctagcaaatattcgttaggtgaaggttgacaatcatgttattaaagtcttctgtatctttactgattattttgtttgttcttgctgagttattttaaaatctaccattgtgcttgtggatttgtctacttttatttcaataaatttttctttattgataaatttagacttcttaaaatttccaagtgaactaattttattatcaatattaagttaaagtgtgcctctttaatttcataatgcttttttgtctcagcatctttatctgatatgaatatagctatatcaattttctttgatttttgtttacatggtctgtcatttttattttcttattagaatttttatcccttttttaagaagtttttcttgtaaatgacaaggaaatatattttatttggacagtctttatcttttgtttagacagtttagtccatttccatataatgtgctttctagtatatttggatttaaacttagtattttactgtttgatttttatttattccatgtcatgtttttcccactttttttgtgtccttttgggtagattgtttcctattactttattatccccttttattaggtacacattcttttattcttctattaatgattaccctagagattacaacagataccattgatttatcataatctaacataaattagtactttagtttcctccctacagcatagtgacctcagaatattataactacacttgtgctccttctgactcatatacatttgttgtcatagctttttttttttttttttgagacagagtcttgctctgttgcccaggctggagtgtagtgcgcgatctcggctcactgcaaactccctctcccaggttcacgccattctcctgcctcagcctcccgaatagctgggactacaggtgcccgccaccgggcccrgctaattttttgtatttttagtagagacggggtttcaccgtgttagccaggatggtcttgatctcctgacctcgtgatccacccaccttggcctcccaaagtgctgggattacaggctgtcatagcttttaacctgttacttgatttcaaccaaacttttttattgtttcataatgtcaatcaatgtacatatatattttgtatatatttaccatttttgttgctctttatctttccctgtgtcaccgatcttctaactagagtcattttccttgtacctgaaaacattctttagttagtttctttagtgtggctcttttggtgatgaattggctcactttttggttgtctgaaaatctttacccttcattcttgaatatcatccgtaggtataaaaatataggttgcttttattatcactttgaaaatattctgttgtatagtatcttccattctttttcctgcaaggtcagctacttgtctatttgtttttttgtttgtttgtttgtttgttttttgatttttttttttattttgagacagggtcttgctgtgtggcccaggctggagtgcagtggtgcagtcacggcccactgcagcctcattctcctaggctcaagcagtcctcctacttcagctttccaggtagctagtgatacaggcatgagccaccctgtgcccagctaatttttctaatttttgtagagatggggttttgccatgttgcccacgctggtctcaaattcctgggctaaaatgatcctcccgtcttagcctcccaaagtgctgggattacatgggtgagccactgtggccagaccagttgttgcttttttgtaggtgatctgttgttatttcttctggctgcttttaacaaacattttgctgtctcaagcacctgcttgtggttttttgtttgtttttggttttcattttgttttggttttggttctggttcttggaagaagatcttgaatctgtggcttgatttttaaaatcagttaagttttcagcttttatttcttcagatacttctgtatcatttcttttcttctatcatttgggattcagattataggtatccacacccttgttaagtatacttttttctataatttttctaattctcacatagttttttgttttatatagtttttcttcttatttatttttgtaaggtaatgatcagttattttcttccatatggatacctcatatacctttcttcccaatctttaaaacaaccttgccaaaattattttttgccatttttacagatattattcagagaggttaacgcccttgccyaacttcacagagcagccaagcaatcagagctaacatttgaatcaaagtcaaatcaatttagtatttcttgctctaatttattatatgaggttatggttccttttttctgttttgctcacttgatttttggagatgagctgttattcaaaatgttgcatacattaatgaattagtctgtcttaaaataacatttttccatttcacctatatttattagataaatagaagtgtacaaatttatgggccaaatattatcccccttaaggaatttattttctacatggaaacaagaatgtatacagtttattctgatagaggatacgaagagatagtttccatggttagaaacaaataagaaggtagtgtctcaagtgatggaattaagaaagaattcattgggtaggtagaagttatgaaaagaaaagatggtaatgtgaggatttttgtttgtttacaagagtgaaaaacagtttgttattacaaataaagaaaatcagtactaatatttcatgttctatttcccccaacaaatctctttgtacatactttgtcactaattgaatagtcatgtaagcagtgaaattttgtacgtcatgatacattatacacagtgattgaaaaagtcttttttccccaggttatttcatttctggctgcagttttgcataaaaagggaactcgtgaggatattgaaaataacatgccagagtttttactaagaagtatgaaaaaggaacccctttcttctacagcaaaaaaggtaaaatctctagacaatgtatattctactcatgatgctggtattacaaaagcatatagaaatatttaaatatcacacattaaaatgtattggtatacattttaaaacctaagaatttaaagrtgttattaaaatatttgttttataggcctaatttttgaaagattaccaattttattcccaagttaaatttgattgactgtcatggcaaaacagaatttcagcttggttttgctttgaggttttaatctgttggttggctggatttacatgatttacttaggttgatttgttaaacttacagaatgtatatgtaaagttaattgaaaccttcattatattgttttttatttatgtgagaatgaaaaggcgatagttacagatattggtaacaaaagtgcgtcattgacttatttcaagttgcctagctaattgcatccaaaaaatatgaaataagttctaccaatataggaaagttggaatcagaaagactaggtaggtctgtgcttatttctctttctgcccatatgactgaatgctattcatatccatacttcagttttcttcttcataaacgtatgtttataaatacgttatatatgattcttacaaaaaagatttctaataaagcaatgaaatataaaaaagtatattatacttacatgtcttttaaaaaatattatcctcagcctccaggaaaccagataagaataaaaatgaagtgattttatgaaatcttttattatatttggtaatgagctacttacagcaagttttaaaacagactcttttatacaagtcttatgtacaagattgctgagaagtccaagtttactcttgtctatcataaagaccatttcaatgcaaacttttcagaactactggcttaagatataattgctatcattttaaattctctttatttttcagtagaataaatgcatcctgagtatcagattcaatgtgatcctgaagagaataatggttcttaatgtattttaagtattcaatagctcaagtactgtttttagctctggattcagttgttccctggttctaaatgtcaccacagagcctatatatatctcttttatgccactgtgacagcagatagaagagagaacaaagaaggaaaagtaatattttaaatatattaaaatacttaaagatatttaaaatattatagaacaagaatgggccaggcgcagtgattcatgcctgtaatcccagtactttgggaggccaaggaaggcgaattgcttgagcccaggagttaaagaccagcttgggcaacatgtcaaaacctcttccctactaaaaatacagaaaattagtcaggtgtggtggtgtgtgccagtagtcccaggtacttcggaggctgaagtgggaggatcacttgagcctggggaggttgaggctgcggtgagccatgtttgcaccactgcactccagccagggcaataaagtgagacccctgtctcaaaaaagaacaagaatgaaagaaaagaaagttaacaaagatactcatttgataatgtggtaaaatatgcttataatagttacctcagttgactccagttcctctccttccttctttcctttctttctttttttctctttatatatatatrtrtgtgtgtgtgtgtgtgtgtgtgtgtgtgygtatgtatgcatatgcgatgtatcatatcacacacacacatatacagttgtcccttggtatccatgtgggattggttccaggacctctcttgggtaccaaaatgtgtggattctcaagtccttgatataaaatagtgtatttgcatataacctgttatcctcccatatactttaaatcatctgtagtttacttagtgcaatgtaaagtctacataaatagcttttatattgtattgtttaggaaataatgacaaggtctgcgtacatgtttagtgcagatggaattttttagtatttcaatttgtagttagttgaatccactgatatgaaacccacagatatggaggaactgtaaattccttgctataatgtacattgctatttaccttcttcagttgatttcttaatttatttattttcagtctttttgtattctaataaattaccttaaagctataagtgttcctttgggccaggcatggttgctcacacctgtaatcccagcactttgggaggctgatgctggaggatcgcccaggagtttgagaccggcctgcgcaccataagaataccctgtctttacagaaaataaaaaaataaaacaattagccaggtgtggtagtgtgtgtctgtggtctcagctactggggaggctgaggtgagagaatcgcatgagcccaggagttctaggctgcagtgagccgtgatcatgccaatgcactccagcctgggcaacagagaagaccctgtctcaaaaaaaaaaaaagttcctttcagtactcctttgtctgtgttctatagtttttaatatgtagttttttcgttagtcttttctaaattatctgtggccctaatttttattctcttttacccaagtactatttgaaagagaaattaaaaaatttccaagtgaatagctattgttggggctcaggatgatgggagggctgaaccctttttgacaattctagttttgttgcatcagataacagccttgatatttttttctttgtgattacatccatggatcagtttttatgctttgatgtagtgcattgtgtagtctctgttgttttaaaatgttgcttatattgtgcattctttgtaatcatggtcacatggttttatatatttctatttaatcatgtttgttaattgcattgttaaaatgtttaatagtgttattttcttcttgtctgaacagttggatctggaaagaaaaatgttaaatttttttatttctctttgtgttcataccaactttttcttaacgtcttcagttaattcttcagaggccaggtgtggtggcttgtgcctgtagtcccagctactcaggaggctgaggtagtaggatcacttgagctcaggaggttgaggctgcagtgagccatgactgtgccactgcactccagcttgggtgacagagtggtactctgtctcagaaaaaaaaaaaaaaattcttcagtaaattttatgtgtttgtatattgctctcacacttgattatccataggcttatctgcctatggaattttaagttcaaaattttcttttataatgacaaaacatcttctgtcactccatattgcagatgagagttcartgtcaacccgatttttttccttggaaaggattttttttttaattgtttggaagtattaaggacttttttaattgatgaaattyggaaatttccatgagccctaacactcaccatagaattcttccaaataagttttgctttagaaaatatatatacagtgctttatgcagggaaagttgcatactgatgctagaatcagtttctttgatgactggtgtaacttttccttcttaaaattacttggccattatttttcttgacttagtctttccaactaccttagctgttttgttgagttttgttttgcttgttgttgtttttaggttccttctaggaaaagtaaattttttagcgggggagggcagggggagtttttgctttcagaggtgtagggcggattgctcagttcttcaggtgtgccagttctcatctgctcctgcactgttctgacctgctggtactgcccttccaggcattctgccactattatggatttattatgtttgttcttttgtttcattggcatcaatacaaacgtgttgagttagtcatttgaactggaatttagagtttttaatggcatcaccagtgacattctacagtatttcccagaagtaaatacaaacaaaaattataactttgaaagttttaaaagataaatttgtattggttcatttaaaacaatgtatgttttaaaaagacagtttatgaaatggagaagaaatcatttcttttgtatttattatgctaatgccagaattacaattgaattctgaaaaattaatgttgaagcttgttgaagaaagccctttaatgaactgaatgttacaaattaaggagtggtgggtctaaggtatgtgtgtgtgatacgatacatctcatatacatttaaaaacttttcaagtgtgaataaatcatctgaataagaatgcatgaatgttttgtgccaagaataaattcttaaaggaaaagacacaagctctacattttaaacattgatttttggaatggttctttagatgtaggctaagttttgattgaaattcaatttttatgaatcataataaatttattataaaatattactatcttgcatgatgaagctttagagattctaagtaaaattcataattaatgcaaaagaggaggatttttgtagcaatcacaacaccagcatcggaagcaatttcaatgacaatttaacaaaaatattttataattattttatttactatacactatttttttagttcttcatatgtaccaagaggattatgttgcacatgatgctaccgtgagcatccttatgcacaacttttgcaataataactgtaggataaattcttagtactggaattggatagcaggtagagctggatttaggggattactttttgataactggagttaaattaccccatatccccacragtgatgtataagaatgtctgtttccaccttttcgtttgcactaggtattagcaaacataaatttatgactacctgagagatttaaaatttttatcttgctttgatttacatttcttaatgagtgaagctgtagcatttcagatgtttaaaagctatttttaaatctaattctcgtttttaatcatagtccttgattaatagtccttaacgatatatcctggaatctaattttttgttcattatatattttgaaaatatttcttccccatgtagagtcagctttgaattatttattgattttttaaaaatgtttatgtggttacatgtattggtctgtatagtttctgggttttatgtttgcctagaaaagccttttgtactctaaatttataaatacattcattcatggttcttttataatatgtgtgattttattttatacctttatatctttgtttcagctagaatttattttgctgtaggtgtctagtaatccaattttattttcctcagttggttaaccagttatcttaatgtcatttgttgagtaagcctgcttttccacagtgatttgaagggccactttggtgtaaaattaaactcatttctatttctagacgtattattctgtcctaattatttgttcatttctcttccagtgctaaacagttttagttattttagctttataatgtaatttattatttggtagttactcctcaagttttctcaacttatgaaaaataaattttctcaaatttctcctcaaaacctattgatatattagttgatgttgtgttgaatttatagttaactttgcttgtcatttccattcttatatttcttatttacttctcttttttaattgcaagagttgatatttattgatctggtttgtaactttctgttttgatagaatatcaagttttggcataatgccaaactttaatacttcatatagtacttagaaaatagaaggtgttcaattgatgaatgaattaataattgaagccatacatgtcagtgctaagttaggactaataatgtatgttcagaggacagtgacagtagagttgaaacaaaggtttcacatgggaagaagtgtgatatcaaaatgaaaaataaattatacctttacagaaaaattacagaatgtaaaattggaatctttgctagaaaactcaaagtactaaaaaaaaagttttcgtatttatctctacaatcttaactctctcaaaaatacccaacataggtaattaatttatttaatgccaaaacttgatattctgtcaaaaattaggctgtttttatacaaaggacttggaagagcccctgactacagtggattctaaactgaaatttctgtatatgaaataactgcagcatactgaaggagaaaatgatcagctatacacacagtagggtgtaaattaattatgttaggtatttttgagagagttaaggttgtggcgataaatacaaggctttttttagacctttgagttttctagcaaagattccaattttatgttccgtaatttttctgtaaaggtataatttatttttcattttgatatcacacttctttccacgtggaacctttgtttcaactctactgtaatctcactgtcctctgaacatatattattattccgaacttagcattgacatgtatggtttcatgtattcattcatcaattgaataccttctattttctaggtactatatgaagtactgaagttaaggtaaataaagttacacatctcaaggacgtagactttttgattgaaggtgctaacaggatatgtcatggtagttaagagttttagaattaggcagacctgggttcaaatacttactttgctacttaatagcagtatgaccttgagtgtgttgcttaatatctctgtacctcagtttcctcatctgtgtttctgggtaaagtccctgaattaatttctgtaaactacttctaaaggccttggcacacagtaagtgctcaataattgttatgttattattaatactattactacttctgccacaaaaattgtcacgttaatctttgagtatctcatcacagtccacactacatcattcttctatgccgtggttcctgaggaatcagatttgatagaaaactccttaataattgagcaagatttattgaaagatataaataattcagtattctctagttgcattatttaacctagcttctgttaattttaataatacgtaagcaaatgaattttaattttatttgtgttaattttatattcagttttataaaattgtattttagcttcagaataagaattatcacccttcccccatgtctacagcaataccactctgaacacaccacatctcgtctgatcttggaagctaagcagggtcggacctggttagtacttggattagaggaatagctcccagagttgctttgtgtgtagtgacttagcagttggacactgctttccattttattattttggcatcatttgcttaaaaaagacttattaaatgaaatattatttattggattgtaggaaatgctaagttcttatgtactttccctggactctgcataatagcataactcagttctctgacatctttcactaccaaaatgaatttttgaaccattatttcacctttcataattttgaagaccaatgtttgtaagaaatatcaagaattatgttgccaccttaatttttaaacatcttctggaatcttagggctgatgccaggactctttagattcattggcacctttgatgaatggcctctcaagtggaaaactactaagactgctcagatgcaatttgcacctagcattgtcatctcgtaatatacaaaaaaatcaaagggagacactgtaattggacttagtaattggaggcctaatttcatatttgaaagttaaaaatggaaatcataggattaaccttcacccaaaggacggacrtacttgagatgaatcaagtataagaagtacttacatatgcttgatgatggcttgggaaaaaggaactctcacgttcagcatgttgattttctttcgttttcttctttctctttccaaaacacagtcacaaatttgactttttagagttgacaaatggcctaggttaaatgtttcacagaaaacagagcagaatttagagcagtattgtattatttcttggttaaactgaattttttcagtatgtttaattggttcatctctatcaagtagatcaagtataaaactttagaaaataatcgtactggtaaccctattaaacttaacaggataggaatagtggtaacagggagaaataaaaacattaaaaagttaaaatggttgatgacagcaggattctgggttagtacaggaaaggtacatgaatgtgaggaataaccagagagttacgttggtaatcctcagagggactgatttggtaggcattattagggcacaagtcccatttacctgagtttcaagagagagcaggaggagagttaagcactgataactcttgatctttgctatagggagagtagagtaatgaggtaatagagatagatgttgggttaaggaaaagaagttttaaaaaatttttgtttttcggatttttttaaccctgggaaatattctaacatgcttgtccataggtgatgtggttcattaaaatggaaaagttaatcaggtaggggagattgggggcagtttctgcagcattgactttaggttggcaagaaggaatgggagccactgtatgaggggtttttttggagaagaacatgagcagcgtacccatggcaacaggtgggagggcaaaatatatggaaatgaatatagataggttattgataggatactgagagaagttcatccaggaagttttcttctgattgcttcaattttccagtgaattttccagttctttaactgagagtatctgaaagagggggagcggaaatgggctaggaaaatgcagaaggaaagagagctccaggagaccatatatttcaagaacacgtggcctgcttgtgtatgtacattacccacttggcctttgaagctattactgggatccagattttattcttttctctcttttggaaagttacttctctctcatttctcagtgcctttttggtagggggaaataaaaaacacgtgtttctttgagcaaggttaggtgtctgtcttgtcctgataaaaagctaattaaacagcaaattattttttgagaatcttcaatgtccagatatagctaatcactcagttgtatttattgttactaactagatgtcaaaattaaggaagaggactattgatattgatattgtggatttcactttgggattctttttcagtttttaaaaaacagsaaaatttttttattcttgttttagatgtycttaatagttgctcctctttctgtcctctacaactggaaggatgaattggacacctggggatatttcagagtcactgttttacatggaaacagaaaagataatgaattaattcgtgtaaagcagaggaaatgtgaaattgctytaacaacttatgaaacactacgcttatgcctggatgaacttaacaggtaatgggaataataggaataggaatgattgtattaatagtctacttacatccctttatattaagagtttttttttttttttttttgagacagagtcttgcttttgtgtttttagtaaagacggagtttcgccacgttgcccaggctggtctcgaactcctgagctcaggcaatccacccacctcagccttccaaagtgctaggattataggtgtgagccaccgtgccaagcctatattgtgattttttaaaaaggaataatgatkattcctttgcttgatttaatttcattttagaattattgaaatatttagttcataataacttactctctgagaaggaaaaacctgcatcaggttttctagaacttcttattctatttcttacattgaatacaggatacttcttcaaacactgattgttaaagaatgataagacttgtcctaaatctcatgtacagccttttatgcagacactgcctctgaactaggtcagtaattttcatgaattatttcaattatgggagtctgttgtgaatatagaggggcaaaaactacacacacacacacacacacacacacacacacaacacacacacacacacacacacacccacacccacacacccactgtagcatagagtgtgagggagaagtggccaagaggtaacaccagtgagataagcagggaaaagattatagagagtattggaaggtactttgaggattttgatctttatcctgagagcaatagagtgccccctacagtgttgtcagcagattaccgataggataaaaatgatcagatttgcactttgtaaataccttagcttctgtgtgtgcagataaaggagagccaagctgaatggagaaggaccaattaagaggcttgttatgtgctgaattgtgtcgcttctcctcaacccccattccacaatttaaatgttcaggtctcaaccccagcacctcagaatgtaactgtgtttagagacaggtctctttgattaagttttaaagaggtgattaaaaccgaggctgattgggtggggcctgggtccagtatgactggtatccttataggaagagaaagagayaccaaggacacacacacaccacagaggaagggacttgtgaggacacagcaagaaggcagtcatctgcaagccaaggggagaggcttcaggagaaaccaaatttgctgacaccttgctcttgaaattcgagcttccaggattgtgaggaaataaattttggttgttttaagccatccagtgtgtggtattttattttggtagccctagcaaaccaatacaaggcttttatagtaatgtggtcacgggaccatggtagtgaggtctgaagtcttcatagttgttccagcagtaggctgggccttggtaaaatcattagtttccatctgcttgtagcctagatttgtctctacagggatacaatttataccttttaggtgaagattaaagcatggcattagaaacagttatctagtaagtctttaaaatgtttagacattatagttatactcaatttgaactactgctaatgaaggagttaatgatattcccccaaagtcaaccgaagtttagaaaattggtaatttttttaaggtgatactttcacatcagcattaaaatgatttagcataggatgaaaatgatgaacaattgatagttgtctcaaattttatgagcacacaaaaaagagagtaaaaaaatcactaattagccatgtggctttgggtaaattagcccatctggaaaatgacagaggatgaattaaatcagtctttgtgaaaactagcccctcaagcccagctggagagttgtattaaaatcaactttaatgagagttaatttgtrtagaataattatgccatttcaggaatacaatttgatgaatcttgaccagggattggtaaactttttctgtaaagggccagatagtaaatattttaggcttttgggccacatatagtctcggttgcatattcttcttttttatttttatgaccctttaaaatgtaaaaactattcttagcttactgaccatacaaaagtggccacgggctggatttggccatgggcagtagtatactgactcctagttttgacaaatgagtgcaatcactatcccaaacaaggtaaaaactatttttatcatcccaggacttttcttttacctctttacagtggcttttcctcaaccctcaccttgggcaactactgattttaatttctgccacttataggtgagtttaagctattacggagcatgtcaatggtattatacaggaagcacccttttgtgtgtgtcgcatcttttgttcagcatgttttttgagattcattcatgttgaggagtgtatcagtgattgttctttcttaatgttgcattgtattccatttcatcaatattcacattttgttacccattcatttgaggatggatttttgggtttttccagttttggattattatagataaaacttcaaggcatatttgtatgtaagccttttttggacatatgttttcatttctcttggagtagaattactgtattatatggttaactgtaggtttagctttagaagaaactcccaaaccattttccacagtggttttactccagctagcaatgtgtgagagttcagttgcttcgtattctcagcaacgtttggtattgtcagtctttttgttttagctgttttagtagatgtgtagtagtatcttgtagtgtaatttgcatttttctgatccatgtgcacttggaaaacaatgttctatagttattggatgtagtgtttataaatatcaataagactagattggccaagatgttgcttaggtgttttctatctttgctgatttccttttcgattggcttacagtatctgagagaggagagttgaaatcttcagttgtaattgtagatatgtttatttctcctttcacctctgtcagcatttaatttagtattttgaagctcttttatgaggtgcacatgcatttatgattgttattttttcctgatgaattgatccttttatctttaaaaaatatacctatttatttctaataatatctcttatcttgatgttttatctgatatgagcatagccatattgtggtacatttcagtagtttgttcctttttattgccgatggtactattatatagctatcccatattttgtccattcaccagttgatggacatttgaattgtttccagtttttgactgtatgactaatgctgctgtcttatgctgagtcttatgcttactgcatgtaaatagcttttcctgtttttattgcagtatatctgttcttaatatttggagtgagtctccaaatattgctttttcatccattcggataatctttgcctcttatttgggtatttagaccattcactttgaatataattattggtaaaattggatatggagctaccacttttgtcaggtctgggatttaattttataaatcaaacttataagctaataaattagcctgttactatttcatggatcctgacagaagactaatctgaggcatagagaggttaaataatttttctaggccttcacaactaagtcagtggcagacatgaggactgaaccttgaccatctaacgccagacctcaggttttgttttgttttctttttgagatagagccttgctctgttgcccaggctggagtgcagtggtgctatcacagctcactgtaccctcagtctcccacctcagccttccaagtaactaggactacaggcatgcgccaccatgcctggaaaatgtttttgttttttgtagagacaaagtctccctgtgttgcccaggttgatctcaaacttttggactcaagtgatcctcccacctcggcctcccaaagtgctgggattataggtgggagtcaccatgcctggccaaaccttaggtttttaaccaatatactgtaccaccccaaaagatgttttgcaattagataaatgtaataaattcttctatcatagcatcagtcatattttaattatttcttacctgtctgtccccttagactgtaagctctttggtgtaggaaatttttatctttaatttctgtatctcagtacttttagcacataagagttgccaaataaatgttttttaggtgactttttttctgattgttataaatattgttataaatattaaataagaattctgaagtagaattatgtaactataaatcatatatttataagattagaggaatgtttatgattttatatttatttatttagttgaatttatttgttcaaatgcctttattttgtttgtgtttggcaaatatttaaaataattaatattttacctgagcaaatattaagttgtttttgtgaggatagtgctctgtgcatttatcacagatactctgtggaggggatgaacgtgctatgaactgaatgtgagtgagctgtagtttttttcttattgctgttatattttttacttcatttcagtttttatcaaagttaattatgtatatgatttaaagagccaaacatgataaaaggcttttagtgaaaaactgcagttcactgtccgccaattacctttacctcaactcttactgatcttcatagtctttacttccttattgctaaagaacatgtttatgctgcaacttttcaatttttctttagttttcagcatcatctattgatttctttttaaggaaaattaggatttttgcccttctcttgcccgctttaggatgacctggcccatctactttgtgcagtgggaggattcttaaacagactattgaacatttacatgactccaatttccagaggcatctggagccaccaattcttaacttttcaagaatgtgtaaataatatgaattagattgcttcttggctttttccactattggcataggacactagtctctgcttttgtcagccatcttgtccatgttctttttagcttctagaatttttgctatttttctcctgtctttgttcttgaggcttctagcttttttcagctttatattaagaaaatgatgaaacctatagaaaagttaaaataacagtacatgagcatctagattccaacagttttgtgtgtgtgtgtgtatgtatgtatatacattcaaatgttggcaaaatgtaagttaatgtatgtaaatgtgtgtgtctatgtctatgtctttgtgtacggtggtggtaatgagtcatttcagcaagttgcataaaacatgacatccttatccctaagtattttagcatggatttcctaaaactagtgatacttcttgtcataccacattatcattgtcacacacaagaatattaatagcaattaaaatttcctcagttattctcaaaacatctttaatatcttatgtttataaagcaggattcaataaaggttcaggtgatgaatttggttgtctgtttattcttctaatctacatcatttttccaacttgtattttttaattatatgactttttgagaggaccaggccagtcagttgttttaggatatctcacatattagatttgtctgattactttctcaagatatattcatctgtcatctgtattttagtaaagtggttttggcccaaaggcttaaatagattcagattaaacatttttggcaagaatgcttcataaatgatgctgtggacttcatattgcatcacttcaggaagtacctaatgtcaggttgtttcactgtcagtgatgccaagtttgtcccacaggttaagaaggttaccatcatcagatctctccattgtaaagatatgtttctccctttgtaatgatcaaataatctgtggagtgatactttgccaccatttaaatatcctggtatccctcaatccttttacttagtagtattagcacatacaaattgttcttgtctgaatcagttactttattatgtttggcaaaataatatttttctaattttattatttcttttctacacattaattaccggtattctcctgtaaaggaaagctttctccattaattaggaattaaccacaattttgactttaaaaaagcaaggtgaatgctcgattctttttctttaatgactaatttttggagtaagaagttagcataatggtcatctacaatggtggcaaagtttcttacacccttcgcttgcttgcccgcttgcttgcccgcttgcttgctttctctctttctctytttctttctttctgaatattgctatggacttgaggattattgaagtatatttgacataaaacgtacccttgtaagttagaatgatttttagtgaattttaaaagttgtgctatyaccacaatctagttgtagaacatttccatcacctcagaaagttatttgtctatagtcagtccctgcttccatctccagtccctggcaactactgatctgctttctctttytatagatttgccttaactgggtatttcatataaatggagccattcaatataaagtctttggtgtctggcttctttcacttaacataatgtttttgaagttcatccatattgtagcacatttcagtagtttgttcctttttattgctgaatggtactattatacagctatcctgttattttgtccattcaccagctgatggacatttaattgttcccagtttatggctatacaaatttgctgctgtgaacattcacatacaagtctttgcacctaagttttcatttttcttggatagatacctaggaatggaattgtgaggtcttatgctaagtatatgtttaactttttaagaaaccgccatctgttttagaacaatcgctgtgcttttccaaaagcagtgtttgaggattctggtttctccacatccttaccaacacttgatattgttaatcatttttatcatagccattctagtgggtgtgttgtggtatttcatgttttaatttgcagttctctaataactaatgatgctgagaattttttaatgtgcttatttgacatctrtatcttcagatagacatttggtgtctattagaatcttttgctcatgttttaattgggttgttttaaattttgttgagttataataatttttttttttgagacggagtcttgctgtgtcaccaggctagagtgcagtggcgcaatctgggctcactacaacctctgactccctggttcaagtgattctcctgcctcagcctcctgagtagccgggactacaggcacacgccaccgcgcccagctaatttttgtatttttagtagagacaagatttcaccatgttggccaggatggtcttgattttctgacctcgtgatccacccgcctcagcctcccaaagtgctgggattacaagcatgagccactgtgcctggctgagttgtaataattctttatatattctgtatacaagtcctgtatcagattatgatttrcaatatagtctgtagcatgtctttttattttcttaatggtgtcattggaagagcaaaagtttttaactttgatgaagtccaacttatcacactatttttaattgactataagttttgtgtcatatctaagaaatacgtgcctaatccagagtcgcaaattttttttcccattttttaaaagtttgagttcatatttaggtctgtgatctgtttttagttaattttcatgtgtggtgtgaagtaagtgtttaaattcatttttttcatagaactcctggatttttgtttattcaatattttcaattgtagtcaatatttgtaacaatgctcaaatattccaattaggctggcgtctctattctttggacatattcgcatttgtctttagatacatctgtgcttttcggctgttcagtgtttcccccaacatatgcctgaaatcagctgtttctccattcttccgtgaggctctcattcctttcagtaaagagamcactatgggtgctcmttgctactggggtaacaatcaactctaaactttcttagtggacagggctatggaatacagcttttaaaaatcatgagtttatattgatatttttcattcagaaaaatattgcaataaaacattgcaagttttatttcttttatatttgtttttctggtttgttactttaaaaaattcctttattgtcatttcagtgatgtttaaatgaaatttttctttttaccatcattaaagaatgtctataccctttcttttctacgcattttatttttgtcgactgtccaagggtgtgaccatttaactaagtggktaagaatccaatggagtcatcaaagagtaaaaaggaaaamataattccaaaactttgatagagaaagctactgtctaaaattgtaaggactaagaaaggaagttttctcaacctcacccttcttttttcttactttatagtttggaatggtcagctgtcattgtggatgaagctcatagaatcaagaatccaaaagctagagtaacagaagttatgaaagctttgaaatgtaatgtccgcattggcctcactggaaccatccttcagaacaacatgaaggaactgtggtgtgttatggactggtgagagaaaacactttttaaaaaattgtttaatagttcttcagctgaatackgtcttgtttgctaatcattagtttccaaacaaacgaaacagtcatttgtctggttttagatgtgtttgatcccagatgtggtatacacagtagagagtcccatgaaaacctatctttatatatattactcttggtccctgaagtaaatatacatgttcactgccagtttcatcctcatatcatagttagaacctgaaactgtcgtaaagaaagaacattctgttttcttggcttttgtttttgttaccgttgataatcaagtaatgtagtatatctcttagaagcaagaagttagtgtttttagataataaagcccttacatttttcttattgtctttataaagggctgtgccaggccttttagggagtgggacctacttcaagaagcagttttctgacccagtagaacatggtcagagacacacggcaacaaagagagaactagccactggccgaaaggccatgcaaagacttgccaaaaagatgtctggctggtttctcaggcgcaccaagactcttatcaaggatcagttgcctaagaaggaagaccgggtaagaaccgcatttgtatatattattaatttgtggtcatattttttttttcctttttaagaaaaagtctgtctcctgtggcattttgtaaatacagttttttgccttttattctgtatggaaaaaattgttgcgcgcagaatttcagaaaccattgattgagctcagttgttttccttactgactttattaacctgttagctaacaggtttattattagtatacattaaactcatttctcatcaaaaccttttttttttttttttgagacagagtcgggctctgtcacccaggctggagtgcagtggcgcgatcttggctcactgcaacctccgcctcccaagttcaagcgattctgcagcctcagcctcccgagtaactgggattacatatgtgcaccaccacgcctggctaatttttttgtatttttagtagagacagggtttcgccatgttgtctaggctggtttcgaactcctgacctcaggtgatccacctgcctcggtctcccaaagtactggaattacaggcgtgagccaccgtgcctgscctcatcaaaacttttgatgcagtttttccccagtaaagaaggaagagcttctctctgcagtgtgttttctgttcacacgttgtccttcctatactgtgtactatccaccacacagtgtattctttggtaccttaattctagctgtaggatcaaagtggttaagagctttttaaaaaatatataggtttgtttcttgtagaatgctatttgcagttacrcaactaacctaacttttagaatttgtaggaaaactacattgttaaattgttcaagaaaatatgaggagkggacttcaagaggattttaaaaaaatatagtagtcttcttttatagttcttcatcttgtgtttcttctagcttgggcaatggaataaakgttctgtagattactatggaactaaacctaattaatgttgtcccaaataagggcaatcctatgaaatgccctctaattttagtgtatcctcttgattgtttctttaaaaagatagatttgaaaggaaaatacgatattgatatgcaagttggggaaatagatacatctgacttttgatatttatctaaagcaaatattgttactaaattgagatacttcatgaactctcacttttaaaaatgttttatgcaacttcatatatgtgatttagctatctgtctagtaggaacagtacaaaagtataagaaaagaattgttcatagaggtttagagcttggcctctgaaatcaaatactatttgattagagtatttgtgacttgcagcacctctgcttagagttttgtgacttggagcaatttgtgaggccctggaacctgggtttcttcctctgttaaatggtagtgatgataatagtgcctgcctcacatggttactctgaaatgcatgacacataagaaatattgagtaattggtactatgtttaataataataaataactgaagatacctttgtacttcaatcattgaccaccaacttctatattctctttttttcttatatgtacttttatatttaaggttggggtcaggctgtactaaatattttatataaacattttttaaaaatctagcatcaggagggggcaggctggatgtgtgctgccatgcatccttcttcagtctggtttgggtctttaaaaaataaaagataaaaatagcttccaaaagagttgtggtcatcctggctaaaggagcagaggaaatggaggcagtcagccctgtagacatgatgagacaagctgagattaaggtcaccattgcaggtctggctggaaaagacccactacagtgtagctgtgatgttgttatttgtcctgatgtcagtcttgaagatgcaaaaaagagggaccaaatgacacgatgtttctaacaggaggtaatctgggtgcacagattttatttgagtccgctgccttgagagagatactgaaggaacaagaaaacgagaagggcctcatagctaccatttattcaggtcctgcaggtctgttggctcatgaaataggttttggaagtaaagttacaacatacctacttgctaaagacaaaatgatgaatggaagtcattacagctactctgagaattgtgtggaaaaggacggcctgatttttacaagtcggggggcctaggactggcttcatgtctactcttgggattgttgaggcctaagagccaaagaggtggtggctgaagtgaaggctcgacttgttcttaaagactagagcagaaaaatgtgaccatcagttagagaaataagccatttggaatccattctcattgtgttttttaaaaacagaaaaatggtaggttaatatgctcagaagccatcatcagtcctgctgttgtgaagtaacaactacacagagatttctcaacctacaaattgtgtctgtttttttttttaagacggagtctcactctgtcacccaggctggagtgcagtggcgtgatcttggctcactgcaagctccgcctccctgggttcaagcgattattctgcctcagyctcccaagtagctgggactacaggcgcacgccaccatgcccggttaatttttgtatttgtagtagagacagggtttcaccatcttggccaggctggtcttgaactcctgacctcgtgatctgcctgcctcccaaagtgcttggattacaggcgtgagccaccacgcccggcctgtgtctacatttctgagcctgtttacagaataaacatggcatttagggaaaraaaaaattagcattgttttatagagacattactgtatttgcttgtatgcacctttgcctgtttattgccaataatctgatgtagtgatataagcatacaaatatttacaaatatttatatgtttctattttacaaataaaaaaatgtcactgctttgtccctgaagtcaggaagtgccttgccagtaaaggactaccttttaaagttattttgatgttggataatccttgtggccacccagaaccccatgagttcaacatcaaaggcgtcaaagtggtccacttgcccccaaacacaacatgtctaattcagcttctagatcagagggtcataaggacctttaaggctcattacacctggttctctatggaaaggattgtcaatgctgtggagaagaaccctgatagaatatcatgaatgtctggaaggattacaccatttgaagataccgtcgttgttatagaaaaagccatgaaagccatcattcctggaatagtaaattcctgctggagaaaactgtgtccagatgtgcatgacttcacaggatttacaacagagccaatcaaataaatcatgagaggcaaaaaaggtgaagggtttcaagagacggatcttggagaaattcaagagctaatttaaagaaattcaggacaccacaccagaggaattaatcgaagatgacttgatgcagataagtgctttcaaaccagtgccagacgatgaggaacaagacgcagaaaaagcagtgccagaaaacaaattgacattaaataatgtggcagagggattctgattatttgagactgcttttgacttcttttatgacatggacccttctatgatatgggcactgaaactaaagcaaatggtggaagaaggactggcaccatatagaaacatttttttagagaaatgaaaagcagaaatgtcagacagaaattacgacatgtttctgtaaagttacaccaagtgtgcctgcctctcctgcctcccttgacttccttttcacttccttcacctcttcatttctgccacccatgagaaaacaagaccagcctctcctcttccttattctcctcagcctactcaatatgaagccctttatgatgacctacttccacttaatgaacagtaaagatattttcacttttttgtgattttcttaataacattttctttttttctagttttatcgtaagaatataatatataatagatacacaaagtagtgtttctcaactatttatactgttgttaaggcttccagtcaacagtaggctattagtagttatgtttttgggaagtcagaagttatacatggacttttgactgtgtggggagttagcaccctagcgccatccatgttcaagagtcaactgtgtaaggaacatcatttgtttgttcatattatgatttcttttaattaaaaaaattctatgaggtttatttgaaagtgaaattatactttatattatccagggtggggtggagagcaaagaatataagacagtcagtagaaatcatcataatgatgtaaatagagggaaaaattagtttatagcaattttcactattttttttgagacagagtctcgctctgtcgcccaggctgtagtgcagtggcgtgatctcagctcactgcaacctctgactccttggttcaagcgattctcctgcctcagcctcctgagtagctgggactacaggcgcgtggcaccacrcccagctaatttttgtatttttagtagagatgaggtttcaccatgttggccaggatggtctttatctcttgaccttgtgatccrccctccttggcttcccaaagtattgggattacaggcgtgagcctctgcgccyggccagttttcactgttataatctatgaaatcagatgtagattatgatttttattattgktataaacaaaatactaataactaccttgtattttatcttggcagatggtgtattgttctttgacagatttccagaaagctgtctatcaaacagtgttagaaacagaggacgtgactttgatacttcaatcttctgagccttgtacctgtaggagtggccaaaaaaggagaaattgttgttataaggcaagcatttcaatatatctttataatcatgcttttgattacatagtactctcttctagtgtaaaagaaagtagcagatgataaaataccttttcctcagacagttctttaaagctatgtcttaaaaaatagttttcaaaaatattttacaatatcaaatagtaatcacatataaaatacaatattcaaatatattttcaaaaagttaattgcagaaagtaagcttaattttgatatcctccattttagcttttcttgggaagtatcctttcattttgaaatttcatttcattttcaagaagtttctcattatccactaatagtaaacgaacatactcttgtataggaggcttaaaatactattctgatgttaratatagtgtcaatttaatagaaactgagtatcaaagaaagtgttttttttaaagaaacaaaatttatttgtactttttctaaccttttgtttatatttcctgctcatgtttcacctctgttttattaaattatgtcacatatctgtgtacgtagagaaaccctaagtgaatatttatctagtttgatatttatttggtctcatttattttgctgtttttaactacttcccttttttgtaatagcccagtttcctaggagccttggagcataaatgagaaggggtctgcatagcactgccactgcacttagattttgttaccaggcacctcgtaacagcaacatttccatcactgtgtgtcatgaggataaatactttctgtaataaggattttctccctttatgaaaaatatagttgtattatgatttaccaaaagtatgcttccrcattagctatttgtggatattttgtgcaatagttgaccatcattttcttggaatttattgtgccaaagtaacccgataataaatgttattgtaagtgatacattttatgatgtaagcaggtgcatagctatgctggtcctttttattttctatatttttctggttacagaccaattctcatggtgaaacagtgaaaaccttgtatctcagttaccttacagtccttcagaaggtagctaaccatgtcgcgctactgcaagctgctagtacttccaaacaacaggtttggttagcattttacatttctttgtgatgctattgttgtgaatattttataaagttttaaaatagttattaaataaagtttttgtggatgaaatttaagaggaaactgatttgcttatttttaaatgtagatatcaaggagtatgtgcacttaagtttttaatcaaagtgaacaaatttaagcttaatttaaaataagaactatcttttatgyctttaataatgttcatatctttatttttcaaaacagtctttggtataattactaaatarcatatttgatgggtcagttctattcctctaataatgtctgtaatggtatttaatctactgggtaaaatgaggatttataataatttgtatattaaatattagggctgtttaccaaactggcaaaaatcagtaatttcaaagtttactttggttgtttccttttattctagagcacacataaatgaaaagatgtttttgtaatgattttatatttttttctgttatagttgatgccatttaaatgtaattttgaaatctcataagaatttgatattgttctttgatagtactctttactctttgggagtatttagcaccttgttttggaaatcttaaaaaattgaaaagtaatgatcaagttaataaccacatcattaagaattcagtgccatacgtttaacatataactttaagagtttttgaattcttagtctgacttagggaagcaaaaatctttaaagtaatacattctttctaaaaagaatttttttcataaattatttcaatttatacaggtttgaatgtgttaagtggaaatatcttttcttctgccttttcccttcaaggaaacacttatcaaaaggatatgtgatcaggtattttccagattcccagattttgtgcagaaaagcaaagatgcagcctttgaaacactttctgaccctaaatacagtggaaaaatgaaggtaagtgctcctctttcaggttgcatacagacatgatacacaaaatatttattcagtggtatgacagagacaccaactaatcagaacaggtgctcagtcattcagaagagatggtggctatggacaagtggtgcarttgtatcagcatttactaggtcactatgaaccccgaatacagatggtgtgcactcgataggtcctctstagtagttgcttcaaatatacttcaaattttccttattgatatattggacttatgccctcttaaaatgcgtgtgctgttaccacatagataatagcttgtcttcagatgtttaaggaaataacctaccagaaatataaaagctaatgcaaaacaggggggtaaggaaaggccttaccttggaattagagaaaggaatttcttgaagagtttaagatgggcaaggtctgtatgtctagaattttctgcatgttgtttttacttgcagaactagatcgtaaagttgcaaatagtcatttgtcatacacaggaaaattgacctgtagctgtgctgctcttggtaatgtgttaccgagggaagggkgrrraaagtaaggctaagttctccaaccttgacccaggccttgggcattgcctgtggcagcagcatgaaatgctgacagcttcctgcctccttgcaacaacagagtttgtttaaccccttagtgtctatcaagaatctttatttgtagattcacagatttttacagaacaaaactcaactttgttatagtttttaaaaggtaagttctttttgacataaaaagaataaaaaggaagtagttcaaagcagtttttgttttttttttatagaaatacttttagcaattgatctagataagttcatcatggtttagtttgcttgggacctctaaaatcaatgaaataaaatagaaggtaggaatatacatacatacataaagactattgcattaaaaacttgcttttaaaaaataaatgtttatattaatgaggatatcatgtgatttattaccacaacaaataattcaaatctaatgatatttcctaaggtagcaaatttttgtcatccatttcattgactttaattatttttaaattaaaatatataaaaagtccggtttagaactgagcacttactatcccacagtttaaaccagtagaacatttccagaaattatagcctcctctgaaaactgcattagtcattgctactcatttaaattttattccctgtgactcttcactaaaaaattgccagtcttgaaattaagttttataactctgcattttatattttttatatattcattaatatatacttgtaaaatatacttttaaagttaatctccctaggaataatagtgtctgattaagagaatgattaaatttaattttattttaatttttaggagggaaaaggtaagcataaattgttgctggaggctgggtagtatttttatatgtgaatgatgcaggtaatttacttggtttgtgagagagcaccagccaaacagatggatagtaataagctagggatatatttttaggactatgttaaatcatttgactaacagcatcatctggtcatatattgatttggtaatgcagacttacaggcttatcatagaatcattgcctatgggtttaagaactctaagaattgagttgcatttaccttttgaattcaggtgataaaagatctttgtttagcttgtcttgtcacaggtcagcctgcaggtgcaaggactctgaacagaatgcctgctataatctttatagcctcaaagctacacttatgaccccacctctttctcttgagtgtcagagttttgacctcaactatcattcaaggggttagtcacaagttgcaatcattcacctgatgaaaatcttcacttttctttctcttgagaaatgccgcagagccacttactgtggagggtggaaaaaaagacaggaatccagcttggtgctgctgaagtcacacaagggtcatgttcatctttctaggcctgactgaccaagttgaggaaagttaagatccaaggttccttgctgttaacacccccaaataatacgattcctttataggtggattgtcttgttctgtggaggacaactgagtgataaaacattgggtctatattgttaagactccaacatctgttgattacattgtcattttggaaatttctgggatcttaatttatagtcgttcatttagttagtctctttaaactagcctaattaagatctccagtctaaaaacatttacttttcctgtgacttgtttttgtttttactgtaaaatacttgaaaacacttaaagttgcaatagttatgataccaccccaaataatgagaatggatttctatacaatatatccttggtttaaaatgttaatatcttaagaatgaaaaacaaaccacagactgggagaaaatattagcaaaacaataaaggactggtttacaaatatacaggtaactcttaaagctcaacaatgggaaagcaaacaatccaattgaaaaatgggcaaaggatctgaacaggtacttccccaaagaagataatagagatggcaaataagcatgtgaaaagatgctcaacaacatatgtcattaaagaattgcaaattaaaacagcaaggagataccactagatacctattagaacggccaaaatccagaacactgtcaagcccaaatgttggtgaggatgtggagtaacaagaacccccatctgctgctggtgggaatgcaaaatggtatagtcactttggaagacagttcagtggtttctcacaaagctcttaactaaaaaatattaccttaaatagtcttactatatgatcccgcaattgtgccccttggtatttacccaaatgagttataatgaattaaattttattgagttttaatgagttagaaacttacatcccgacaagaacctatgagtttatttataattgccaaagcttggaaacaactaagatgtccttcagtaggtaaatggattaaaaaagctgtggtacagccatactgtggagtactatttagcaataaaaagaaatgagctatcaagctaccaaaagacatggaagaaccttagatgcatattgctgagtgaaggaaaccagtctgaaaaggctacatactgtataattccaactatataatactatcaaaaggcaaaactatggagacagtaaaaagaacagtggttgctatgggttctgggggaggaaagaatgagtaggtgaagcacaaggaatttttagggcaatgaaacaattgtgtatgatactgtaatggtagatacatgtcatgatatatttgtcaaaacccgtgaactatgtaacacaatgaataaaccctaatgtaaattatggactttagctaataataatgtatcaatattcactcatcagttgttacaaataaaccacaccaatactaataatacttgatgttatattttctaataatattattaatacagatattaataagagaaagtgtggaggaggttggaagtagggaaagaggagttttgtgcattttctactcagttctgtaaaacagaaaaaataatatctaccaatttaaaaagtcttatgtgaaattcaaattacatacttcatatagaatcagttattttattaaaaaatgaactaaatgcaaataaaacttcatatgttctccaaatgtgaaagtaatgtttacccgatccataacatttttatttaccatttgataaataaatttggttatctgagtagaagttttttttaactccatagctttttttgagggactagggggaggtagaggtcaaagttagcacaatagcttctcttgattgagtaagtgttatattgagtattttttttatttaaaagcttaaatgtttatcattaaataaattgttttagtgtttgtttcatctttcagaagaatttagactttgtatagaaaatttctttttcccctctgtggattgcttttccacattgttctggagctgtcattgccagatgtggaaataaaagtaacagtgtgactgttatacacaaggctttggactgtttgtttcctccctgaaagcactgtgtgtgggggcagattactggcattttgaggtcaaaatcaaatctggaagtcagagcttactgtaaatagagaaacaaaggggagaaaatgagaagaggtgtgtatctgactgattattctaagaaaataaatatcaagacttttagaacctagatgtaattgaacacatttcattacatccatctagggacaatttaaatacttcctaaaaggaatgctgctctataatttagtttcttagcatattgtaggtataaagaaagtgtattttggaaattaaattaatccatttaaatgcatcccataatccaaaatgcttcctttttattaaaaccagatgagatgaaataaaagtctttgggaactttacctccttattgacaatatgatgatgaataacatttgatgtaatagctaatactttatttctctaacytggaaaaaatgaaaggaattagaaaaaatgaatgaggttagtattgtatgaaaataattttaaagaaattctcaagtgatgtttatatgtataaagtgtacttttagttggaactggttcactgattttctgtggttcattttcaggtccttcagcagcttttaaatcattgcaggaaaaacagagataaagttcttctcttttctttttccaccaaggtgagttcatctaaagtatatccttgattggccagcctcawcttttgaggcataaagaataaagcatatgcctacatgacaccttacagccacattttctcttatctacacagtaggaaatagtgaggtaagcaacttgaagtttttaaacagacactaaaatttcaattgtttcagggttgctaaatatcaaactcaaagatagatttttattttctgttgatgttcttaataattacaatgttctttaagacatttcatatattttagaacttaaaaaatagcatgcatatatttatgtaaatgatttgaccagtaatattgtttgtttcttaaaaatgaaaagattgatttttaaaacaagttctgaatgttaaagccataatgttgcaggataacgggaataaatatatgggtcagaagtgagaaaaatatttattgttcttggaattataagaaagaaattatgaacaccaataattaatacttaacaagtctcaactttgtaatggtctgaaacttacttaaccaagattcatgtttgcccatcttcatacctctcgtctagttgcttgacgtgctacagcagtactgtatggcgtctgggcttgattaccgacgacttgatggaagtacaaaatcagaggaaagactcaagattgtaaaagagttcaacagtacacaagatgttaacatttgccttgyctctacaatgtaagaaaattaaatttaataactagatttttatccarttgtttttgagatttagcataatttttaaaactattactggattaatttttaatggctatgcttatttagaarcagcaaaaatactattatgaccgaaatttcaatgtcttaagttttagctaagcttttctctcatttcctttatcaacattgaattcctcttagaagtctgggtttataaaggtaacaataaaaaaattgatacttcctcctatgaattttccatggtagtgttttgacccaagtctcctggtgagaataatcagacttcttattaactggataactgagactcactgtagcagcagttttcccactgtgtcagggagcccttgagagcccactggggctaggggctcacgtttccctcctctgcctctacctcatctcaactggagcagctctgcagttagagtttttatgaaaggtaaattggttctaacccctatgtatgaatatccctttaagaccttttagagaatatacacacttctgaaaagatttaaatcaacataaacacctaagtaagattaatcccattttaggaaggaacagatcaataacttttgacatcctgtgtaataagaattttatagattcactcccactgtctttcagaatttcartggactttaaaaataaacatatataaaatgcacaaagtaaaaattaaatcagaatagaaattaacttaaaatgaggaataaaatatacttatgaatgagccaacattgttgagcactttaattattcttgaattcctaccactaaggcaaatggggaaaagctttggattcccattttcctataaaggaatgcaagaagtaatttttttcatgcgtccttacatacagagcactaaatgacatagaatactgtggtcaattaaatttcataaaacatataagcattctaactttaaagtgtttccagttgatagatgcactaaacaatggttccaataatagactctataatgacaagcagtagtctcttatccttcttctgctcacttccagctcatttgctgagatcctccataaagttcctaattaccccttcacctctatctgtcagaaactgctatttaacctatccattgaatttttaattttaatcatacttcgaaaaacatctttttggatggcatttttgctctattaactcctgtacttggtggtgctgatccttctatttgttgtttcctctggctcttgcttatggttgatagtttcttcatgtttggtcattttttttcttttgagcttatcttcaatgggatttttttcctctggaaatcctttggagaccggttgtaggagttttctgcttgtgtggttttgctttggcttctgctgggcatcctgacaagacaagggaaaaagttttggattcctatttttctgtgacaatttgagtaatttatttcataagtcattatataaggaaccttatgtaatataataaatacattcttcagctgtgttttgcaaaagacacataagctcagtttttgtttagtttctatcattttgcaagggtttatatttaatatgttgtgacagaaatgttttcacattggcttagccattatcttgccagagtacaaagtcttcattatcttttagtttatcaactttacataagttggaacttctcttaagaaagatgattaggctactttcactactctctccccgtttttttctcacartgtttgctattttaaaattatttgtctataaactacttttgtaactttcaatctttgtacttctgcattagatccattgaattttctcttagatctttttcctggatcccgtgtcttcttctttcttggtttgccrccatgttttactggaaaatgattcaagttttgatgtttggtccattaactttccacatgccttctaagtctttgtaatgtgtggtattagcattagcacacacccacccacccttctacttttgtcacctatacatattatgttaactattttaacttttactttgtcaagggtattaatgttttcaataagccctgtaccagtaaccggttattgtccataggttggcattaaaatttgaaggcaaaaaagcgtttacattactrtgtttttataaactaaacatctttaatgcaggggcaagtagtgctaagataatttttcttaatgttcacgaccttttggtcaatgcaagatcagtcttaacatcaacctcatatgacttctctttcctaagacttcatccatgttttatgtttgcactgttcagttcacttcaaatttcaatcatgactttttcggtcttttccccctctcagtctgtttctgccctttgtaataatcctcaatgttactaattctcattcacacattctcttctgttgagtcctctgtatcctgaacctgcctcctgaaacttttattccttagtttcaatctggcccagttttctaggcctgataaagaactgtcatgttgaagctttctttcactgctcttctgtgttggatctttttcctgggttccatgctgtttttattcttgacttgcccctttgttttcctaggaaatatcctctggtaactttttaagccagaatatataggaagtaaattttctgcatctgtaaatacagaaaatgtcttttattgctctctcacttaattgatactttgtccaactatataattctaaattgaaaatcatttcctcttagatctttgaagggcttgcagcattgttttctgatagatggtgtggctaaatagatgtgcagtgccaatctgattttcattcctttttgggaactcgtargagtttttcttcatctacactattctaaaatttcacggtgatatttgagtcttggtgtggatcttcgttcatttttttgtgctgggtacagtaggcttgtattctgaaggcttatgttctttttcaactctggaaaatgcttttttattatttctttaacaatggccttttttttttcttcctttttctctgctccctccctctggcatgccaggtcatcagactttcaaactttcaaactatattggttctttaaatctctgaacttttctctcagactttgtctttttgctctgttctgagaaatgtcatttttcgatcttattattttgtttgaaatgatcacttttttttttttttaagacagtgtctcactctgtggcccaggctgtatggtgcaatcttggctcactgcaacctcygcctcccggatttcaagcaattctcctgcctcagcctcccgagcagctgggactacaggcctgtgccaccccacccagctaatttttgtgtttttagtagagacaggatttcaccatattatccaggctggtcttgaactcctgacctcgtgatctacctgcctcgccctcccacagtgctgggattataggtgtgagccaccatttccgccatcacatttttaatctaaagtttttcttgctttctgacctcttttgtttttggagttaccttttgttttagaacatcagtgtgttaaactctagctttttatagtcatttcattcagtttatttaaagaatgatcatctggcatttttcctggggtttgttttttgtttttggagaatcaatgaatttattaatgagtttgaggaaaattggagtttttaaggtatgaagccaccctatccataaacatggtatctctttatatttatttaggttttcttagaagcattgttcaaatggatacttcgtttgaccttttataatacttaatacataataataaaacttatttcatcaaagacatgtttgtagaacattaagatgtagttaaggtgtactttctgatatacttatttgatacaggaagagcatgtggcagacctaaggaataaacagcctgcatactcattaagtgtctcaaataccagtcctcagttcgaaaagagcaatattaaaattttttttgcttaacaagtaaccctttgctgttaaccatgtaagaacagagtgacaagttttaaagtttaggtttctgagttgtattatcatcaaagggagaattatctcatctgcagagagagagagagtctagggcctttttcttcttctttaaagggagctttgcttcttcagcaaggactgaagttattacttcagaatctcttggaagattgctacctcaactagtagagatcttatctgtggctcatatatggcatctgagatggcatcatacatggttatgcctgaccttgccatcaagaaggtaactggaacagttgattagatttattcaacatagaaacctttaacttcttttctgcttttttgctgtctaaattccacccaatcccctaacttatccatttttttaatcctttctaatactttctccctatcccacctcattcttttcttagagttcagtcaagtctctatgacatcttcatggtatgtctaataagcagttttccaaaggagaaaattcagtttctactgagcactgaactttcaatcaggacatttgggtttgaatcgagacacttgctacttaggagaccttgaacaaattaatttttgtgattgtcaattttctcgcctgaaaaatcaggatattttgcttatagaagtcttcagaacaggccaggtgcagtggctcacgcgtgtattcccagcactttggaaggccaaaacggatggatcacctgaggtcaggagttcgagaccagcctggctgacatggtgaaaccccatctctactaaaaatacagaattagccaggtgcagcggttcatgcctgtagtcccagctactcaggaggctgagacgggagaattgtttgaacccaggaggtggaggctgcagtaagctgagatgacgccactgcactccatcctggacaagacagagcaagactctgtctcaaaaaaaaaaaaaaaagaagtcttgagagcaaaagaactagcatatatgaaaataccttgcatagttcctgatatatagtagatgctcaataaaggttaatttatttgcatttttgatagaaattgtaggagaaaagattatcatttttcttcccctggatgattagcatccagtgtaaagcattatctaagtgtgagttgttttgtgatacagtgtaggcagctgatgagggaaaatggcaatgcaaagcctcagaggaaagcctgaaagacagctgggctcaggaaaacagttgaggaagagaaagaaaatcattgtgttcttggattttggttttgccttttctttgtaaaaatgtaaaaatttatcatcgttgtcttacagagtattaaatacaggatatgtagatcagatagttcaaaacatgaaaagatcacaattattgttatttaaaatctattaaattatataggcagctggaatcttcaactcagtatacaaacattatatacattcagttttgccaaaagtttcctttagaaattttattccaaaagaaataagtagtatgctgatagaaaaaaatgaatctagcaaaaccaatatgtgatttttatactaataataaaaactgccaaaaaatatgtctttagtgacttctcttcactgttaccttaaccacaggtcaagttaaatgaagacaaaacttttggcttccatttaagtgtcaaaaagactctgtagcatgaatactaggcacaacttcattcttggttttgactttcagaatcatacactagttgactacaaacagctttctaagcaaaccctataatttgaaatacaatgctttattcatacttactaacttgtgaggattaagttaaggatttggggtaccatactgcaaaagtaaaattttccagatgatataagtacctctaggtagtccaacaccaggaatcatgagctttgaarggatcaggagaaacatcattttctgtctctcataacattattccaaaacactgtcaactttcccagaaagatgaggacatttcttttgttatgtaccccaagagaaagacattctaaaccactcttttcaaataaataatgagaatcatattatatgccttttgttaaaatctgcctttactgctttattttgtctcagtctcacacctttttgttcaactactaatatcttcatggacccttaatgtgcagcaagaaaaataagagaatttttgcctttgaagagcagtataatgcaataaatgctttactggagtttatgtgtgaagattcataggcatttaagaaatagatagatcaaaaaatcccatagaaggatggtgatgttttaactggttctttagagataagattttattaaaaagaaaaggaaaagcaggttttggtaaagggcattttaggcacagagaatagcataggtaccaaaataactagagaacttatgtgtttagtgcttaggatatgtggaggcaacagcttgggtgtatgactacataggagaactcatgagttattttaacgaagctcagtttaacagagtgtaagtatccactctgtgacaggccctggaggagacacgtctcttaaagtttataactcaaaaagtagaggggtacaggaggagttgttcagaaacatgtaaaaggatagttcaatacagtatggcgaatgcagggtaggaggaggcacagaggagaaagatttagttcaggctttgttaatgacacctgaaggacaaggaaaagttagccaggcaaataagatagcagagaaaattgtatgaaagcaactttaaatgttttggtcacttgtggtatagttatcaagaatgactggtgtgataccagctgcagagacggtaggcctggtcattgaggccgattggtctctgatgaataggaattaatgggttttaagctacaaacagctttctaagcaagccctgtaatttgaactacaatgctttcatacttactaacttgtaaggattaagttaacgatttggggtactatactgcaaaagtaaaattttccagatgagtagtacacttagttctgtatattctgtgcttaaaataatttttatgtaatgtgagaatgggcatgggtgtaaggtctgaagtaagagaggacaatcagaagaccaaagaagtaatacatgcaagtgcaatctaataacagctctgaaaagggcagtggtaataggaatggagaagggactcaagagaaaaacatttctgagctaaatatgacaggacttgatactggttagcttttagtgggaaagggaagtagtcatggagaagaagaagtctatagtgatacttagcatggcttttgactttgatgagtgagtatatgggtggtatcaccaggaaatatatggagaaaaagaactctgggtccagggaagtattagatgtagctcattataaaattagcattgatgttatttcatcttgttctcttccttttggagagagaacatgtggcatcctgttgcagtgtaactcttggctctctctgtattcactatgacaagcctgaagcatatgcggtagcaccctgactgcctgtcttgtgatcaacatgtgatggtggaaataatctgtacttaagaatccattctgtgttaaggcyatatggatgttagccacatttttaaattaaactttttattctgagatatttctagattcacaagtagttttaagaaataatacagaatgatcccatgcactctttacccagttcccccaatgtaatatcttgtaaaactgtagtacattatcacaaccaggatactgacgttgatacagtgaagagcagaacatttccatcacaagaatccctcatgctgtccttttgtagtcacatctgctttcctctctcccctttctccctgagccctggaaaccactaatctgttctccatttctgtaatttagaacaacataatcaagaatgttatgtaaagggagtcataaagtatgtaaccttttgggattggctattttcactcagcgtaattccctgtaaattcatccagttgttgtatgtatcaatggttcttttctttttattgctcttagtattcatgatatggatacaccacagtttgtttatacattcatctgttgaagggcatctgggttgtttccagttttcggctgtgacagataaagctattaacatttgtgtacagacttttgtttgaacattagttttcattcctctgggataaatgctaaatattgcaactgctgcattatgtgatagttgcgtatttcgttttataagaaattgctaaactgttaacaaagtggctatatggttttacattccccacagcagtgtgtgagtgatcaggttcctctgcattttcactaacatttgctatcgtcactatttttttcattttagccattctgatgggcatgtagagacatgtcattgtggtttggatttgcatttacctaatgtctaatgatattaaacatcttttcatgtgcttcttgtataaagctggtgttaatgcttctgtaaatggtaaaattctccagtgaaatcatctgggcctggaggggttattttttttccctaagagttttgaaaataacatactcaatttctttaatagttataggactattcaggttgtctgtttcatttagttgagttcagtggtttgcggtttttgaggaattgtttctcttctaacttattgaatttatgaccataaaattttttatagtattcatttatccttttaatagctgtaggatctgtggtgatatcccttgtttcatttctaatattggtaatttgtgtattctcttttatctttgtcattgctagtttagcaacgaatcagctttttttcactgatttttctctgttrtttttctgtgttcagttttattgattctgcttttttatttattatttcctttcttctgcttgctttttttgcttctttttctagtttcttagggggaggacctcagattattggtttgagacctttaatttttttctaatataagcatttaatgttacaaattttcctaagccctgcttagctgcatcctacatattttgatatgttgtattttcatttgtgttacattattatttatttctccttgtattttttttcacagtttttttggatttcagattttgtttgactcatgagctatttagatgtatgttgtttaatttcyaagtgtttggaattttttttgttgtcctcctgaaatgtattgctagtttgactccattatcgttagagaacatactcagtataataccattatattcagtatataccagtatagtttcagttcttttaaatttgttgaggtttgttttatggcccaggatttggtctatcttggtgaatattctataggaaccaggaaaaaaaagtgtgtgtggtgctgttctaggtggagtgttctgcgtatgtcattggttggtcattttgttcttttatatccttgccaattttctctctaggagttctatcagttgctgaatgtgggatattgaaatcctcaactataattgtgcatttgcctgtttctcttttcagcttaatttgacttcatgtatctttcagctctgctgttttggtgctgtttggtgttttggcagattgatctttttgtcattgtgcattgtccctcttttaactattaactttctttgctctgacatatacttggactaatattaatatagccagtcttgcttttttctttaataattgcctggtatatcttttatcatcctttcactctcagcctagctktgtcatcatatttaaagtgttttgttttgttttttgtggagagcatattgttttttcaaactaccctgccaatcttacgattttaaatggtatatttaggccattatattgaaggtaattattgatattttttatttaacttttatctttttatctcctatttctagttccactgtttctcttattcagacatttctttaggattctgtatttgtttatgtatagtgttttttagtgtattgctttgtgtagcttcctggtggttgctctgggtatttacattgtacatagtaacttctcacagtctactggtatacaggtttaccagtttgaatgaagtatasaaattttacttacatttaagcttcttttcctactccacttttaagatattattgtcttagatatttcctctacatgccctaagcagcatatcagattgtattgcagttttcctttaaccatgaaatgtgatttatgaaatgcatgagaaataaaatagtatttatattcacccctattttaacctattctgatcttcctctttcctttctgttctagttccaagccttattctgctttttttttttttccttatgaactttctagccaccaatcttttaggttaagtctgctggtaacaggtgctcttagttttcgttagtctgagaatgtcttatctcctttccctttctgaaggatattttcactgagtatagaattctgggttgacagttcttttctttcagcacttgaaagataatgccactttcttctgatatccatggtttctgatgtttctctctgttgttcayatttcgtgaatgatactggttctcatcatgcttactgattctgtcttttgtcttttccactgtactgttcagcccatttggcaagttttgtatttcagctatttttccattccaaaatttttattttgctctttatatccatttttgttttgtttgtttttgctgagactcaatttttttgtttgtttcaagcatgtttgtaattgcttgttgaaacayttttatgatggctttgttaaaattcttgtcaggtaattccaacatctgattcatctcagtcttttcttattcaggctgcaattttcctggttcttggtataagtgattttttattgtatcattgtgtcttggacattttgagtattgtgttatgagactctgcatgtgatttaaatcttccattttagtacacctcctctttgacamcatgccagccaagtaggggtggaaagctaggttcygtctttggcctctgctgatagcctgagagggaagtgctttactactgctcccacctggcgtcccctgacaccatggagggagaccctgttatcattgggaagaaaacgaaagctctagctcttcactcagtcttctctgacaccaccccagcaagaatcagtggtagtgtctcattatagccaggcaagggtagaagtctagcatcctcattcagcctttgctgactaaggtagggatggggctgcagattgttccttggtgtttggcaggagtagagtggttattgtgtcacatttttctgcctttcaaggctacacctttcctggttctttggctaaagggaaaaggcttttcttgggatatatatatatatttttatagtctgtgactttcggcattaccaacagcttgggatatgttaagaacccagcttgtggtatcttaagcaaaaaagaaagctagactttcttctcacagtttttttggatttcagattttgtgtgactcatgagctatttaagtgtatgttgtttagtttccaagtgtgtggaatttattttgttgtcctcctgaaatgtattgctagtttgattccgttattgttagagaacatactcagtataataccattatactcagtatataccagtataatttcagttcttttaaatttgttgaggtttgttttatggcccatgatttggtctatcttggtgaatgttctataggaaccaggaaaaaaaaagtgtgtgtgttgtgctgttctaggtggtgtgttctgtgtatgtcatttaaatcctgttggttggtcagtttgttcttttatatccttgccaattttctctccaggagttccatcagttgctgaatgtgggactccttcagctaggctttcttttttggaaaagccatggaagctttcttttttggaaaagccattcctttttttcaggaaagccatgactcactgccatgccattccttaggccttgtagtccctagcctgcctatcttctctgtacctttcagagttttacgtttatttcctatgtaatatccagagttttagctgcacttagtggaagaataagatgtgcatctattcctgaattgagttttttaatgtatgcattactttatttagctagaatgtactaacactttttaaaaattatattaggaaaatcttgcagaagtagtatttgagtatcaaaaaaaagtaaaaaccagcacaaactatttacgtgggctctaatgaccagttttttagggattttctagagtggtagaaataaaattgtgccttaaatatttaatttgtggcatatttgtattttaatcaccaccttactttgatgaaattaatgcaatatcgtactgttttggctatagaaacctggcacagttgagttatagcacaacagttagtttttgctgttctaatgtgctttttttttttctctttcctccagggctggtggactaggcctcaattttgtcggtgccaatgttgttgtattatttgatcctacttggaatccagccaatgatcttcaagccattgacaggtataatactgacaaaatttaaagtgatctgcaaatacttttaatctaaaaatactcttgaacttttaaggttgcttatactatgactatgattagaagaaagggggaaactggtaaaaacgtacatttaatataatcctgaccttctcaatccaaataacagtccaaaaatagccatttttcatccatctcagaatcctattaatatgacagaaatgacttaagaagaaagaataaattcctaatactgtaggaaaataggatagttctgtactagtagatcagaagttttgagaaactcctggaagatagaaagcaagtagaatctgtgatcagggtatccgcagagaaatactacaatccaaagtctgcaggaaagagtacagaaattttaagcatgggcttgcaactacagtatgtgggagtagacagagtgcatcattctgggaaattgataatgtcctgactctaatacaaattcccctctgacaccctactttacagagagattggccgtaacaggtactctttgattaaagctgaaagaataattttacacattttataaacaaatggggaatctgactgtagaaagcttcctagaatggatgttggaaccagatcataaagccagagccaagcctgaagtacttccagatctccccaggacatgaaaaagggaaatacacgtgttacctgcatggaaacacagaccggctttccagtgatgcacctagtcgtcattttaattatgaatgggaaatgaagaattatgaaacattttaataaaattaacctagcaagaaagcaaaggacaaaggtgaaaaacagacattgaagggaataaaataagaataggatgccaaggaaaaaagtacataaaaaaacaaattagttcttataaattaaaactattgccaaaataaagtgactcagtagaaggtctgggaaaaaaaatggagagggctaatggaaggatatggaaaaaaatgaaggtctgaaaaaaaatggagagggctaatggaaaaatggagaaggatatggaagataaaaggaatgaatattttaaaacataaagtcaagtagcaaatagatgtgaaatatgagtaaagagaaattgaggaaaaatcccagaaatcatcatctgtgtattccagaaataatgaacagagactggaggacgggagataattgatgacatgattggagaaaattgttattaattttgaaggggcatttagtatgaagtaggaataatgactgagagagaaaacatacatgttagtaatatttctaagtttcaaagataaagagaagggctaaaaggttccaaagtgagaaacagggagagaatgatttataaaaactgcaacaaaaaggaaaagatacattgttaacaaagaaatgagaatcagactcaattcagcagatcagactttgaagaacatacatttcatcagcattataggattctagaatgacaacagaattgtcaaagtgaaaaaatttatatggctatatgtgaaagaaaattattttgagttgtatttacaatttgtggctaaaattttaagtctaaaaaattactgggagtgtggctgataggcttcatgcagttgtaaagaaagaattccctgaaatatgaagggatggtatgaaaaaattagtaacaagaactaaaatgttatataaattttnataattgtcagaataagggtagaggtgggtaaagttgtcttagaattgtttttttttcctcaggaaaggaccaggataccctggtcagttctcaaattgtatgccaacaaatgtttttaaatgctagcaaaaaatttaggggcaacaactaaaagagtgagttataataattacctggtacaattttcaaaaacacagatgctcaaactccaccctgcaggcattctgtttatgtagatgtagaatgggactcaacattctacgttttaaaaaacacccaggttgtggatcaaaggacactatcaacagagaaaaaaggcagtctacagaatgggagaaaatattttcaaatcacatatctgataaagtattaatatctagaatataaaaagaactcctaaaactcaacaacaacaaaaaacacaacccaatctaacaatgcataggacatttctccaaagaaggtatacaagatatataagtggcsattaagcacatgaagagatgctcagcatcactaatcattagggaaatgcatatcggaactatartgaggtacaacttcacacacgttggatgactattgtaaaaataaaagcaacaacagaaaacaagtcctagttgaggatatggagaaattagaacccagaacccttgtgcattgttgatggaaatgtcaagtggcacagctgctgtggraaacagcatggtggytcctcaaaaaattaaacataaaattaccatgttatccagcaattacacttccactttgggtatataccaaaaagaattgaaagcagagacttgaagagatacttgtacactcatgttcatagcrcctgtattcacaatagctaaaatgtggaagcaactcaaatgtccatygatggatgaatggataaacaaaatacagtttatacataaaatggaatactattcagccttaaaaagaaatgaaattctgataaatgctacaacatagacaaaccttgaagacattatactacatgaaataagccagatatgaaaggacaaatattgtatgattctacttatatgaaatacctggaatagtcaaatccatagagatagaaagtagaatggtgcttattaggggatagggaggaatggggaattattgtgtaatgggcatggaatttcagtttaggataataaaaaagttgtagcaatggatagtggtgatggctggaaaactgaatttacttaatcccgttgcactgtactcttaaaaatagctaaaatggtaaatcgttttgtatgttttgccacaattaattttaaaagccacccacagtgattatgatacaattggttctcaactccactttgaaaaacactggatattaggtgtatcggggaaattcagccagatatcgggygaaattcacccccaatattttacataggtttttttctattttccctaagtgtcggccggtctgagaaataaagagacagtacaaaagagagaaattttaaagctgggtgtctgggggagacatcacatgtcggcaggttccgtgatgccccctgagctgcaaaaccagcaagtttttattagcgattttcaaaaggggagggagtgtacgaatagggtgtgggtcacagagatcacatccttcacaaggtaataagatatcacaaggcaaatggaggcagggcgagatcacaggaccacaggaccggggcgaaattaaaattgctattgaagtttcgggcatgcattgtcattcataacatcttatcaggagacagggtttgagagcagacaactggtctgaccaaaatttattaggtgggaatttcctcgtcctaataagcctgggagcactacaggagactggggcttatttcatccctacagtagtgaccataaaagacggccgcacctgaagcggccatttcagaggcctaccctcagggatgcattctctttctcagggatgttccttgctgagaaaaagaattcagcgatatttctcccatttgcttttgaaagaagagaaatatggctctgttccacccggctcactggcagtcagagtttaaggttatctctcctgttccctgaactttgctgttatcctgttcttttttcaaggtgcccagatttcatattgtttaaacacacatgctgtacaaacaatttgtgcagttaacgcaatcatcacagggtcctgaggcaacactcatcctcctcagcttatgaagatgatgggattaagagattaaagtaaaacaggcataggaaatcacaagggtattgactggggaagtgataagtgtccatgaaatcttcacaatttatgttcagagattgaagtaaagacaggcgtaagaaattataaaagtgttaatttggggaactaataaatgtccatgaaatcttcacaatttatgttcttctgccatggcttcagccagtccctccgttcagggtccctgacttcccgcaacaggtgtaaaacttccaaaagaaataagagtaccaagaaaatgtaattattttagtacatgataggaaatayatagttgtgttgggaagatggaggaaactcagaaagcatgaccaatgaagtgtcagaactaaatccaaacataaatatgaatatgttgaaactttttttagaaagaaggagaaaagtggggctggcagaaaggaaaaattagactcaggtttatgcttattatgaaacatatatgtaaataaaaaagacacaggaagttgaaaataagataaaaaaatcaaatcagggagatggtaacaaaaattaagaatggatggcaatgctaatatcaaattattaatagaattcaagacaaaaggcattaagcaaaacaaagagggccacagtccactaggaagttgtaatagtcactacataacaaagccaaaactcttatatatgatgagaaacagacaaatccacaactataatgggaaactccatattcctctcttaaaaaataataaattggccgggtgcagtggctcacacctgtaatcccagcactttgggaggccaacgtgggcggatcacgaggtcaggtgatcgagaccatcctggctaacacggtgaaaccccgtctctagtaaaaatatcaaaaattagccaagcgtgatggcaggcgcttgtagtcccagctacttgggaggctgaggcaggagaatggcgtgaacctgggaggcggaacttgcagtgagctgagattgggccactgcattccagcctgggtgacagagcgagactccatctcaaaaaaataaaattaaataataataataaatccactaggctaaataaatatataaattacttgaataaaagttatctaccataatttaataattgtgtatacagatacatctcattttattgcacttcactttattgtgcttcacagataattgccttgtttacaaattgaaggtttgtagagatgttgagtcaagcaagtcttccagcaccatttttccgtggcatatgctcacttgtgtctctgtgagaatgtagttctcacattatttcagattttcattatcacatctgtgatggtgatctgtgatcactgatctttgaagttactattgtatttgtttcaggacaccatgaaccatgcccctataaaaagatgaacttaattggtagatgtgtgtgttctgactgctctgcttactggccattcccctgtctcattccctcccttgggcctccctcttccctgagacacagtatttaaattaggccaattagtaactctgcagtggcctttaagtggtcaagtgaaaggaagagttgcatgtctctcactttacatcgaaagctaaaaatgattaagcttagtgaggagggcatgttgaaagccaagatgggccaaaagctagcagttggccaagttgtgaatgcaaaggaaaagttcttgaaggaaattaaaagtgctactccagtgaacacatgaatgacaagagcaccaaacagccttattgctgatacgaagaaagttttagtggtctggatcaaagatcaaaccagccacagcattccattaaaccacagcctaatccagagcaagtctctaacacacttcagttctttgaaggcagagagacacaaggaagtagcagaagaaaagtttgaagctgcagggattggttcatgatgtttaaggaaagcagccacctccataacaaaaaagtgcaaggtgaagcagcaagtgttgatgtagaaaagctgcagcaagttatccagaagatctagctaagatcattgttgaaggtacctacattaaacaacagactttcaatgagaacaaaacaaccttatattggaagaagatgtcattgaggactgtagtcaataaagaggagagttaatacctggcttcaaaagataggctgactctcttgttagagactaatggagctggtgactttaagttaaagccagtgctcatttaccattccgaaaatcttagggcctttaaaagttatgctaactctactctgcctgtgctttgtaaaatggaacaacaaagcctggataacagcatatctctttacaggatggtttactgaatattttaatcccactgttgagacctactgctcagaaaaaaaaagatttctttccaaatattaactgcttactgacaatgcccctagtcacccaagtgttctgatggagatatacaaggagattaatgttgtttatgcagtaacacaacatccattctgtagcccatggatcaagttgtacttttgactttgaactcttaatatttaagaaacacattttgtaaggctatagctgtcatatatagtgatttctctgatggatctggtcaaagtctgttaaaaaccttctggaaaggattcactattctagataccatttaagaacatttgtgattcatgagaagaggtcaaaatatcaaacaggagtttggaataagttgattccaaccctcatggatgactttgaggagttcgactttagtagaggaagtaattccagatgtggtggaaatagagaactagaattagaaacaaagcctgatgatgtgactaaattgttgcaatctcatgataaaactttaatgaggtcaggcacagtggctcatgcctgtaatcccaacattttgggaggccagggcgggtagatcacttgaggtcaggagtttgagaccagcctggccaacatggtcaaaccccatctctactaaaattactaaaattagccaggtgtggtggcgtgtgcctgtggtcccagctactcaggaggctgagaatcgtttgaacccgggaggtggaggctgcagttagccaagatggcagcatacccaggcaggatgtatacccagaaatgacctgagaagacttttagccttcaccccatgttgttcccaaggctcaagacacaccctgctaattagtgaaggtcttccttaccagtttgcaaagacttggggagttggctgtctttccaaatggtagttttcaagaaaagaccacaagacattagaaaaaaaaaaaaraaaagaaaagaaaagaaagaaaatgaaaatacagctcattcagagtaacaaaataaatctctagaaactaactgtccctgaagcaaaacaggcattggagctactagacaaagactttacaacaagtgtcttaaatactccaagagtgaaagtaaaacacagagaaagaactagtgaggaaaaggatatatgagcaagatgagagtatcaacaaagagatagaaattaaaaaaagaaaaaaagagagagaaccaaacaaattctggacacgaaattcaattttggaattgaaaaattcactagaggagttcaacagcagaccaaaatagggagaaaaaatctgcaaacttgaagataggttatttaaaattatttaatctgaggagcaaaacaaaaaggggaagtgaacatataggacactatcaaatggacccaatatgtacgttatggaggcccagaagaaagggaaaaggacaaaagggtagattaagaaataatgaaaagctctccaaatttgagggaaaatatggatatacaaatacaagaagatcaaccaagtccagatagtataaacccagtgagatccacactgtggcacattataatcaaactgtccacaaagagagcatcttgaaagcagcaagagaaaagcaacatgtcatgtacaaggaatttccattaagattatcaagtggatttgtcagtagaaactttgcaatccagaaggcagtgggataatatatttaatgtattgggggaaaaaaaaacaaacaaactgtcaactgagaaacaaagaaaaagtgtttaccgagaattttatgttgggcaaaactgcccttcaaaaatgagggttaagatatttgcagacagacaaaagcttgagggagttcattaccactagaccagccctgtaaggaatcctatccctggtgcagtggctcacgcctgtaatcccagcactttgggaggccaagatgggtggatcatgaggtcaggagttcaagaccagtctggtcaagatggtgaaaccccgtctctactaaaaatacaaaaattagccaggcatggtggcaggcgcctataatcccagctactygggaggctgaggcagagaattgcttgaacctgggagacggagcttgcagtgagccgagatgccgagattgtgccactacactccagcctgggagacagggtgagactccgtctcaaaaaaaaaaaaaaaaatcctaaagggagaacttcaagatgaaatgaaagtacactagacagtaactcaaagtcatacaaaaagataaagatctccagttaaggtaagtatcatggacaaatataaataccagtatcgtaattttggcttataactctgcttttttattttctacaggatttaaaagacacatgcataaaataattataaatctatgttgacaagtacattgatatcaatgtaaaatcaattgatttaaggttgttataactttaggatattatatgtaatccctgtggtaaccacaacaaaaatatctaaagtatatgtaaaaggaaatgagaaaggaataaaaatatgtcactaaaaaacatcaattaaacacaaaggaaggcagtaatggaggaatttaggggcaaaatagttataagacatatagaaaataaataaagtgggaaaaatgagttcttccctgttcttaattatttcaaatgtaaatggatcaaattccataattaaaagatgtagattggcagaacagatttaaaaaacagtgtccaaatatatgctatccataagagactcactttaggtccaagaatatacacaggttgaaaataaaagcatggaaaaagatatttcatgcaaatagtaaccaaaagagaacaggaatggttgtattaatgttagacaaaatagacttcaagtcgacaactgttagaagaaagacattatctgatggtaaaaagtggattcaccaagatttaacaattatatacataaattcaacaaacaatagagccccaaattgtatgaagcaaacattgacagaattgaagggagaaatagctctgcaataataatgggagacttcaacacctgactttcataataggtaaaacattcagacagaagatcaataagtaaggagaggatttgaacagcaatatagacaaattggacctaacagatatatagaattttccttccaacgacagcagaatacatacttttcttaagtacacaatgaacactctccaggataaatcatgtgttaggccacaaaacaagtttttaatacattttaaaagattgaaatcattcatttttttccagtcacagtacaatgaaactagaaatcaacagyggaagaaaaattgaaaaattcacaaatatgtagaagttaaacaacacacacttaacaaaagggttgaagaagaattcacaagggaagttagaaaatagcttgaaacaaatgaaaacacacaccacaacttacaggatgcagcaaaagtaatgctaagagggaaatttatagctgtaaatgcttacattaaaaaagaataaaggtctaaatcaacaattaactttccaccttaaggagctaggaaaaggaaaaacccccagagctagccagaggaaggaaataacaaatattagaacagagataagtaaaacaaagaatagaaaaacgacagaggcaatcaatgaaaccaggagttggttgtttgaaaagatcaagaaaatggtggataaatctttagctagattgactaagagaaagaagactcaaataattaacatcaaaaatgaaaggggacattgctactgattttacagaaataaaaaggagttcaagagagtactgtgaacatttgtataccaacaaattgaatagtctacgtgaaatggatgaattgctagaaatacacaacctaggaagaatgtcatgaagacatagaaacctgaatataactataactgtgtaaggagattgaatcagtaatcaaaaacctcccaataaagtaaagcccaggaccttaaggctttgctgattaattctaccaagcatttaaagaatttgcaccaatccagccaggcacggtggctcacacctgtaatcccagcattttaggaggtcaaggcaggcggatcacgagttcaggagttcaagaccatcctggccaacacactgaaaccccgtctctactaaaaatacaaaaattagctgggcgtggtggcgtgtgcctgtaatcccagctactcgggaggctgaggcaggagaatagcttaaacgagggagttggaggttgcagtgagccgagatcaagccattgcactccagcctggcaacagagtgagactccatcttaaaaaaaaaaaaaaaaaaaagaatttgcaccaatccttctcaaatgcttccaaaaaactgaagaggaagaaacacattccaattaattctataaagccagcattaccccaataccaaaatcaaagactctacaagaaagaaaactacagaccaataatctttatgaatgttaatgcaaaaatactcagtaaaatgccagcaaactgaatttcagcagcatattgaaaggatgatacacagagtaggatttattcctggaattcaaaaacagttcaacatcccacaaaaatcagtgtaatatgccacattaacgaatgaaggaaaaaagacacataatcatttcattgatgcagaaaaagcatttgacaaaattcaacatctttttaaagatgacaaaaacaacacattaaaaataaaaggaaacaagccaggcacgttggctcgtgcctcttgaggtcaggagttcaaggcctgcctgaccaacatggtgaaaccacatctctacaaaaaaaaatataaaaattagccagcatggtggtacatgcctgtagttccagctgcttgcttgggtggccaaggcacgagaatcacttaagcctgggagacgraggttgcagtttgctgagattgcaacactgtgctccagcctgggcaacagagtgactccgtctcaataaaaaaaaaaaaaggaaactacttcaacatataaggtcatttatgaaaaacccagagctaacatcgtactcagtggtgtcatgattgaattgtttttcctgtaatatcagctacgaagaatggatacctgtttttgccagaaaaggacaaagattgtatgatttcatgttgtacctagagtcatcaaattcacaaagacagaaaagagaatggtagttgctagtagctgggggactggagaatggggagttattgtttaatgagtacagagtttcagtttggaaagtgcctgtagctatataggtgttatagttgcataacagtgtggatatacctaatgccacttaactgtacacttaaaaatgcttaaaatgattaaattttttgttttgtatattttgccacaataagaggaaatcaagagagaaaaatttgctatttagaaacaacaatgaggccggttgtggtggctcacgcctgtaatcccagcactttgggaggccgaggcgggcggatcatgagatcaggaggtcaagaccatcctagctaacacggtgaaaccctgtctctactaaaaatacaaaaaawtagctgggcgtggtggtgggcacctgtagtcccagctacttgggaggctgaggcaggagaatggtgtgaaccaggaggcggagcttgcagtgagcctagattgagccattgcactccagcctgggagacagagtgagactctgtctcaaaaaaaaaaaaaaacaatgaaattactgtggatcaatatttaaattctggtgctaatttcaatttttaaattcatttattaaaaaagaaaggccaaaagtaaaagaataatttagaaaactagaaaaggaacaaagtaaagaaaatagaattatacacattattacattattaagataaaaataagaacataatataaattgtaactaattcattgaaaagaataaaatagagacacttttgaaaagtctaatctgagggaaaaagtcaaatacatagaaacacttaagcagaaaggccatctaaccaataacaatgtttatttataatacttaatattttgtgtacaattttattcaagtacatttggaagaataaggacaaaggaataatggctgcacttattgagtgtttatggtaaggtaggaactgtcattcttggtgctttccatggattatctcatttaatactcagaatatccatatgtgataggcactattatacccattttacatatgagaaagctgaggcacagtgcacttaagtarcttgctcaaggtcatagccaataagtggcagggtcaggatctgaatccatgtggtcttactgcaaagcttacacttttaatcagcctctctccacagacagctrtcaaggaaattggtcaaaatgaaaaccacagaaaaatttcccccttttttttgatcttgttgtattttgtactttttcattaggtcatcgagacatattatttatcccagtattcttccaagcacagtgtactgtgctttggtattcactgaaagttagttcacaataaaactgaataaatggcattccttttcctctccctgtccttccactgactctgacagccggaactgagaacagaaataaagctaatgacctacctatcgtataacagttcctcaacacttgtctccacttggtgaaaactcatcacttacaaatccttgctttatggatcaagaaatgatgaagtataggcgcacagtaacaagtgtctaaaatttttgtctgtaaagattaaaggatgtgcatcctaatggaatctctcccattcaccaaacaactggcttaagcatacatccaaaggacattttcttagatccatttctggttttctttagaacccaaacacattgtaggagagaaagggatgctgagcccctctcctytgctcctgggttgcagaatggaagtgagaatgcagtaccttacccctggtggtgctgtgtcacrggagcctccatttcctgctggagatgtgagatttgcaggatccaagatgtcctcgagtaaaagtccattgtgaggagggacaggtaaaggaggcagagagaacatcaaatgtaacatatgggtgacyttataagttcaaagataaatttcccccaaattgtgacattttcaagcatataggcagtatggccttgccccggttcccctcagcaactgtaacaggcattgggtgctcatacagagcatyctataaagcctccatatgagagaagctgtggggaatagacctatagttaaaccactgtgatgaatcagtttagaattttaattagcactatggtctgtatggaaacaccttggatgccagtaaactgagtgattcagtcagatccacctcatctacggatgagaactgtagaccagcacttcatagactttacagttgattaattactttttgctaagttgtggttttttttactttttaacagttttaataaagtataattgacatgcaataaactgtacatacttcaagtatacaattgataagttttgacttatgtacatgtaaaaccatcaccacaattaacataataaacatacccatcatcccagaattttccttctgcccctttgtgacccacctctcccattcttccccatccccttatccccaagcaaccactagtctgctttctggcactatggattagttggcattttggggatttttatataaatgaaatctttggggaacaatctgtaagcttaaagctgctataaaagaaaaacctgaatttaggaaatgtttttagacagtggaaagtgatgtttataacaaaaatgaagttgatacttgtaggttttctgtaatattttttctccttaataagctttttatatgagtttgaatttttgaattattactaaatagagcatatttaaacataaaatgtttatttttaaattaattaaaaatttaatgattttccatttttatgtccccaagttacctcttcaacccaaagttgcttcacttgatttttgtttgtatttttaatccttttacagagcatataggattggacaatgtagagatgtcaaagtgcttaggctgatatccttgggaactgtggaggaaatcatgtatttacgacagatatacaagcaggtaaatatgtttccctttttctgtttcagaggtcaacatttatctgttttcaaaaattaggaacaaatttgtgtaaaatgtaagttttaaatcttactgtattgcrgaatttaataagattataaaaattacccttgaatacacttttatgaaacagattctttggttcattgaatttttgagytgaaagttttctagagcagtacctcttaaactttagtgtacatgcgaattaccragggatcttgtcaaaatactgattgtgatttagtaggtctgagttagagcccatgatgtggaatttttaactagctcccaggagtcctagtaaaactaatcagcccacattttgagtagcaaggtcacagctccccaaaytacaggccaagatgtaatggtttaccacaaatgggctacaggtgcactgatatgttggtcccacagctttctggacagcaagagtacctaagccagtgtgttagttcattctcatgctgccataaagaactgcccaagactgggtaatttataaaggaaagaggtttaattgactcacagtttcacatggcgggggaggcctcaggaaacttaccatcatggtggaaggggaagcaagcatgcccttcttcacaggatggcaggaaggagaagtgctaagcaaagagggaaaaaccacttataaaaccatcagatctcttgagaactcaatatcctgagaacagcagcatgggtataactgcccccatgattcagttacccactggatccctgccacagcatgtggggattatgggaactgtaattcaagataaaattcgggtagggacacagtgaaaccatatcagctagctgccagcctttgagtaacctcttctttttacaccaggtagatattcatatgttaccattttctacatgtgccatcacatgaagattagggagcactaccttagaggtgcatgatgtacatgatgaaactgggaccccagagatcccccagtaaatgaaattataggaatagagcttaagtgtgctaactactttcctggtacttttagtattcgtccgaaattgcattaactctttaatatgcttgagatatcaattactacttcatttatgcctctaaacaaacaatatttatttagtttacaactggatacttgagacaatctggaataaggttcacgtgtaatcataaatattacatttgaattgcttcctatatgttcagttggcatctatttaagagcaaacatctgccacatgtgttggtagttaacctaagaatgatccaatcttaaatttatgctattttcttcattctaaaaatagaattgtacacagcagtttttgttttgtcttaaagcttttagctctgtaataaacagttcatttttttttttttttttggtatagcacaactacttgaaaattatttttttctaacctatttaaccaaccttgggaaaaagtgggaagttactcatcttaggagctgttmttttgagtactgtcttagactactctcaagtaagagtctttcctcaattatgtagtaatttttttcagtccattactatatacatttcctttttacctattcatgcgactcatttaatgaaatgtcttgttataaaatatacattgtgcagtagtatatgataaaacacgcttcagaagatgaggtaatttaagaactttatatgacacaaataaagataagatggcaatcatggaaggaaaaggcactaaatatggtttaaagatagtttggaattttaaccaatggagcacaccttctagcctcccaggttggctttcaatcttttggggaaaaaaaatccaaaaattatgtttttgtttttttttttaaattatactttaagttttgggatacatgtgcacaatgtgcaggttagttacatatgtatacatgtgccatgttggtgtgctgcacccattaactcatcatttaacattaggtatatctcctaatgctatccctcccccctccccccaccccacaacagtccccagagtgtggtgttccccttcctgtgtccatgtgttctcaatgttcaattcccacctatgagtgagaacatgcagtgtttggttttttgttcttgcgatagtttactgtgatgatttccaatgtcatccatgtccctacaaaggacatgaactcatcattttttatggctgcatagtattccatggtrtatatgtgccacattttcttaacccggtctatcattgttggacatttgggttggttccaagtctttgctattgtgaatagtgtgcatktgtctttatagcagcatgattcatagtcctttgggtatatacccagtaatgggatggctgggtcaaatggtatttctagttctaggtccctgaggaattgccacactgacttccacaatggttgaactagtttacagtsccaccaacagtgtaaaagtgttcctgtttttccacatcctctccagcacctgttgtttcctgactttttaatgaytgccattctaactggtgtgagatggtatctcattgtggttttgatttgcatttcyctgatggccagtgatgrtgagcattttttcatgagtttttcrctgcaaaaatctccttaagctgataagcaacttcagcaaagtctcaggatacaaaatcaatgtacaaaaatcacaagcattctcatacaccaataacagacaaacagagagccaaatcatgagtgaactcccattcacaattgcttcaaagagaataaaatacctaggaatcctacttacaagggacgtgaaggacctcttcaaggagaactgcaaaccactgctcaatgaaataaaagagggtaccaagaaatggaagaacattccatgctcayggrtaggaagaatcaatatcgtgaaaatggccatactgcccaaggtaatttatagattcaatgccatccccatcaagctaccaatgactttcttcacagaattggaaaaaactactttaaagttcatatggaaccaaaaaagagcctgcatcgccaagtctcaatcctaagtcaaaagaacaaagctggaggcatcatgctacctgacttcaaactatactacaaggctacagtaaccaaaacagcatggtactggtaccaaaacagagatrtagatcaatggaacagaacagagccctcagaaataacgccgcatatctacaactatctgatctttgacaaacctgagaaaaacaagcaatggggaaaggattccctatttaataaatggtgctgggaaaactggctagccatatgtagaatgctgaaactggatcccttccttacaccttatacaaaaattaattcaagatggattaaagacttaaacgttagacctaaaaccataaaaaccctagaagaaaacctaggcaataccattcaggacataggcatgggcaaggacttcatgtctaaaacaccaaaagcaatggcaacaaaagccaaaattgacagatgggatctaattaaactaaagagcttctgcacagcaaaagaaactaccatcagagtgaacaggcagcctacaaaatgggagaaaattttcacaacctactcatctgacaaagggctaatatccagaatctacaatgaactcaaacaaatttacaagaaaaaaacaaccccatcaaaaagtgggcaaaggacatgaacagacacttctcaaaaaaaaattatgttcttaaaaaaaaaataaacctgtaaaaatgttagaaagcaagaagagttttcttggtggccccaaaattgtaaggagtcctaaaagacaaaaggaaattgggatcagattgaaggaagaagccaagttaaactcagaagacgactactgaaaaggtaggtgcagcctctggatattccaagtttagagtcagcagatactaaaaaagaagggagccttagggtaactgtggagccctcttcagggtatcactgatggtgtaacaagacggtttagcccttataatcctatcccatttggaccaaattacagccagcagaggtgtctactgtcaagtgagaacaataagtagaagtactggaaacaaagaagcaagacagagctccaaatttttctaatattcagaagaaagtccctcctgttgcccagaagactaattacttgcaccctccactttatttcagataagcactgcagtagacagagataagcatgtgaagtatttaaaggcagatgaatagcccagccaaaaataattacccaacagtttaggaaaataaacactttgaaaaaggcactatagcgggctgaatactggccccgaaaaatatcaatttctaatccctggaaattgtaaatggtactttatatggaaaaaggatctttgcagatgtgattaaattatgggtcttgagattcggggattatcttggattatccacaagtgtccttataagaaagagctagaggacaatttgacacagacagaagaggagaagacaatgtaaccacagaggcattgattggagtggtgtgccagaagctaaggaatggtggcagccaccgcaagctggaagagtcaagaagtagattctttgctagagcctccagaaggagtgtggtcgtggtcctgccaacaccttgatttcagtttagtgatactgatttcagatttctggctcccagaactgtgagaggctcaaatgatcctcccacctcagcatcccaagtagctggaactataggtgcgtgctaccacaccaagccaattttttatttttatttttgtagagatagagtttcactctgttgcccaggctggttgaaactgtgttgttaattcagaactctcccacaaagatagattctagcccggatgacttcagtggtaaattctatcaaacacttaatattgtttttgaaaacagaagaagagggaacacttccaacttacttcacaaaaacagtagaatcctgataccaaacttgacaaagacattgcaagaagagaaaatgacagatgaatatctctcatgaacataaatatgaaaatctttaaccaagcatctgttttgagtccattgcaccccttcccctcaaaagataggttgaagtcctaacccttggtacctgtgaatgtgatcttatttgtaagtagggtctttgcagatgaggttaagatgcgatcacactggatgagagtggtccctaatccattgactgataccttataagaagggggaaatttggatacagacagccacagaggaagagcaccatgtgacaatggaggcagagattggagtgatgccaccacaagccaaagaatgctacggattaccagcaactaccagaagctagaaagaggcaaggaaggatcattccctaaaatcttcagacagagcatggccctatggacaccttgatttcagatttagctgcacaactatgagaaaataaatttctattgttgtaagacatccaatttgtagtactttgttacagcagaattgggaaactagtgcagcccctaaggcaaatacagagtattgtaaatttgactatatttttgtatgaaacttctgtatgacaaaggaactgcaaaccaaattcaaagacagactaggagcatatgtttgccatatatgtaataaaagagcagcatgtacaaaatataaagaactcccactgtattagtctgttttcatgctgctggtaaagacataccagagactgggttataaagaagaggtttaatggacttacagttctgcatggctggggaggcctcacaatcatggcagaaggcaaaaggcacatcttgcatggaggcaggcaaagagaatgagaatcaaacgaaaggggtttccccttataaaaccatcagatctcgtgagacttattcactaccacgagaacagtagggggtgaaccgcccacatgattcagttatctcccactggatccctcccacaacacatgggaattatgggagctgcaattcaagatgagatttgggtgggaacacagccaaaccgtatcacctacaaaccaatgaaaagaataataggcatttcactgaattaaaaatgcaagtggttaacacatgtgaaaaratctttttaaccacactcataatctagagatagaaaataaaataagaccatttgcattgtatattctgcaaaagcttttttaaaaaatgcatattgaggtgttttgggggggttggggagattggtgctgttcattgttggttggggcatttgagagatgctcatatactactgttgagagtacaactggtataggtatatgtagagtctccatagctaactgacagaaatcctctcacataygcacagtgaaggatgacaagggcttttacttagcattgcttgcatttgtttaaaaaacaaaggaaacaacctaaatgtctgacagtaacagaataaattctgatacctatattactttgtgacagcaaaatttaaaaaattatagtcagatcaaatgtactgatgtggcaagatgtctgaagacatttttaagtgagttgaaaaagcaatatacagaacaatatctacagtgtttcagtgtgtttagaaataaagctatttctgtgtgacagactgtccctgatttatgacatggttcaacttaatgtttttcagttttatgatggtgctaaaatgatacctatttatgtatgaagtatgttcctctacttacgatggggccacatccagataagcctatcgtaagtccaaaactcactttagacctaatggtgttttcaacttacaatgggtttatctagatatagccccatcataaattaaggagcatgtgtatgtataaatagctttaacttcattgaaagatacctagaaggatgcacctaaacgttacagcactggttagactaataaggagtgacctgtattgttcatgaggggcttttattttgataccttttgttgcatctgttgtgatgatgcattcagatattttatacattttaaaaatataaacatcacttttacagcagctgtgctccttcaggtttggagcatttaaacaatctaaagtttggcattcagaaagtcatctcgtctgtgtgtgtgtgtgtgtgtgtgtgtgtgtgtaaattttatttgtaagtgtttgcagaagaattgcaagaacagcagaaagaacccccagttagcttcactcaaatcactcaaattccctatttgctgacattttacacacttgctttctctttgtctcagccattatctttattctttttctgagccatttgagagagttagacttctcatcagtatgtatttccccaaagaagcaacactctcctaccaacactctaaattttccagtatgtatttccccaaaagaagtacactcctacttaaatatacataaaaamcagttttatgcattctaaacactcagttgtatatacggttctacaactcgctttccccacccyccacactcctctccaaaatgcagttattcacatgaagaaattaactttgataaaacatgatgctgtaatccataggacccattcagtttccccacctctctctttttcctttctggtccagggtttcatcaaggttcatggctccatttacttgtgtctcttcagttttcttcagcctggaatattatccaggctttgtctttcaagaccttgacagctttaaagaataaggcctttgtgtaggatgtccttcagtctaggtccatttgatgtttcctcatgtccagactcaggccaagcagtattggcaggaataccacagacatgatactgtgctcttctcgttgcatcagtcagaaggcacatgggggtgacctgccctactactgctcacgttaaccttgatcgcaggtcaagtttgtgtctgctaagtttctccactgcaaagttactatttttttctttgtaattgatatgtagtttatggggagatcctctgagactgccagttcctcatcagacctgcacgcrtaacccttagtgttcattcgtgattcctgcctgagtcagctaccactataatggttgtcaggtggtgatttttctatttccattatccttcttggttgttgtttggcactctaccatttaaaaaagagctttcccttctatttatttaatttgtgtggtctcatggcttcctattttagtaatagattacaacacattgaatatcactatttatttgatgttcacattgtcttatatttggccaatgggaacccattagggtggcttctgtgtcatttcgacttgctcccatcattctttttgcacttctttactgtggtaggctgaataatagtctcccaaagatgttcacattgtaatcccccaaaccacctgggttatccagatgggccaatgtaatcacaagggattttttataagggtcagatgtgcacatcttcatctctgctagctctgaccctactgcctaataacccgtggtaaggaagcaaagggtcagagagaaaaataatgaagatgccacactgctggccttgaagatggaagaacggccatgaacttcttaacatcataaatgttcttttctttttacttctttctttattttgtctattgttatgatgagatccaagcattttctcccttgtatggrtttttcataagctacgaactaagctacattttttagttactattttccccctaacttcttgaatttgaacatgatttcatttttagttagcctacagatggaagcacctggtttccacttttactggagccactttagtacaaaataatgtgctttttataaattttgtaataaaactttgctaggaagcttataaagactcaaattaaggcttacaaattaccttggtgattatagttacaggtcctgcagtctgacaatatcagtgtttaaggtagtttcagtaacaagggtaaaataggtaggtacccgggctatcacttgtatcaattgttattgtaattctgtactcccaggattacagcccatgttcattggtatcaaattgatcaagttggtatgttgatccataacttctttaaatgaaggtcccgagggttttttttaagagaggcatcttgaaagtgagaaattagttaatagtataaattttagattcagccaaaccaaggttcaaattctaggaatgacacttcttagctggcagctgtgagcaagtcacttaatttctctaaacttgagttactttatttttaaaatacagaaattttagttattttatttctaaaattgagatgatataaggttgtaaggattaaatgagagtatggaaataaaatgctatacatgtaataaatgttcagtaaatggcagctgttattaacaagaattttaattgcctagagtaacttattacagtgcaaatgaactctgatgataatctcaatagttaagcatttctctttttttgttttttgtgacggagtctttgtcacccaggctggagtgcagtggcgccacctcgggttgcttgcagattccactaggttcaagcaattctcctgcctcagcctcccgagtagctgggattacaggcacccaccaccatgcccagctaatttttgtattttagtagagaaggggtttcaccacgtcgaccaggttgggctctgactcctcaaatcaagtgttcctcctgcctccacctccacctcccaaagtgctgggattacaggcatgagccattgcacccggcccttaagcatcattttttactgatttctccgtcagtgggctgaagttattttccattctgtgcattctttgtttctttcaaggaattttaaagtacacatggggttaatcagattgtattttaattttacatatttatattacatttagtaaaatatccagcaaatagtgcatattaatgttgatactgaaatggtgtttttaaatgttccatgtcagtgttctttctgtattcaaaattatgtcaaagatgcagtgtttcttaaaacagtgatagggtttttgctgttagtaggcaatgtagtcaagccacaattagtttgacaccaaggtggttatcatatcattactttagattgtaatttaacttcagtgatgtagtaattacttctgccagttttagtagttgctattgtaataagagttttaaaaggagaaaagtatattcaaatgtatgcttttattattaaacatttatgtcaggtggatattctatagagatgtaatcttgactcagttgttagaaaacagataaaataggaaatataagatctctgtttcaataagactggccagattattattatttcaccataatggcaacatctgccagggaaattaaaacaaaatttcctccctaaggagattctgcctgctccagctaaagctgtgtatatacagggaatgccaggaaattctgacatattgttggagcaaacacttcaaaaatgtcttgtgttttttctgttttagcaacttcactgtgtggtggttggaagtgaaaatgccaaacgatattttgaagcagttcaaggatctaaagagcatcaaggagagctttttgggatccataacctcttcaaatttaggtcccaagggtcttgtcttacgaaggacatcctggaggtgtgaacttcttctctgaccttttcaataatattttaaatacagtttttcttcctcaggaaatctgaaatacaattgctgttgccttttcagagaaacttttggttttctttatcaaaaatgccttggaatttttacttttagagaataagaaatgaattattgtacctctaaactaagattttcccatggataattacaaataatgcacacacacaaatgtatatgctgggtagtatgaactccaaggcaattttaaataggcagagagaagtttatagttttgaaaacagctgctgaagtcaggaactaaaaaaagaggttttcctaaataaacaaaaatataaaatgtgttttaattaaaagttaccaaatactccctgagmtgtactctcatgtctcatggagatttttgttttctgttcccaataaaaattccacaccagtattttaaactctccctgttgtgttcatcctcagcatacagatgtttcttattcctcaaacaaaatattttatatccttttttaaaaaaatctttaagttcttttatataccggaatactaaggatattaacctattttctaattgatattcatataggtatcataaaatcctggagtatcatctttttcaacctcctcatggtatagatgaggaaactgagtcttagagaacttcaggatatttctcttgacttccaggactttgtagtaaaatcttaatgtacttcatttattcagtaagtaccataaaggcagttcaaggagcaattggttcctgtccttgaggaacttaaaccatcttgaccggaggtggaagagaacgtttacataataaccatgcaatgtcaggaatcgtatgctgaacaagttaaacagtagaccatggatggctgggggagaggaaggtatatattatttgaatcctataaatgttgttactattatacagtttctgatatatactgctgagtttctattttatagtaactatatttgattctgaattcagtggcccatttggagtcctactttttggggttttttccccttgctttttaaatacgctgtttctttcatgaatttgttctttccagtttcccttttcatatcaataactttgtttgccctccagctcccaaacccagctgctacctccatctcagagtactacttgacatgcctatattgatgttaaagtcaattgtctataaaaatattagcattttattatttatcctgttttctgtcatatatgacatagttacctgtttttatcagaataaccacctatttctttgttaaacaagtgttatataagacatatcaggatgacaggttattaagtagaaaaagttcccttgtttatcgtgccactgcactccagcctggggaacaaagcaagagacttgtctcaaaaacaaaaaacaaaaacaaaaaaaagttctcttgttcactggttattctaagaatatcttgtttcaccttcagaagtgtttattaatgacaggaccatccatgtcttacattttcttttttaaaaatatcttttaagttctttaatataccagaacactaagaatattaacctattttctaattgatattaataaggggtgacaaggccatccatgccctacatttgtcttgctaggcatatcattggcacttgattattaagttaaattttgaattaaaattactcatttgtcatcaatcagaatgtaaatttattcaggattggttagattcatgctgctttgggccaaaaggtgcttctaaatattattattagccccatataatgggagtacctatcataaagtaaaaggagtatttcacttcatgtgagacatttttaatttttaaaggttgtataaaatctcttttaaaatgttttaagatgtaaaaatttgaatatttacacttataatcttatgatttctgggcaatttcattctgttttgcattgactttccattatctatattatggtttctcttcaaagatagatattgagagttcattttacaagtatttgttgagcatctgctaaatgtcaggtactgttcatagagctttgcatacataaaagaacaaaataaacaaaacgatcctgtctaccagaagtctgcattctatatggggagacaaatgataaacaataaataagtgaaatatggaatgtattatgataggttctaaggataaaaaatagaacagggaagggaaatagaaactgttaaggaaggggcattgcagttttagatggggtagtcaaggaagccctcactctgaaggctgcatttgagtattcaaagaggtgagggaggaaggtgtgttttagataggggaaacaaatgcagaggtcctgagggaggaacatgccccgtgtgatctccaatgtcagggaggccagagtggttagagtggggtcagcaagagagcaagagatggagccggagagatgacagagagccagaccatgcaggaactttgacttttacttgaatgagacaaaaagcaattagagggttctgaacagaaagatgacatagtctgatttatattagcttgacttactattgaaaactagactatagaaatacaaggacagaagcaagaagccagttaggaggatactgcagtaatccagctgagagatgatgtcggcttgagccagggtgattgtggtgggtggcatgagaagtggctggatgctgtatatattatccaggtggcactgacaggatttgctgacgggtcagatacagggtatgagtaaaagagaagagttaaggatggctccaaggtgtttggcctgaacaacttaagactggagtggccatttatctataataacggagtttcaacagctttaagatttctagtactgccactttcacctgttgtagtcatttagcttctgttacagagataaatggtagcctgggaatgaggcttcccatcccattgctgtaatagcttccaggcatggagaataaaggacttgcagcagttcagaaactatcattccctagagttccataggggagattctcactcattgccctggataccaggtggctggaaccacgccattagtgtgtctgtattcttaagttgggcatttgtaactctagtgatggtagtattatttctccttgctctgtcaacaaatatagccttaaaaagagaattgatttccttttgaggagaatttaatattctagaatctaggccattagaacttctgctaaatgatacaccagaagctttaaagtccaaatactttcccaaaagatagcaagcctgttatataactagaatattgtttttagtttcatattagggtggaccttttcattttgatgtctcctacacctaaggggtatttttaaatgaatatgaacaataaatatagtaacaatataggctagaatatcaagttcccaatattcaacattgtggtgtttgaaatgttaatatgtccttaccataattattgtatgggaatggttgttatggatatcatactgggtaaatatttcacatttcttcactctccctcttcccactagtacttttaatgaagttggctggaaagtattagttttctgtgtatgtaaaagtaaactttaacacaagaattaagagtatttttagaatgttatataaatgtttatatatgagtttcttaattagcaagttgaaaaataacattaagaatgctaaagcaagctgcatgcaatttttctttcttagctccaagaatagcatgcattgctgttgtttatctggttgttgctaccccctgtgttgcatagctatttgcattctttcttactgacattatagagagaaggccaagtagaagcagggatcatgacagccacaacatggttgaaagagggacctccagcacacaaactggaaatggtatgtaatatttgaacctgtagactacaacacctagaaaacatgtactgtgacaattttgtttcttttcctttttccttaattttataacctgtaaaaaaaaaaattaagagtcaaggacacaaagtcagaggactatggataaaattaataattaaggctgatttaacattcatattataagaacaaattcaggagcagttcaggcatttacagctaaactgaattttaactacaccaaactgaaaatccagtaccacctagataactaacccatcccaaataaataatttttgactaaatggtaagttaaatggaaaaatcaccatcaatgtgtatttaaaattattgaacccaaatatcaaaattattctctaacctgaaagtagatatttgattccttaattttgtgatctttttagtagcttgtcatctcatgtaccaccaaatctttatttcatcataaggccatcttaaaggtaaaaaacatgtgtggaaggtttttttgttattgttgctggttttttcttgtttgtttttagagtcttaactatcaatttataccagtccaatgagtttaaattggggatgaaatttctataaatttagagaaatatatgaatctcaaatattggcaaaagtattatcagataatactttccgcaatattttactagtagagcctcagttttagaaaactaggttatatttaactctgattaatgtgcaaaggttacatattgaatttaaatttgtagcaaattttacttcaaaattctttatttctggtgatcaagatcctatcggcctttttaatcaattagaacaattttccagtcttgaattctttaccttgttaactcctgtaatctgtcttattcttaaagcgtgattggaagcatctgctagatgacagtaaactccagtaattcttaagcagtaagttgtatgcttttcactttcgaggccagaattatgtgtccttgcatcttagaagccaaacactccactttgtgtttttcttcaaaatactttgattatatggtactctagtttaaatttttttattttgcaacaatattcaacatggaaagagaaaagactaccagactatgatattaaatccttaacatttgtttattaaatgttgtacttttagaaaatattaagtgatatacttgtacctaaattacctgcccaaagttgagtacttttcagttgattccacattatatcttgaggttttctgatgtttttgtcattgtttctcctatagcctagacagcctgactgtcaggaatgcagaggtacagaacaagctgcagagccactggcaaaggaagcatgtgatctctgcagtgacttcagtgatgaagagccagtgggagccacaggaataaagactgccaaaaacaaagcacccgattcaagtaaagcttccagctctccaggacagcttaccttactccagtgtggtttctcgaaattgcttgaaacaaaatgtaaagcagttgaggatagtgatggaaatactgcctctgatgatgaaagttctgatgagcagcccacatgcctttcaacagaagccaaagatgctggttgtgagaaaaatcaggactctcttggtacttcaaaacatcagaaattagataacatcctaaatccaaaagaaaagcatattttttataaaagtgagaagattttagaacagaatatttcttccaagtctgacgagaaaaaaattaaaaatacagataaacattgcattttacagaatgtcacagaatcagaagatagtgatgtcatctgtcctacacaatacacaactgagagattccccgacaatagtataaggtttaagccacccttggaaggatctgaggattctgaaacagaacacactgtaaaaacaagaaataatgataatagtcgaaacactgatgacaaaagaaatggaataatttcaaaaaagttaagtcctgagaacacaaccctgaaatctattttgaaaagaaaaggcaccagtgatatcagtgatgaatctgatgacattgaaatt

SEQ ID NO: 93706 - DNA, 62713 bp, Homo sapiens
  misc_feature (1)...(62713): n = A,T,C or G
ttctatatttttagagatggggttttactgtgttgtccttgaactcactaagttgctggtcttgagctactggactcaagtgatcctcctgcctcggcttctcaaagtgctgggatgacaggcatgagccaccgtgcccagcctggaaagtagattttgccttcctgagactgcttcatttatttcttaggacttgacagactgaagtttgctagcttgctagtggtagaggagagacgttgacaaactgaaaacagtccacagaccaaatctggaccactgcctttttttatgcagtttgcaagtctgagtggttttcagttttaaatggttggaaaataatcaaaacaagaatgatatttcatgacgtgtgaragttgcatgaaattcaaatgcctgtgttcataaataaggatttattggaacacgcccacaactcattcatttccagttggtcactgctttcatgctagaacagcagaggtgagttgttttgagagattcatgtggcccctttatggaaaaggtccgctgactcttggtttagggtaaggatttagcattcccatggccccagctctgtctcccgccatctctctctgtcaaccccatgactctctgtccctgcctcccaggctcccccctcagccccagccccaccccagagagtgtgttccttgaggacatgaagccgggagaaggacacaaatgaccactagcatctccctgccaggccccaccccaggccctgcagagatgtcatttcagtagtgacaactttcccactttagggatgaggaaactgaggctcagagaggcaaatcatctgcccggatttacacagataataagcggcagagcttggatcttaccccagccatgctaacctcaaacccatactccacgccctggtttagaatgacatgaccggcccagaggcrggacacaggtgaggaccggtgggtgccctctggcctcggcccaaactttctcaggtgacacggtgacaccctggggcctgttcccttgctaagcacatccctcccactcctccgtgttcctgccatgtttcagccttggctcccgcctgcatttccacccgaccctggcagccagaataaacacggctgccccagcacccctcctatggagccaaaagaacttacttccctgctgcctcggcctgggattccaaacaataatgaaaaaaaacctaagcccgtgcccagaagagacagacgcagttccatggaaaatactcacctgtggcggggcatgggggaggcattccttggactgaggggagccgtctaacctgcttttatatgtccagttttacccaccaggcctcaccgaggaggaaaggggccctcttggcaaatgttctgtattaggaaggggacgtgttttatgagggttttaaatcgtctctggcctttgcagatttgctttcctggaccatggtccccatgggtcctctccctacagggattttccactcacctgatgcctgttttctcctctctgttgcctctggccaggcaaactgcccagtcggccatcgcatacaactcatgttttcccaggagcctgtctccacgaagagaccctccagggcagctgatgttaaacttcgtggaacacttttttccactagaccaggcagttttccaaatctccctggctaaacactgccagcttgttctgctcaggggaaagtagccaattgtcccgcaaagccatgtacgtgtgtgagtccacgtgtgtctgtgtgcacatgcatttgtgtgtgtcaatcacaccaagtcattggtattaaaatcctgctcaagagctggaggaagggtcaggaaggaggcagaacagctcagcagtgagcacagacctgctgggatttggctccggtgactgcagtctcttgggaggggaggggagaggaaggaaggggccccccatccccaccccaaagtccctgagctgggcactcatggcagcagagctccaggtgtcactgttcacccatcatgagctggtggcccgtggccatccctggcctgagtaccaatggcctcctcactgttctcccgacaaccactcagtacccagagctatcctggacccagcagcctgagcagactccgaaaacagagattccatcacatctgcctttgctccacagccccctcccaaaggccctcatcgcactgcagatgaaacccaaagtcctcctcctgcctgcgggacccagcctcagcgcttttcaaacctcagtgagcaaaggagcacctggggatctcgttcagtaaaaagcagagcctgattcaggagggccagggtggggcctgggattctgcatttctttttgtttttttgagacagagtcttgctctgtggcccaggctggagtacagtggcacaatctcagctcactgcaacctccacctaccgggttcaagcgattctcctgcctcagcctcccaaatagctgagattacaggtgcatcccactgtaccaggctcatttttgtattttttatagaaactgggtttccccatgttgcccaggctggtctcaaactcctggcctcaggtgatccgcctacctcggcctcccaaagtgctggaattacaggcatgagccaccgcacccggcctggattctgcatttctaacaggcttctggtccaggaaccgcagggtgagtgtggatcctcgctgcaccgggggagctgagccacggaaaaagttagttctcccaactgcagctcgcctcttcccttcaagcccagaaagcctcctttcacattttcagggacagacctgggatgtgaaatttcaaactctgccctgagttaaattccaggagagggtacaagagcaaaggataaaggctgggggagggagggaaaggcagagaggacgtgtccctgctgttctcactgaagccaggccacacgaccctcagggccagcctgctgaactgtgcacacacacatcacccccacacaaggtctccttggccccatcttcccagggacctcgggggagggcaacagaggaggtgacaagtttctctctgagcagttgatgctgggagaaacgtgtggcttgcagagctgccagtcccacaaaaaccacatcctgaaagatggaccaagtagaaaaaaaggccaccatccacctcaggccagcttctggaactgtcagttcctttggggaatgtctgacatgttctttttccctctgatttcatcccaaaccttttgagaagcaggttgcgtggcattgcacaagttacttagatttactgagcctgtttcctcctgcaataaatgggcacgagcctccctgggctgttaaggaaattcaatcagaaactgtgtaaaggccctgaggcactaaaggccaatttgggttcccgacctccttcccaccgtctgccctccatcccaggcacacaaccagagagatgtaagagggacctaacggttacccagccggtctggcatctgaccggggtgaaaatgcatctctgtatatgagttgcttcatatcttttggctttagtttccccagccataaaagtgtgtttggggtgggggaggaggactatgaccttcacaagcccttttagacttggggtgttaaccttacatgagagaaatgcctggaagaaaagcatggctagttagcaggaacgccgctgggttggaggccgggcagctcggaggcgcagtatcctatctgggccaccaggcggctccgaggacaacagatgagcaaagcccgcttttgcagcctggttctgtcttcagatctttccaggcttcttcgcaggcctggcggacaccagccgctgctgggtgggaaaggcctgtcactcccaggctggaatcgctttcccatttttacagacctcgaagatgagaggaggccgtcaccacagtggattccggccctggggtctgatggagacattggtccgcccttcggtcagactcttgggggcgttatgggggttgggggggtctctgctctgcaacccttagctgaaccccatcctccacttctctcctcccgtctggtcagagtgggaagaggtttggattgggatcccccctcctgcacttcctggctgggtaacctggacgatgggataacagtcccccgattgcaaggtcaggggaaggactgtgtcagaatataggccctcagtgcaggacagttgctcatcctaagcctctcctgccttttgctcttccagtggcttttcacccagaaggaagatcctcccctgcagaacctctccccagaactaggtctttgcaggtgacgaggtaatcccagcctcccctccccgcagatcagcgtttttcgaagtgactttctcaccaggcggagcattgaaagtaccgatcccagcgcacccagccctgctgaatcagaatctctgggggtgaggcccaggaatcgccgtctgaacaagtcgcgggctggaaacggctgccccagattacagggcagctccctgcttcgctctcgctcctccggccccgggaacgtgcaggggggcgggaggcaagtcccatcagcactttgaactggggctgctttttagtgactcacctcccagacttcctgcaacagacaactctaaatagctcggtcccaccctccagcaggggagacattccggtcgggaagggcaggaggttagaaggtgggtgccccgccagggcagtccagggagacccaaggacaggagacgctggctgcacagcacaggggcgcacgaataggacgttttgtttacaggcttttgttattaaggaaattggtgtcagtcaaggtaattctagctcagatgagcaataaatatgctcccagctaatcttgtggggattttattggcactcggagcagaggttcctttaccttgactactccctcccctcaaagcaaagtcctgctccccagcggcttccccctaagcatcgtgaggcacttgggtcaggcttttaaaagtccactctacgtgaacacagaagaggtccgggcaaaggtgaggagtggcttcctgatcctacctggaggccgaggatgaccaaatgacctgaaataaaaccctgggtgacctggttggatcaaggcatacgcaagctcccccgggcctgctccacactcggggtgatcacctggcccgcgggcggcccgggcaaggaggaacgtctcgagaaggcagccggctcgccggagtcggttccagcgtgttcgagttacagctgcgagccctcagggacaccggcggcaagtcccggcttgcagagaggggagccagtcccgggagagcgcgagtcccggcgagcccgagtgcgcgccttatgcgcgctccccgcgacggcgcagggggaggggaggccgcagcagccactcagaggaacggtagtgaagcctcccaacaactttaactgtcaatcagacttaatggggtattgaaaaaatgggggaaaaaggggccgccctctccgcgacgcggctgcccggggagcgaatgaatagggccgcgcagaccaaggcgtccgatccacgcgcgctccacacccggaccctctccaagttggaaaggacaaaaagaaggcaataaatgctaaaaagggagagaaggggagctggatcgagcggcaactcccagcctctgctggaacagagagggagggagggagccggagcgagcgagcgcgcgcgagggcgagcgctgcacgtaaagaaactgacacccggaccccccacttctcctgcacgttgctggcaatcagatcgcgtttaagcaatttcctgagcccaagaatagcaatgagtcgggagactttcgcgggctgaaattgggagctccaagcactttttccccccactttttttttttttttttttctggagacggggtgggggtgggggcgctacaatttggaatcagcttttttttttttttttttttttttttaatcttgcactttgaaaccgcgggaccgaggcagggtgcgcgcgtgtggttggtgcctttttttttttttcttcccctccctaaactcctctgtcagtctgtaaacattacctgagaattccccagccgaaacggctgctggggcaagaaacttcttgttagaactttccacctccggcttccccctccacctcttttaccgtcccaaccttaggagacgctttttctcccccagaggagaatttatcttttttttttttttttttttctttttctcacccggtgctttgcatttgggaagaggtgatttcaagagtggccaggtgggacgcctctctcctccttattcggtttactatttattgttcggggtgttttttaattcctgtattgctcggcccggggagtttcgccccctgcccggctccgcggcgcggaggatggygtggaaacggctgggcgcgctggtgatgttccctctacagatgatctatctggtggtgaaagcagccgtcggactggtgctgcccgccaagctgcgggacctgtcgcgggagaacgtcctcatcaccggcggcgggagaggcatcgggcgtcagctcgcccgcgagttcgcggagcgcggcgccagaaaggtaccaggcactgcgactccagggagtggggggccgcaggggcgggggtaagcccacctgctgccgctgcgggatcccgcgcccgggagctgagagtcgccggccaccccacttctccgcgccacccacgagtgctgagctagtcggtttcaccttgtaaatttcccgggcaccggactgtcttttttggcaggttcagagttgatccgctcctttgggatcggtggctggctgactggctattcacccccaccctgaaacctaagagacccaccatttcccacattcctgcctcccaaaggaaggtgttgtgcccccctcccccgccttcccccctttttcttgccgccaccctggtgagtgcagggtgtgcgcactcctgggtagagctgggagccgcctgctagctggcgcctcgtattttccttggcaacccgctacccagccccaacctgggcggctgcagctctgaagacacgagagagggtacttggtttgggtttgaaaagggaagagcggtcttgtatgcagtagtctggccggaccgacactgagaggcccaggtgtttggaaagcaggaaagaggaggccagggtaagcagctactgataaagagcccttgttctcaccttcaaccctgtcccctcccccccagtacaccccccagggatccctccccatttagctggaaggtggtgctgcaaggagggtcctgcccaccaaacacggcctttaactttttggtggtcctggcaccccttgctccaggttttggagacctggtgccasagtggggagagtgggcaggctgtcacccaactcccagcccaggccaggctgactcacgcggtgaccagagccatcaggagagggaggcaggccaggctgtctccagccagccctgtgaagaggaagagcgaaaacagggaattagtttgaaacttaaactgttgtgaactaggggggtgaaagggccgcaaagccagctgatctgacatggagccgcataccttggggattaagtaaatatgtactgtagaaaaccaaacctgcatgtaattccaggttgcttttgttttgttaaatactgccctgagatttacaattcctccggggtggctctgactgggactgaactttggagcctgaactatcagccaaagccgatccgattaactcttccctagccgggctggccggagcctgtggtggccaagctagcaggggtctggctgtccaggactccctcttctccttgggtggtttggacagccgcttgaccttgcatttggagggggagttgggaagcgtttttaacccttggacacaacgaataaggggaagtcagagttgttctcagcagtttcatttccttgaggcgatgccccataaaagggctcctgaagctctttgtgaaggggwctgaaaagggcagatgagggtgtcctttggggcggaygtggggtttgggacaattgcatgtgattgtcattctttagctgtctgcatcccacagaaacttttttctgagtcttccagctggcccaagtcctgggtctcttttactgttcttgtagctgactacagtaggcagatgaggaactcttagtcaatctggaaaaactcgactgactataaacaatcctaaattgaaagaagtgtatggcattggggggtgggtgtgatagtacagagtggagcctgcaagttcacgcaccgggaaccaaaccccacctaacttggactggacgtcctcttccagggaatccagccagggccaattagaaatgtgtcttaaattggtgtcagggtcaccaaaaacaaaaacaggatccatgggggcctgtgaaacttcgagtgccattcatgctcggttcagtcatctgactygtcaggatgaccagcagtgctccctgtaactcgccattatctgaccaattactggagctactttataatgaggcttctggagctactttataatgaggcttctggagctactttataatgaggcttctgtttgctgtcatggtggggagtttggaattgtggcttcttgcctaacaccaatgagaggactttgggacaaacccccagagccaggagtgttttgaggcctagyggggttgggaacaaagggtcaagtgtcgagggagtggggaaattatgggttggggacaggtgtgaacagtgggcttgggggtggcccaagagtactagaccagagaggtccagtgccacccgcagcctgcagtgatactagacagggggcggctgtgtggaaccacagatgacatcccttctcctcttgatggaagtggaggctgcatctgagagcttcccagcctagattctggtggctgcatctgagagcttcccagcctagattctggtgggattggatctgggagggggaagaccccaaaaagcaaaaaaaaaaaaaaaaaaaagtgtaccagagtctctgcaaagagctgacgtgtccaggagttatctgtttatttgggaaggagggagagagttgacaacccagtttcccataatgaccttgagttaaataggatttggcaatatttgtgggtggtggtgagccttagggtgcaaaggtggcccaaataagcgagggtttttttttttttaaaggcacactaaggctgtaagaatttgaaagctccggacacatctctccttacccacagtgcactgtggcaaactgaggcagggccagtcatggttagggtttctaggcgtaaaggtcttgctttttaattttctttgccctcctagaattccttccacaaaagcattcacaaaccttaaacttattccccttccctccaagggaactaacttctggctagtggtcagccccggctccagtctttgagtttgacatggtgttagcaggagcccctgagaggagaagtggaccgttcatttagaagtatttgtagggaccatccccgcctttggtctggtatccagcaagtggctggacgaaagtcttgggccatgattgcaaaccttgggaggtggggcaacatacgtgggcctaataccacgtcaggaactccaggaccttggctgggagcagtggctcatgcctgtaatcccagcactttgggaggctgaggcaggcggatcacttgaggtcaggagttcgagaccagcctggccaacatggtgactccccatctcgactaaaaatacaaaaaattatccaggcctggtggtaagcgcccgtaatcccagctactcgggaggctgaggcaggagaagtgcttgaacccaggaggtagaggttgcagtgagcctagatcacgccattgcactccagcctgggcgacagagcaaaactctgtctcaaaaacaaacaaacaaacaaaaaaactcaattcccacttccgagaggtagtctgaggggaggtatttcaggaaggtagtatgggaactggcttggagttctgtcttgctgtcagtgaatttacagcatgtgggtagatagccctgttcctacagcacccagccaggaactagcactgtgagtagatttatraaccccattctccagcacttccattcagcaagtcctgtgtccttcccatccctagccctggggccagcccaagcttataagtcccttgacaccatctctgagagacctagcttagcaaacctacctggggtatctgttcggtgtttggcacagctctgggcctgtaagaaaatgtagcaaagatgaataaagacctagagtgtggccaggtgcttacagtgaaggcacaagtcaccatctgtatgtgcttcctgtggttaccatgaccaattaggacaaacttgacggcttactacaacaaaatgtattctcttgtggttctggaggccagaagtctgaaatcaaggcatcagcagggttctgggttcctctccactcaaaagactacgggaagatccttcgtcatctcttccagctcctggtggctcctgatgctccttggcttatggaagcatggctccagtctctcctttcatcatcccatggccttccttgctgtgtgtgtctacgtcccgtcatctcctttttttttttttgaaacagagttttgctcttattgcccaggctggagtgcaatggcgtgatcttggctcactgcaacctccgcctcccagattcaagcgattctcctgtctcagccttccgagtagctgggattacaggcgtgcgtgccaccatgcccaactcattttgtatttttagtagagatggggtttctccatgttggtcaggctggtctcgaactcccaacctcaggtgatccaccygcctcagcctcccgaagtgctcggattacaggtgtgagccaccgtgcccacccccatcatcttcttataaggacactagttattggattcagggcacacactaaatccaatgtgattgcatctcaagatccttaactagttatagctccaaaaactctctttccaaatgaggtgacattctgaagttctggatgggcgtgaagtttgggagatgctacacagtggaagcacagaggagcagttaatttatagcaggtgctcatgaaaggtttcatgaaggaaggagcattcgactgagccttgaagaaggtcaagtgtttcaaccagaaggggtgtgacaagggaaatctaggtacaagaaaccacctgatcaaaagctctacctggctggaattgcgggagggaagaggaaagggaagcaagaaaacattgtattgtgggatagggaggtaagcagggagtttacacctcagactctgagtcaggtcagtactggtgagaatagaaaaaaagagaaagagaagagaagggtccagacaggtcatctgtgggtccctagagtcatcaggccaaaacagctgcactaaccaatttacagggagagagcagtggcccatctctcccatcctcactctgtgcagcctgaaagcaggcaggtaggctacctgtcctacctgtgacatctggaagtgtttctgcttagagcatcggtcacaactgaccttacaaatgagcctgtctcatgaataaacaaacatctccttcttactcccccaggcccttcccttgggggaacaaaggtgtctacctctgggaccacgcccccctgcagtcttgctcacttgtgcaggaggccagagactgagcttttatttatttatttatttatttattttaaaaatagagacgggagtctccctrtgttgcttaggttagtctcgaactcttgggctcaagcaatccttccttcttgaccttccaaagkgctgggattacaggtatgagcttccacacccagccaagackgggttcttgaccctggaaaagttactaccttctccaggttgcagctgagaagcacacctataaaatgagaggggttacaatgatccctaagatcccggcacgctcraaaattctcgtcttacasatcagtcaacccaagaaagcaacggattgccaggcttccctgaattgcaagcaggagacttccaggtgaagaaagcatttgtccccatcactgatctcagcctttgctagtcatcagatgccaccaaatgaaaaagaagcaactcagagttggaagatgtgctgtgccccagctccgcagagccccacacccattcaaaactccctcaacaggtagctgtctgccatggatttatttcagctcttgcagaagacgttagtatttccaaactgtcgcttctaaaggaataagggacccaaattccctgactagcatgtcaaacaaaatttcctggtttttttcttctaaattcaccaacttktctatttgggctttcaggaatgcctcctccatctagcaatactgactctgagtcaagttcattttcagtgcacccagcccttctgctaattctcrtttcgacttcaagctcttctgagcttccatcttttcagatgaagcgcacttgtttatggctgcacagatcccttccaagcccttctgatctctgtatctttgcagttactttctctggttcatttccatcttggtatttgccgaggccgtctgccttgagaaagtgatctcggctgtatttatgaggtgtcctttctaaccaggaagtgtatctggttgtcacaatcgctgtaacaaaagcccttgtcttaacctgccactaccagcgatatcctaccacagttttgagcatcagtgcgggatgggtcccacaccctacacgttctcccttatccttggacaaaagcatgaacacacccagaattttataaggctgtgctcaccgttgtcttcaggagacacaatccaaaaatataagtccataagatacttgaaacatttcaaacatattattcagatgaaccacgaggattacgaaaccattgaagcccattggaaatgagaaaagtgagtctatttagacactagcatgcccaaatgtgtgctcattgctgtggcacccctgaaatgagtgagatcttagaatctgaaaatgagcacatrcctagattctcaacaagaaagtgccgggttagcaaatgaatgaatggttggtgggaactcattcatttattcacttattcatacattcagcacatttactgagcacctactatatgccaggcactgttctgggcactgaaggcatgcagggagcaaagcagatgaaaatccccacccatgtagtgagagctggcattttagtaagagagacagataaaaagcaagatcartagaacagtacattctcatgcctgtaatcccagcactttaggaggctaaggcaggcggaacacttgaggtcaggagttcaagaccagcttgacccaacatggtgaaaccctccttctctactaataatacaaaaaaaaaaaaaaaattgctgggcatggtagagcgcacytataatcccagctacttgggagtctgaggcacgagaattgcttgaacctgggaggcggaggttgcagtgagcagagatcatgccactgcactccagcctgagcaacagtgggagactctgtctcaaaaaataaataaataaataaaacagaacattgaattgtcattataagcaatgaggagaaaaccaatgaggcaagaaggatgggaatgcgagggcctgagattctaggtagggtataaggaaggccacactgagaaggagacacgaggaaagacctgaaggaggcgagggcatggtgggaagggagcagtagcattccaggaagaggacagggcaagggctctgaggagagagtggagtgtctgaggaccaagaggtggccagtgtggctgaagcagtgagtgagtggggaggaagaactgagggagacaggttcccatgtaggacaggtagacctagctggccccacgactcaagcatcatgccctcacccaagccttagcaggatcccctggctgctgtgacaggcaggtggtggaggtgtcaggccaggggtgggggacctgctaggaggccgccaggtttccatgcctcctccaaaaatatcacccagacttgcttcgccaccttctttgagagcttcccagagctcagggaatgctgtcagcattgcactagagttttggaggatgctgagggcctcctctgatatcttttactgtcaagatggaagtgtctgggctgagggtaatggagaatctaggcagtccggggtgccactgttggagggggtgggaggcagctggcacccagccctcagggctctgctgggcagccctgctcccagccagatcctgatctttcttgctggtaacttaggtgaggaagtgacaaccagcttcagggtgacacggctctgaggaatcgtgactatgttggctcygttcattgattcagcaaactaggccttggagatgcggcagggaacctcataaacaaggttctctccttgtgacacttagtgytcttggagtgaccaccatccccagactgaaaaatctcctaacactgtggaaggatgagttggcaccaacaagcaggcttctaatggcagtagtgcttaacccctctgaataaaatcagataattgtgctggtgcttagaatgaaggagatgcttttcagtcctactttgtcaaacgacttctggggtattgtgtccatgtgggccagcactttgacagggcccttgaccaactggaaggtatccagggagcaggctgggtgacaagggctagaagccatgacttaggttgggtggcaaatccatgggagtatagttgactgcttaagaggcaagagagggtatcagctgcattccagtaccacagaggcatgggacctgttctagatggttctggaggcccatgctaggcccgtggggagggctcgaaaatgcagacctgggccctgcaagaggaacaccttcctgccctttggaacaggttgctctttaagcaaacatggtgtcgagatttctgcactgggggaggttaggttctggacaacctcctaggtcccttctaccctttgattctgtgagtcattgtcatgaagtcagtgagggcaatgacacaggcaggggcaggggcagggggcaggaggaaaagaggacaccagcatcgatcaaccaacacttgaaaattaaaagaaggcagcccttctcagcatgacttcagcaggatcctccagcagtgatgtcattcctttgtccaggctttccagggtgctggggagcagggaggaggcaagagggtgcagggtgggcacagactcacatccttcactcaggcttagattcctgtggcttctgaactggatgctgatggcttccttgcgttcgtagtaatattcatgaccgtggtactctacatgtctgtggtaccatacacgattggtaatatacgtgactgtggtaatatacaaggggacttcaaaaaggtggtggaaaatggaattaaaggatgaaaataaaaaatataggccaggcacagtggctcactcctgtattcccagcactgtgggaggccgaggcgggcagatcacttgacgtcaggagttcgagaccagcctgtccaacaggatgagaccccatctctactaaaaatacaaaaattatctggcatggtggtgcatgcctgggatcccagctactcgggagactgaggcaggagaatcacttgaacctgggaggtggagtttgcagtgagtggagatcgcaccactgcacttcagcctgggcaacagagcaagactgcgtctttctccctctctccatatatacacacacacacacatacacacacacacatatacacaaatatatatattttatttctcaacataaacttcatcaagttacaagacacttttgtaagcgatgataccagccatctagtccatccctaaataactgagggtcctgagagttcagccatgtcaatacagtctttttttttacatcattagctgaagagaaatggatgccctttgtcttagtcctttctcacattgctatagagaaatattagagactgagtaatttataaaggaaagaagtttaattgactcacagttacacatggctgaggaggcctcaggaaacttaccatcatggcagaaggagaaggggaagcaaggcaccttcttcacaaggcagcaggaaggagaatgaacttagaaggaactaccgaacacttataaaaccatcagatcacgtgagagctccctcactatcatgagaacagcatagaggaaactattcccatgatccaattacggccacctcatctctcccttggcagatggggattatggggattataattcaagatgagatttgggtggggacacaatgcttaactgtatcaccctttaaagattttttaagattaagaaacaaaaggaagttagaaacagccaaatcaggactgtaaagtggatgcctaatgatttcccatcaaaaccctcacaaaattgtccttgtttgatgagaggaatgaatgcgaaccttgtcttagtggagcaggaccatctggtgaggctttcctgggtgtttttctgttaaagttttggctaactttctcaaaacactctcattataagcagatattattgttcttgtccctccagaaacttaacaagcaaaatgccttgaacatcccaaaaaaactattgccatgacctttgctcttggtcggtctgcttttgctttgactgggccatgtccacctcttggtagccattgctttgattgtgctttgtcttcaggattgtagtggttaatgcttcatcctctcttacagttctttgaagaaatgcttcaagatcttgatcccacttgtttaaaatttttgttgaaagcagctgggcacggtggctcacacctgtaatcccagcactttgggaggctgaggcgggcggatcacctggtcgggagttcaagaccagcctgaccaacatggagaaaccccatctctactaaaaatacaaaaaaaaaaaattagcttggcatggtggcacatgcctgtaatctcagctactcgggaggctgaggcaggagaatcgcttgaacccgggaggcggaggttgccgtgagccaagatcacgtcattgcactccagcctggacaacaagagtgaaactcggtctcaaaaaaataaataaataaaataaaataaaataaaattttcattgaaagctttgctctcatctgcacctgatctggatgcagtggttttggtgcccatcaagtggaaagtttgttcaactttaatttttcagtcagaattgtgtatgctgaaccaatggagatgtctatggtattggctttttttttttttttttttgctgttaattgtcagtcctcttcagttagagcacaaacaaratgaattttttctttctaatttgatgtggatggtctggcacttcaggctttatcttcaacatcatctcatcccttcttaacaagttatccatttattaactactgctgatttctatttttttttttttttttgagacagagtctcactctgtcgccaggctggagtgcagtgacatgatttcagctcactgcaacctccgcctcctgggttcaagcaattctcctgcctcagcctcccaagtagctgggactacaggcgcacgtcaccatgctggctaatttttgtatttttagtagagacgggatttcaccatgttggccaggatgatctcggtctcttgaccttgtgatccgcctgcctcggcctcccaaagtgctgggattacaggtgtgaggcaccgcacctagccaactgctgatttctttagggcattgtccccataaacttttcataaagtatcagtgatttcaccgttcttccatctaagcaagcttcactgtaaatttgatgtttgttcttgcttcagttttaggagaatttatgttgctctgataggagttcttttcaaactgatgtcttatccttcttagtgcctcaaactagatcccatttagtcatgttataacaagttagttattttggggcaaaaaaaatctcaaatatatgcctagttttttcgtaatacgcattttccttgaactttttgaagaccctttgtacatgattgtggtaaaagcatgaatgtaggaatatacatggcactattactatacatggtactgttaatatacatgggaatatacatggcactattaatatacagggtgctattaatgactatggtactgtacaggacatggtattgtacatgactatggtaatatacaagatagatactgtatatgaccttggtaatatacaagatggatactctacaagaccatattaatatgcaagaatgatactgtacatgaccatggtaatatacaagattgatactgtacataaccgtggtaatatacaagacctatactgtacatgaccatggtaatatacatggctgtggcactgtacatgactgtgacaatgtgtgtgacgatggtaacacacgtgacttggtactctacatgactgcacagtgcttttgcacattcattgtcttccttgaccttttttttttttttttttttgagatggagttttgccagtcgcgcaggctggagtgcagtggcacgatctcggttcattgcaacctccacctcctcccgggttcaaatgattctcctgcctccgcctcccaggttcaagtaattctcctgcctcagcctcccaagtagctgggattacaggcatgcgccaccccagctaatttttgtatttttaatagagatggggtttcaccatgttggccaggatggtctcgatctcttgaccttgtgatccacccgcctcagcctcccaaagtgcggggattacaggcgtgagccaccgcacccggccagcagcatgcatttctgagatccaggtgaagtggccgtcctgggacacgtcgctgagggcagattctgaacccaggtttcccagcttcaacactccatcttttcccactgcaacaaataatctcagcctggcctggcctgcctcattcagggtcatggagaggtcaagagacaagctgttaagtaatggggcttagtacacagagggttctggagagagcggtgataagcagtgaatgagtcaacaggatgcgggcagggatgtagtgaaatccgcttttacacaaacatcatttagagcactgagtagcagtatttgcatacaatgaatgggagacttgccaaaggaataaaatagtcctcagttatcagggtttcttttaaagagtaaactgacaagcagggtaatagcacagttgaatttctttcatttgacaaccagtgtgacatcttaacatgcagagacccagctgcagaggagagagtgagtgacagctccctccagttaagcccgaggtcactgagctctgcgtggcctgagagctttgatcactgtaaattaaggaaaatcttagaagacttctcgaaggaggtggcaactgagggggttgcaggaactctccatttttctgctggttgtagagcccttcaagggtctgaagaaaatatgaactctatcccaggaagaaggtgcaactgaaagttttgtacttttaaggggtcatgtacccctgtcgcctatcccagactctgggttaagaaggcttggactagatacaatcaaaacccatccaagtcctacaggctcagatgcaggctcagggcgagagctcgtgtgagaggcagggaacgccctggtatcctgtgacactgaagccagggcaagctcagggtggagagtacagatgtgtggcttggtgcttaaggccaccartggtcagcctggtgaaggccactgggccccagcctttcttacctcattggccatccctacttcaagraatgtggccttaaatcctcttttcagcagcctttcggggattttgatgagtgaagcgtatgatgatcttgtccacactgaaacagcctcctagggaacacggtctcctgtctgcgtcccacctcccccaaccacttctaccagcctccaagccccgcggtccccatgcggacctcagcgccagctgaggttcaaggtccaggttttcaaactgggttccggagcaccctagaggccccaagaaggtagggccacgtgggagatggagcagggagggttctgagggacccctccttcctgcggaccagatcagtgttgtcacttctgttttgtggcttacaattccatgttaagattttggtgtgcattttgaaagaaagtcattgttttaaagaaaggaaaaaaataaggcttgaaaatgatgcttcaaggaaatgactcagcctgctccctctcctcgatggaccctttttggatttgctggatgtcccctctttaatgacacctccacctttggctctttactccaaggtgctgtggcttctggaccaaatgccctctagttcgcttgggcttttgcccctcaggagagggacccacactcccaccccagatgtgtggaacccctcctgccctcagcctcggcacctcctctacctctggggtgcccacaagctagaagctctgaatgcccaagcggggctgagacagcctctccaagggggactcagcccaaatccatctgccagaaaggacacaggaggcttctccctggccctccctgcctccaaagcacccatccctgggagagtgtgccttgacaaccccagccccaaagcccagacctggcccaaaggcagtgtcacagcagccaaaatcttttgggcggtagaggccggctccggccagagcactcatgcaatttgtggtgccggccagggctgctggaaaccagtgcctaatgctgtagattatgaggggcctcccagtgacctgctgtgtgaccttgggcgagcaaccctctctgggctttggttccctcatctgaaaaatgaaggtgtggaaatgtagtgaaaaagctcctatcacctcctgggtaatggcaagagcgtttccaagagacaaccactccttccaggtggggcaatggccctgggggtggggggcggtggataccccctgctccagcccttctccttctgcatattagagcagatgctcagcaggacatcagagaaaaaaggcaaaaaacccactggcctgactcaaccttggttctgggactcccccgggaagcagagagttgtgcccctgccacagaagccctcagggggaattggagactttgaccctttctagaagtctgtgggagggaaccactccctacagggagtctggccatctcccttccacccgaggcctcacctctgttgagatgacccgtggcacagcccctgtcttcccaggcaggggctggtccaacataggcctttctgcaacccaggggctgaggctggtcaggggtacagcctcctctctggtcctggctgcccaacccccacaaccatccaacttcccctgcacaaggcattttgatctctgcgtccaagtagctcaattggtcaggaccgggctgcggtgaggccaaagtcaggggttaccatagcaactcaccacgctttgtggctgcttgttgatatccacaggggcagggggcatgccctctcactcaccaagtatctggcaactggcacagtatctggcccacagtagatacttaataaatggttgttgcctaaatgaatgcatgaccgacccattgtagctagttagagccagtgattactgagcacctactgtgtgccagggactgttctaagccctgacacgtcacaaggtcatttactactcgaagtaaccttccagcgtgggtaccgttatcatcttcttcttaccaacaggactctgagagtcagtaacttagaatcacacagctagtaaatgacccagcaggattggaacccagggtgtctgcttgtaaccaatgagtcttgccttttggttgatagtttcacggaagagatggcattgatggcccctagtggagtccgtagccaggcagtctatatgggtcaaacaacatcacctccagctttcccgatgggggctctggaggtgttcctcagattggtttattgactcatgggaccagaagtccctgggtagggctgactttgggcatgtctccaggggctcagtgctgtcaggactcaggagagtttctctctcccctcactttgaggcagacctctctgccacggggctgctcacacctgccccctgctgctcgtaacgtaacctttccagctcccattcaagtagacagacaggtgttctttgcccagaagtcctggaagggtccaggaattgggtctctctggcagtgactgggtgagcctgaaccaaggaaatggtgctctatttggccagctgtgggtcatggccagactctgagccaggggtataccagccccagccaagccatagggtttgggagtcgggaggtcggcttctgcagggcagatggggggataccatgagcaggagcaaggggtccagtacaccttcttgtggaaggacaacactcatcttccagtcatgccacgtggaaacagccaggagagccaggcctgcctgtatcaggcagccctccagagctaatcctgcagaccttatcaggtcatttgctgatgccttaccaccgcgccccccaaccccccacccatctccccaagaaaaaaaagatagaatggacttttcagggttgaactaaaatctctgccttcaaggagattgtagttcaaagaggcaaaatgctcagccaccaaagtccagcaggttgtcaacagactgactttggaaacttttctagacgatagatagagagatagactgtgatatgagaggaaaggaagccctttgctaggtcatggttgctagtgatacttcacaggtgcgagaggccagctctccctcccctccagctgcgggcaggggagcagaacagagatgatattgggtccttccaaggtggttggtgaggggggtcttccttttagtgctcccacagcccagcaagcagtggcccctctcacaggcctggtagcaggtcaccgtggggagctggggccagtgtgactgtaaagggcagcgtgaccttcatgcaggcaggcagtcctgccagacacacccacatggcgtctgtccacccttggctgcacggcccatgttcttacatctcagatgccaaagaattaagagtctgacctggcctctccgggccacttccctatgagcacacagcagaggagacggggtccttaagggatggcaagacacaaggtcagtgtggactgggcacatggtgccctccgagggctcacacctcctcagccagcagatccatgccttggctttggggatatctcctgagccttcaagtcagtggaaatgtttgtgtgagtgtgtgtgtgtgtgtgtacgtgtacacacacacacacacagatgtgcggttctttctttcacaaggagccagtaaagcatagagattcagattttgagttcaggagtcaaccacaccaaagttcatatgctggctcttctattcacttgccgtgtgaccttgagcaagttactggacctctctgagcctacatgccttggtagggtggaccatggctgaaggcagctgcaagcacagacgggggcttccaaccagtctttgttgttaataaagtgctacccacgtgttaaacaatttacatgacaatctgatttactcctcagagcaaccctatgacacagtcactgttcccagtttaaagatggaaatactagggctcagagacgttaaatacttgcccaaggtcacacagcccaggtagccatgggattcgaatccaggcagtctggcttctaggaaaggaaacctggctgtgcctaggactggggtctaagctgaggcgttaaggatgagatggaagcagcagaaggaaaatatcccaggcagagggaaagagcagagctagaaaataggagatgagagagtttgtttcctttgggaaaaagaccctggcctggccagaacaaaagtgtgagcagggagtggagagagatggccagggccatacctcatagagcctggtggttgtggggtgaagtctggacatgattgggagagcactagggagccactgaaggctttctacaggatgcacgaccagcccacattactggaaggtgacggaagcctgattttccacagaattctctgatgttggagggatgtgatgctctctgaggaccacggaaaatcactttctgtggggctggtgcttgggaaaattcccgcctcaactggccctwtgggccaagggcctggcttttctcccagcatcctggtctttgcagggtgtgctggcctggccatttcccattgaatgtcccgcttcctctgaatcccctggccctctgggcccagagccacagcctgatagcatgagaccagtcagccggaagggttaactccaaggcagttgaccttcgtcctagcagagattaaaccgattcctaattaatagcctgtaggatagctaccttggcacagcttgcaagtaatttaaggcttgtccttagaggctggtccataaattacgtttaattagctgaaggtctccctgggacacatcagcctggtgtgtgattgagcctaccagctcagtgacctctgaatttcatgttggagtatgagggagatgctgagatactccagtaaaatgtttatttccttttccaaaacaagagctgaattctttcttctgctagcagctctgaggggtaccgccaaccggtttgggggtctctgctcagctagttcctggctttgctcttgactaattacttatayttccagggtctcagtgccttgtctctaaaaagaagccgagttcaagtctacagacccttatctgaaacccttaaggctagctgtgtctcataggtctgatgttttggactttagaaatgcaatccagcagataggccatatacctagtgatgcccacagcaaggtctagggcagccacccgtaatcacagtgatagttaccacagtgggataaagagaccagaactagcctcatgatggttccaattagggcttgctctaaacgcgtgtgtcaaaaataaatgtaggattttagagctttttggattctagaacggaggataaggggccgtaaacctcactgttgaactcagagaagctcctaaataaatgctaattatgatgagtactgttgttatttttttttgttttattttacttgccgagacagagtctcactccatcactcaggctggagtgcattggtgcgatctcaggttattgcagcctcaacctcccaggctcacgtgatcctccccagtggccgggactacaggcgcgcaccaccatgcctggctaacttttgtatttttagtggagacaggctttcaccatgttgcccaggttacctgttgttattattcctctttcccctacagctcataygctgccatgtccactgcccctgcacatgtagagactggatgtgcgggcaacttttagtttggcaggtgtcacctgtctgctggggatgtgtgatacgttctccctggagtggctctgccagagctgtgtttgtgtttcctgctgcctgggggagcgtggaaggcttgtgacttggcacgaggtcccactgggtgttcctgttgggcaccctctgtgcgatggctggggctggcttcctgggtgtgacccagggattctcactggccctgctctcagaagcgccctacacttggtttgaggctcggctgtcaccatcttgcarttctttacaatttttgaaccagggaccctccgaatgatgtggctggtcctaacgacagccatagcacacaggttgtcaacttcattcctcccaagttcccctcaaagggaagttactaatgtttcacagaagaggcaaaactatttcattcattcattcacacagtcactgggcacccaattaccaagccaggcctggaaattccttggagagcctacattctagagagtgtgtgtgtttgagaatgggagaaatagacaaaaaccaagcaaacaaataaccaccatcacttcagatagtgaccaagtgctgcaaagacaagaaagcagagggatgtgaggcagaaggatgttaaagattaaattcagtgaaggagaagctggaatcagggctggagttcagctgtgccttgttgcactccatgagtactcgctaaagatctggggtcatttcaggccgggcgccatggctcacgcctgtaatcccaacactttggaaggctgaggtgggtggaccagttgaggtcaggagttcgagaccagcctggccaagatggtgaaaccctgtctctactaaaaatacaaaaattagccaggtgcggtggtgggcgcctgtaatcccaggcactcgagaggctgaggcaggagaatcgcttgaacccgggaggcggaggttgcagtgagccgagatcgcgccactgcactccagcctgggtgacagagtgagactccgtctagggcggggggagatctggggtcatttctaggttccccaccccccacaaggcagggtgatcattagttaatgaggtccaagtaggggagtcaatgggggtctccttgagccaggggggactattcatccccaaagacctcgtcaccccggcttctcacaataaacccagaggctcagtttgggggggcagtgggtgaggagaagggcagccttggtttctctgagggtctccaagttctccccgtgccaggccccctgcacctgaggcttctggccggccctgcggtttggtgagcattttcttgcacttttgaccttccccacaccagcacagggaggccagtttcagttttccccacttccccagatggagatggtgaagctcagagatgccaagtgactcatccaaaagtcacacagcaaatcaactccwgagcagattccttgaggccccaaccaggctgcttttcattccaaagggcagtgcaggctctcagctctgagcgctggctgccaagttagtgcggtccagggctgctctgggagctccgcgggataaacaggccccctgcttcggaagggaggggcggtgcgcggccaacgggacacttttatacctctttatacctggaagccatccctgcaaccccccaaccaggctttgcaagggagaagtaatgagcttcccagaaagcccagagcaaaggcaggcacctccccaatctcttcccacgaaaacccgaagctgaccccggaggcccagccctcgggtttagaggcttctcggggaagcggagacagagaccctagaggagaggctgcccccggaggggtgggagctgccagcccccaggggtgctcgaggggagcgaggccgctccagggaggtgggtgcccgcagaggggcggcgagggctgccgggacggttcacgcagcggccagcagactggctgcgtgttgcaatgtctggtggcgtttgcagcatcctgtccgtgtgtgcagctggggtaacctcgggccggcggaggagcgcgtgtggctcgtaggccctgcggccggaggctgctggcaccttgcatctcatttacagctccgggttcagccacaggtcagcggcgcccgtgacatcacggcgtctgtttaccgacgggtctgggcaagagcggacggtcccggagcgggagggggaccccagcagcgccccggcccccagcccggctcccctcctcaccccctccgcccagcccctcctcgtctgcacctgagacctcaacccagcccccttctgcagccacctaccctgtcccctccccagctgcacccgggatcccaacccagctcctctccacagcccccagcctgtcccatcgccccccatctgtaccctgaccgcacctcggccttccttcgccgcccggcccaggaccccaacctgtttccccgctttccccgcaaagccctccctatctgctcccgggacaccacctggccnnnnnnnnnnnnnnnnnnnnnnnnnnnnnnnnnnnnnnnnnnnnnnnnnnnnnnnnnnnnnnnnnnnnnnnnnnnnnnnnnnnnnnnnnnnnnnnnnnnnnnnnnnnnnnnnnnnnnnnnnnnnnnnnnnnnnnnnnnnnnnnnnnnnnnnnnnnnnnnnnnnnnnnnnnnnnnnnnnnnnnnnnnnnnnnnnnnnnnnnnnnnnnnnnnnnnnnnnnnnnnnnnnnnnnnnnnnnnnnnnnnnnnnnnnnnnnnnnnnnnnnnnnnnnnnnnnnnnnnnnnnnnnnnnnnnnnnnnnnnnnnnnnnnnnnnnnnnnnnnnnnnnnnnnnnnnnnnnnnnnnnnnnnnnnnnnnnnnnnnnnnnnnnnnnnnnnnnnnnnnnnnnnnnnnnnnnnnnnnnnnnnnnnnnnnnnnnnnnnnnnnnnnnnnnnnnnnnnnnnnnnnnnnnnnnnnnnnnnnnnnnnnnnnnnnnnnnnnnnnnnnnnnnnnnnnnnnnnnnnnnnnnnnnnnnnnnnnnnnnnnnnnnnnnnnnnnnnnnnnnnnnnnnnnnnnnnnnnnnnnnnnnnnnnnnnnnnnnnnnnnnnnnnnnnnnnnnnnnnnnnnnnnnnnnnnnnnnnnnnnnnnnnnnnnnnnnnnnnnnnnnnnnnnnnnnnnnnnnnnnnnnnnnnnnnnnnnnnnnnnnnnnnnnnnnnnnnnnnnnnnnnnnnnnnnnnnnnnnnnnnnnnnnnnnnnnnnnnnnnnnnnnnnnnnnnnnnnnnnnnaaccaattgttctggaagctgaagggacctgggattctcttcctgcacacctggggcttgccagagccaaccctcctggagagggaggcgctggggctcagggaacggcaacctcattcttccattttctcaggccaaacgctctggtgtcctctgggaagctcactttctccagcacccagctctgcaaccgtccagaatccctcttctcccatcacctaagcatcccagcccagccccttccagcttcatgtcagaggctgtcttttttctccttacaacctcccaatctaccccatctcagaaaagaattcaaagtcctgctgtggctggtgtctcccgcttgctcttccacactggtctccgtgctggggaagctcattcccaccccagggcctttgcaccaactgttccctccaccagggatgctcttcctccacgcgtctgtatcgctccctccttcacttccctcaggtctcttccaaaatgttactttaaccaagaggacttccctgcacctttcccccaccatctgaataccactcccaccccataatcactccctccaaccccctacaaagctatgtgttcctcccatgcacatctagcactttctagtggctagaaaactacttactatacagtcattcgttcacgtgaacaagtgttcatgctcattgtccccggacttacacacaagcaaactccgcaagtgagataaatgtattccccgctggatcccagggcctccaaagtgcctggtgcacacaattccacaaatagtccttgaatgaatgaatgaggcaggacagggttgttaaaagagcttccctttggagtccgagccttgctttgaaacttctagtagtgcagcctgcatgagttacttagactgtccaaatttgaatcccaccccggtggacagtaatctggagatgtgtgctgtgagggaagggtggtctgtagatgctggctcctccctcctctccttggcacccccaccccaaggtcacccagcactttccagcaagaggtccagtgggggaaaagggcaaagrttgtgaggtgtcagccatgaactctagcctgagtttctctgcctccgtgttttgccaagtgcggccctgggcagtcagatggaggtggagcccctggccagtcttgtaggctggggatgtttgtgaaaagaaacatcagcccgtgggtttctggctgggagtgagcagtgttctgcctgcccagagtcagcttttgtgatcgtttccctggagagttttctgagtggtcccagaaccaaaaagtttcgcaagaatcacacccagggatgaggtggagactgcccagttgtcacgtactggctcttggcagggcgtggttttagcatttgaaggagtgtcctcaggaacactaggtgctcatcacagggggagacatgcctgtctcagcaactgggaaggaggaaatcaaagaagggtagatttgtaaatcaaatcagagctggtgtttgtggggttggggcattttacatgaagacctcttgggtaaagagacacttgagcagaacctgtgagaaggtggccaggtgtggtacctcactcctgtaatcccagcactttgggagactgaggcaggaggatcacttgaagccaggagttcaagaccagcctgggcaacaatgtgatacccccgtctctacaaataataataatcataataattttttaaaaagaaaagagggtgccctacaaggagagggatacttgggaaaagagaacagagagcagccagtacaaaggccctaaggtagagggggccagtgcttctgcagggccgagacctaggagggagtagctgagacgagggatggggcagaccaggaagggcctgcgatcccagtaaacactagattccagtctgtgagatgggcagccatcagtagtcataagcagggtgatgtggtctgacacattctagaaggatctctggctgttgtgttgagaacagactgaggcaggggccctggggcaaaggtagcagccaagtgaccttttgggaccaggtgaggggtccacttgtgctccaggtgaagggcgctgaggcagggccccaaggcgccgtggaggtggcgagaagtggtgagaagcctctggatttcagaggtcaggctgacagggtgcgtggtggagtgggcatacagtgagagaaaacacttaatgtgggacagtgaagagscttcggaggttaaaaagagcttggcatctgaaaacagggagtggtgtggaggggaagcagcctccgtcacytcccagcctcgggagcctggggctgggcctcgcttggcctcctctattgaatgaggataatggagcccatttgtgttagtttcctgtcaatggcacaacaaatgaccaccagctgtgtggcccaaaacaccaaagctgctctcacatttctgggtaccagaagtccaaactccaggtgtcagcagggccccactccctcccgggctctagggaaggatccttccttgtctctttcagctcctggtggctcttggcagctcctggcatcgcgtggcttgtggccgcctcactgccgtctctgcttccatcttcacgcggccttcctctcctctgtgtatgtctttcttctgtctctcatgaggacactagtccttagactcagagcccaccctaacccagggtgatctcactttgagatccccaactcaattacagctactcaattccaaagaccctctttcagcataaggtcacattcacaggtaccaagggttaggacttggactcagcttctcaggggacactaatcagccgactgtaccacatccgggcagccgagaggattcagtctaagagcccagagcaggatccagcctgcagtaaaggtccacagattgttcactgtggtggcggtgagtgcttgtcacagtcccaccccgcccacttggagagcaagggtgctccaggcaaaccccataccccctcacagcaaacaccagccctgggcactgtgctgacccatgctcagaacagcttctgtcctcacctgtcctcccacctgagccccatcagagccccagtgtcctcgcagaggggcaaggaacatctctgccatgcctttcataaccacttggtcatcaagaccgaatgatgaccgcacctttccctcattccctgggaggtggacacctttctgtccagtccttggacatggcatcagctcactgtacctgtgcactgaatgaatatgttgtttcgtggggtcattttgctcccgcaggtaaagtcagtggccaagggcacagattgcataagttgaggtcccagctctaccgcttaccgcttggaattacatagccccttcgtgtatcagttttctcgggtatgagcccttctgagctgacagaggactagacgccccacggcacccatgctgaggcagtgtggccagctagtgagccccacgtgcatgtcagagctactgtcattcctgtgcctcccaagcgggccagttccaggctggacgtccgcctggaggaagtctctgccctgctccaggttgcggtcagggacttgtgggagggcgacaccactggytgatctaatttgaggagcttcatcacaatcctccccaacagctgagccagcggtagccaaaacattctcggcaggccaaaacaggggcctggagccagggaaagcctgttttgcagggctacgtgggagagacctgcctaggcttcagcagcccagcagtgcaggaacaggaaggacacataaggacctagccgaagtccctgacaggcccagtggcttctgtcacctctgacctcctggggtcagccgtggggcacctgtaacgacctagggctacaccaataaatgctagctgttactatttttattagtacagcaacagatatagatcccccttgctgatggaagatccagaaccctgctggggtaatggttgcctggaaaacccgaagctctatgtctgtctcctcccctagaaacagccttgagtgggacaaaaccacagaatcgcacgatctctctgtccccatccttttacctgacagcatgcagactggattgtgtagagtctggaaaacaggcctcccagaaaaaaaggtggaagggattagaaagtctgggaaggagatgctggaagtcggtacctgatcattgtggatcagttttgatcagtgtgatcagtgtggatctgcactggaagcagaagggctggtaggcttgttgggtgtgcccgagtgacaggccagcactctcaatgggtgacagctagagggatcccactggagtccattcggagaaagcaggcttccttccagggctgtgctggggaggaagaggctgcggattcagagtcacattccaactattttttttttttagcgacagagtctttgtagaaatgactattctaggtcgggcacggtggctcacgcctgtaatcccagcactttgggaggccgaggcaggtggatcacctgaggtcaggagttcgagaccagcttggccaacatggagaaaccccgtctctactaaaattacaaaattagccgggcgtggtggcgcatgcctgtaatcccagctactcgggaggctgaggcaggagaattgctggaacccaggaggtgaaggtttcagtgagccaagatcacgccactgcactccagtctgggcaacaagagtgaaacatcatctcaaagcaaaagaaatgactaytctagaaacctaaagtgtcaccactctgggtgactggggcaggagtgaggagaagcctggaatgatatctgcttgctccccaccccaccctcagcacctccagaggctcctcaccagaacccccagagttccttggggctctgcttgaaaacctctcctccctaagaaatccccccgcagcttgctctgcaggtggacagttttgacagctggtctctaccttctcaggcttggggacgtagaaraaggagrgccttctaagtaaggtggaaggatggaatcaagaaatagcaagattctgtggttttgccccagtcaaggctgtgcctagggtagtcagatggaggtggagaccagatggggtcttccgggcaactgtttccccaacagggtatgtggatcttctactgcaaagggggatctatttctgttgctgtgctaataataataataataataataataatgacagctagctttttacaaaacagagacagagtcttgctatgttgcccaggctgatcttgaactcctggcctcaagtaattcccccacctcggcctcccaaagtgctgggaatataggcgtgagccaacatatccagcccacagctggcatttattgtgccctttcttaatcctcccaactactcttcaaagtgggtgttttaggctgggcacggtggctcacacctgtaattcaccatgttggtgaattatggtgaaaccccatctcaactaaaaatacaaaaattagctgggtgtggtggtgcacacctgtgatcccagctacttgggaggctgaggcaggagaatcgctcaaacccaggaagcagaggaggcagtgagccgagatcgcgccactgcactccagcctagcccacrgagcaagcctccatctcaaaaaaaaaaaaaaagaaaaagaaaagaaaagaaaaagagtggatgttttaaaccttaattcatagaggttaagatcatgttaattcataactgttaaagaattgaacccaggcagtctggctccagagcccatgttctaagctgctctactcgagaaagggtctctccttttggaaatagacagggttgtgaaagggggaaattctagtagtaacctatgccacgctcacactcaccctctgctatctagcaccccattctaaccttaatgtcttaaaagctagatgttgcttgcctgctcattctcatctgaccacagggatggatttttattaacagcctcctactggaggggccaggagcagagagctgtgcaccctccacgctgtgaccttcccaccccaccgcccagcctgctgtggtttggggtctctggcgggtattttctttccctctgagaagccaagtcagcaccgatccagctccaaaacatggggcccatgggacatgagctggcctgccaaagacctgcccagggtctcagatctttcmggggctgccaattataaacagatgctcctcctgggacgcacccagagaccacccagctcatgtcgccggtgggagggtgcgctgcagctgaactccaggaatgaaagccaagtccagcattagtgcaagcccctctgggctaggaaggcaaggctgggtagagaaggggcactcggtatcctcctggggctggtgtcttgtgatgatgttagctgagcttttactcttgtgcctggcccatgctggatgctggggttacgagatgaataagattccctggaggaccttgcacgctcatgggagaggcaggggtgttcaccagtcagcatgctcacatctgtgcactagtggaggttgaaaaaagactagtgttagcagtgaggaatgggtatcctgagtcaggcagatctgctcttatgagctgcatgaccttgggtgagtcactgtctgtctgcggcttacctattaaatgcagaaggtaaacatacccacctcgaggggttgtgaggattaaagaagaaaacatatccatgtactcagcacagtgtctggcccatggcaactgctcaacagatttagccattatatagtggtggtgctgttgttgttgtggggaggctggaaggagcagccagggaggcttcagaactgagggagcattcaagtagggttttgcaggttgaataggagtccataagtagccctggcatttgaaacagagaaaaacagcccgggccgggcaccaggtagggacacaggagaaacctgaatttgagagatttagtccctgtcctctaagagacaggatatagaccccaaatggccgtgacagcacatgcagggccaagagcactgtgtaatgagtgagtggaaactgggagctgtggatccccggcaggctccctccctcactcactcaacaacaggaagagagatgtgaatagacagtcacttgccaatggatgagggcccccgaagagcaccactcgggggctgggggacaaggggttggacccaaagggctgagtgacattacctgtgtgtaaagaatctatttggagagtgatccatggggaagcttttactctaccttctgttgttttttgttttgttttgttttgttttgttttttggtttttgtttttttgagaccggctctctctctgtcatccaggctggagtgcagtggtgagatcttggctcactgcagcctctgtcccctgggctcaagcaatcctcccacctcagcctcctaagccaccacacccagccccaccttctatttttaagatcataaataacaatacttgttctttagagatattttttgcttatacaaatataaagaagcaaacgacagtcagctgtgatcctgcctgagacacccatctctgtgtagcctgttgacttccagtgacctggtggcttatgcctgtaatcccagcactttgggaggctgaggtgggagaatcacttgagccccaggagcttgagaccagcctgggaaacatggcaaaaccccatctctacaaaaaatataaaaattagccaggagtagtggcttgcacctctggtcccagctacttgggaggctgaggtgggaggatcacctgagcccaggaaatggaggctgcagtgagtcatgattgcgccactgcactccggcctgggcaacagagtgagactctgtctcaaaaaaaaaaaaaaaaaaagtttagagttgagattatcttattcaaatagtgctgcaccccttttgtctgaacattagactcctgagcatttttccatgtcgtgtcacttatcattttaaagcctgcagaagagggtgtatcagaggcagtgaagagggtgtatcagaggcagtgaagagggtgtatcagaggcagtgctatgattttctcagcttttcctccccacgggaaataccaacagggagtgggtactgagcagttagttagtgggtgccagcttctgccagcttaatccccacaggaccccttgaagagaggagatgtgctttctcttacaggacagtgagtggtggtgcaatccccacagcctgtggagctggacatgaccttggttcaaatcccagctccattattcagttgctgtgtgacctcagacgagttgcttagcctctctgaactgcagtttccttatctttaaaattatgatatggctaccttgtcaattccccgatgcaaatgaggttttcttgtttattctttatcccacttactgtcatttgtgactgactgttttctggttccttctctgtcttcccccactggaatgtgggttccttgaagtaggattacatctgcttcattctctgttggatcaccaccccagcccatagccggctgtccgtgtggtgctggatggacggggctgttgtggacattggaggagacgaagcaggagaaggctggctgggtggggatgaacgcggggcgtggggttgcatgtgaggagagtggaaccctcaaagctcagacgaccccaccgtgcctgggggcttaggggtgcctctgcaaagggccaaggctctgggttcaaatcctgtttcacagtgggtggcgtggggtgagttacttaactcctttgagctacggttttctccactgtgaccacggataatgacagccttcagcgcagagggctgctgaggaatctgtctggctatagccgccttgagagcagctctgggcaagggcaggacagcccggggccccggagaccagaggtctttctccccttcctgcctccccctaccagtcactgggagagagaaggggacagaagctcaccatttgccccagatgggagggaagaggaggagaggccttggaggtgttgagccaccccagcccttattctataaaccctgcttaagagtaaattccaggcctctggccttcccagctgctgcctgtcccgagttcactaagaggcagccgcactggttccaagggctcagaaatcagtcccctctgcaggcccccaacccacataccctcagacgcccgcctccgcccgcccagtcctcatgctcatgatggccttgggtgggacccttgtcctgtcagctgtgcaggtcacctccagggaattctggcaggagccacctgggcgggcctgcagagcggtatctgccagttacctggtcagtgacgcagattccccagaagggtcagggtaggaggctggagggggaagaggagccaggaagggacagtggctggggcagctccacagggcagcacctaccagggaaagggacccattccctccactcagctcactcaggcgccagcccagcacttcagagacgctaccggttcctaagatggaaggtgcccagccccgcttccctgcgactcccagcatccaccaaggacctgaggaaacacaacagcacacatggctacacactcactcacacacacagtcacacacagacacacactcacacagagacacagacacacactcacacagagacacagacacacagagacacatagagacacacagacacatacactcacatagagagacacacacagacacagagagacacacactcagagacacagagacacacactcacatagacacacacacacagagatacacagacacacacacacacagaaacatacactcagacacccacagacacacagagacacactgagacacacacacactctctctcacacagagacacccagacacatacattcacacagagagacacccacagacacacacacacatactcacagagacacacactcagacacacagagacacacacacacacagagatgcacacagacacacacccacagacacatacactcatacagaggacacccacagacacacggagagacagacacactgacacactcacagatacactcatagagacccacacagacacacacacacacacacttacagagacatactacagaaacccagttacaaaaacacacagagcctggcacagggatgctcagcagggcatgcgcacagcagccagagcctcacctccgtctgagaccgaagccttgccctgtgaaagctgctcctcacccaaggcccggccaggaaggtgctgatgctctggggcgcccaggtagacttgagtggaaggttctggggccctaaatggcttagccaaggggatgggtggtctctcctcttacagaagttaaaacacctcccttccccgtccacctgtgtacctgaactgtcattcattcattcattcattcaacaaacagaatgtgctatgctgggcactgggatgtgaacgggatagaattggggcctggggggtgggggggtgaggaggcagaaaggcaaacctatcatggtgccagggagaggtgaggccggttccccagcccgcctggggcaccctcaacagacccttgaaaggaaacagccaagtgttagggccctgcctggggggcttcctggcccacggaagacagtgggagacagccttcattccttctccctcagccctgctccacttcctctccagggtggtcttccagctaggtcaacagtgctggggtgaccacttgtctccacggacatctgaaccctataccttcctgcaagcccccagctttaagctttcctctctgtcaatttgcccagcaattcttagggcccccagaggcacctctccctacctcagccagaccccaggggactgtgcaagccccatggtcctgttacacataggagccagaggtaggatggggttaggcagggaccagaacagaagaatggaaaccaatgattacctaccccttgggctgacatactcagaaaccagatggatggatgggtgcagtggggctgatgggtgggtgggtgggtgggtggatgaatggatagatgaatggaattgggcaggtgagtaaatggatggatggatgcatgaatgcatggatggatgaagtggagtaggtgagtggatggttggatagatggagtagggtagatgagggatgggtggggggatggatggatgcatggatggatggacagatggagtggagtgggtgagtgcatggatggatgcatgaatggatggagtagggtaggtgagtggatggatgggtggatggatggatggataagtaggtgagtgccatggatggatgcatgccatggggtggggtcgggtcaggaatgcatgggtgggtggatggatggatggatggatggatgcatgaatggagtagggtaggtgagtggatagactaatggaatcgggtaagtcaggggatgggtagatgcagttggtaggtcagtgggtacagtggggtaggtgagggatggatagatggatggatgggtgcagaagcaggtgagtggatgcacggatggagtggggtgggtgagtggatggatggagtagggtaggtgtgtggatgaatgcatggatggatggatggagtgggataggtgagtgcacagattaatggaatggggtaggtgagtgcatgagtggatggagttgggtaggtgagtgggtacagtgggtacagtggggtaggtgaggcatggatacatggatggatgggtggagaagtaggtgagtggatggatggatggagtggggtgggtaagtggatggatggatgcatggatggatggagtagggtagatgagggagggatggatggatgcatggatggatggatggatggatggatggagttgggtagacgagggagggatggatggatgaagtgtggtggatagatggatggactggtgaacgggagagtggacggatggacagatagatggatgggtggctgtatacacaggatgataagggaggaataaaggaacctggatgacaatggctgcaaggcaaggcggggggtggtccagaggagtggaggaggcctacaccaaattgcctgcctggaacaaatgtttgtcttttttcttttccatgaactgaacctcccagcttctcctggaggaacacattctgtttttagttcaacagacaagaaagtgtcccttggagcctgtttaattgcagtccatctgcctttgaaggacttgtaccgtcattgagaggaactgacgggacccacttgttaagcccttcctgtatttcaagaccttaattaaaataaagtggctagactaagtggggttttcaaactgggctttagagaacacttatttttttgtaaaatattttgaaagcttttaaaactctaatttaaaaaatcgattccattggagaataccggaatttctgagagccgccagctaggcctgttttgtgccctctctgcttaagtgacagtcttgagatttcaaggtgagcagcggataaacggttaccattagcaactccttatcaatgtgacttttctctataccgtgtaacaaagcaaaatagagaaatcagttggatctgggtctgatgtcatyggagccgccatctgtaacccccagtttaaaatgtttaccttcccaaagcagccattttgttctcattagcaacctttagagtaagaaaatattatggagtcaggtgttttattccttttctaggtttcacgcgttggggtttccacgttggatattttttaagggggaatttcactgatagtcttaaataaaagagaaaagaaacaaaaatagaagcccaccggacgaattcccaaaaccctttcggctcttcctgtctctgcttctgacctctgggcggtgttcagccccctgcctttctccctctgtgctggtgaagctggttcttagttagggctcttggtccccctgtcatccgactccaggccctyttaccaacagaggcctcactgaccccagtgacacatcgtggggaggtgcgtcgtcctccgttaggtcaaggttaagaattagccaggcttctcttctgagccttttatgggctggccattcataaatttgcccaaaccctcagtggtcctgccaaggtcaccttctggcgtaatgagtccatgtttgttacctgccgggtgaggccatgcttccttctcagtggcagcctcgtcactgcccttccagaatatccttaggggagtgactgmagctagatgggaggctcggcttagctcctgtgaaccttgaggctggaatggtcccatctatgctaccagctggtcttaataatcctggctctagacctaatcggtgaagccagctgattcctaatggagagcattctggagcattgtgcataaagagctctgctgttgcctctacatttacaggaaatgaactgcactggcaggaggcagcctgctaaaagtaatatacaagaaaaacttgtaaatacacatcaattgattgatcataagtgggctcagaaactactggttcacttaaaagtagatcatatccctttaaaaagttatattgttggctgggggcagtggctcatacctgtaatcccagcacttgagaggcygaggtgggaggattgcttgaacccaggagttcaagaccagcctgggcaacataagaatacccctactctrsaaaatttttttwaaaaaaattagctaggtatggtagcatgcacctgtggtcccagccactccggaggctgggatgggaggatctcttgagcccaggagtttgaggctgcagtgagctatgatygcactgctgcgttctagcctgggcaacagaagaagatcctgcctcaaaaaaaacaaaagttatattattaatctatgttgtattctttatctttgggtggaaccagggaggccagtcatttcaagacaaatgactttaaatcctgaatttctggtggcaattgttgcatcactgtggcttaatgaccatttgttctgcgttgttattatcttcttccagattgttctctggggccggactgagaaatgcctgaaggagacgacrgaggagatccggcagatgggcactgagtgcmattacttcatctgtgatgtgggcaaccgggaggaggtgtaccagacggccaaggccgtccgggagaaggtctgtagcctgggagggtctattcctagcacagctgaccacaggctaattccgggcaaagagaacattctcatgtggcctggaagagasctctgcttatggcagaatggctttgcccggggcacctttggggactctcccatgaagctggccccagttacataggcagggattagggttgattacgtaacaggcgtaatcatctgttgttcccttggaaatgtagaccgtgtgggtttctctccaggactgtggcggggcaaatgtcccattggcctctgggaaaatccttctgactccagtcatctgtttgggctaaatatatcagtgacctccaagagagggaaacccaccctgactgtctggcacgtggtaatgttaactgtttttatgtcgcagtaaactcatttattataaatatgcygtgtgccaggtacggtgtgtgccataaattatttctcctcctcagaacagtcctggtgcggcattagccccatctcacaaatcaagactggcgctcagagacgcagttctcttccccaggccctgtggctgctggtggtacggccaggtggctgctgggcctctatgtatgcaggataactggaactaggctggcagaaagtggcctgcgggaaggaatatctaagaaaaacttgtaaataacacatcaattgattgatcataaatggactcagaaattactcgttcacttaggagtaagccatatcccttttaaaaagtatattggaccgggtgcggtggctcacacctgtaatcccagcattttgggagaccgaggcaggcgggtcacttgaggtcagaacaagattagcctggccaacatggtgaaaccccatctctactaaaaatataaaaattagccaggcatggtggcaggagcctgtaatcccagctacttgggaggctgaggcatgagaatcgcttgaacccrggaggcggaggtggcagtgagccgagatggtgccactgcactccagcctggacaacagagtgagactccatctcaaaaacaaacaaacaaaaaacatatatcgttggccctgggctggctgccctcatggccccgtggctccctctcgcctgcaggtgggtgacatcaccatcctggtgaacaatgccgccgtggtccatgggaagrgcctaatggacagtgatgatgatgccctcctcaagtcccaacacatcaacaccctgggccagttctgggtaagggctayscggggccagagccagccccrggcrtgcagggagcccaggcaggatggaggggaggggatgatttgccagggcttgggctcagrccagcagggatgtccacgaacaaggtggccagacaagacgaatgaccagctctaggayacatcagactttgtgaaatrtgctcggtgtcctggggcagggagccctcggccctctccctcgcaggaaggctcgggccctagagcatcatgtgtgtccggggtgggctgttctccccgaaagaaaggtggaggggttgtcagagctgcrgctgmtccaccctgacaccccatctgccctcagaccaccaaggccttcctgccrcgtatgctggagctgcagaatggccacatcgtgtgcctcaactccgtgctggcactgtctgccatccccggtgccatcgactactgcacatccaaagcgtcagcyttcgccttcatggagagcctgaccctggggctgctggactgtccgggagtcagcgccaccacagtgctgcccttccacaccagcaccgagatgttccagggcatgagagtcaggtcagtgagcaggggacccaccttgagaccagccttctcacctgcctccccaagccattcagtcagccaactgcagaaagagctctgatataaaaatcgggctaggcacggtgcctcatacctataatcctagcattttgggaagccaaggcaggtggatcgcttgagcccagcaatccagtttgagaccagcctgggcagcatggagaaaccctgtgtctaaaaaaaataaaaaattagctgggcatggtgatgcacacctgtattcccagctatctgggaggctgaggtgggaggatcaattgcttgagcccaggaagttgaggctgcaagtgagctgtgattgtgcgactgcactccagcctgggagagagagtgagaccctgtctcaaaacaaaaagtcaccaaggagcctctaccctctgtttgacgctgtcttacctggttctcggtctgcaaggcagtgatgccacgatggggagggtcctgctgcttggttcagggagcttataggaaactaccagagctacaggcatgcagcgggatgtgtctaaaggtcaaatgagggagatgcacctccacagcgtcgtgcagggcgaagggagcttgagacatagggtgcattctgcctggttccacctgtatgaagttccaaaacaggcaaaactgggttagggtgatggaaatcagacccgtggcttcccctggagggctgggggtgtaacctgggagggaggcgagggaactagcaagaccttcagaaatgttctctcttcttgaacttagcagtcattaaatacgtgaaagttaatcaaactgtctgcttaagatgtataccttttgttatatgcaaattatagctcaatttatttgtttgtttatttagttatttattgagatggagtttcgctccgttgcccaggctggagtgcagtggcgcgatctcggctcactgcaacctccacctcctgggttcaagtgattctcctgcctcagcctcccgagtagctgggattacaggcgtgcgcttgcacccagctaatttttgtatttttaatacagacggggtttcactatgtcggccaggctgatctcaaactcccaacctcaggtgatccacccacctcagcctcccaaagtgcagggatgacaggygtgagccaccacgcctggccgtagctcaatttaaaatgagtaatagggaggtcccaccactcctcctccaaaccagttaagtcaaggggaacggggaccactggtctagagctcatgccacctggggtggtgactccctcatagctgtgatgtactctgtgacattgggtcccgttaattactgctgtggctgatctgcaagatggggtgcgcgaatgtctccatcataggttctgcagtgaggacaaagtggaatctggcagggaacaccgtgtgtggtacatattaagtgcccaataaatggcgctttaatgatgtgcagttatgtaggggcatgacgtcatcgatgaatgaaaaccgggaattactcaaatactattctccctggttttttgcaatccagcgtacagtgcttcaccttctgattatayattgcagctgcttccaaaaatgaggatgacacggaagggtcatgaggagaattcagtgagacaatttagtgtagtgcatgccacgtgggagtcactcattacgccttagttactattaatcgggacagtgcggtgttgattgttgagaatcaaaaataccgggcttggtggctcatgactgcaatcccagcactttgggaggctgaggcaggaggatggcttgagcccaggaaattagaaataatacatgtaacacatctagtgcaaagcccggatactagatgctcaataaggagctgctgcttttattatttttcctaacaataaacatcttcataaatgcatgttattaattttcctagcagaccacctggtttgcatgcaaattgtcatcaattctgaatttcgaggagtctagactaatggctactaatgtttcctgttggctttttcccccatgggttttggtttggtttcttttcatctgagtatacagaaggtgctcaataaatgcatactggacagaagtgcatcagtggcagtctgcagttttgttttgtttttttttttaagacggaatcttgctctgtcgcccaggctggagtgcagtggtgccatctcggctcactgcaagctccgtctcccgggttcatgccattctcctgcctcagcctcccaagtagctgggactacaggtgcccaccaccacgcccagctaattttttgtatttttggtagagacagggtttcaccgtgttagccaggatggtctcaatctcctgacctcgtgatccgtccrcctcggcctcccaaagtgctgggattacaggcgtgagccaccacgcccagccggcagtctgcagttctaattgggtgtcctgagcacagaagcaagcaggacattgcagacatcgagtttgtgtgtctatttcaccttctagcatagcttctttcctaccactttaagaaggaaattcaaggttttcctgccacattttttcagagcgtgaacccaaactgcctggggtcaaatcccagctctgtgtgaccttggccaagttacttgacttttctctgcttcagtttcctcacctctaaaaagagattcataataatagtatccccagctgggcacggtggctcacgcctgtaatcccagcactttgggaggccaaggcgggcaggtcacctgaggtcaggagttcaagaccagcctggccaacacggtgaaaccctgtctctactaaaaatacaaaaattagccaggcatggtggtgggtgcctgtaatcccagctactcaggaggctgaggcaggaggatcgcttgaacctgggaggtggaggttgcagtgagctgagattgcacaattgcactccagcctgggcaacacagcaagaccccacctcaaaaatgaataataataataataataatagtatccccttttcatgggttagatgagctcctgtgtgtgagtcatctggccacgcctggcaagtagcaagcactaggtgaacattagctacctatggttgtgcaggggagccccaagggctcggccagaagagtagtacaaggaagatgggtacctaaccaactcccatttcctaaaagaataaaaaatggataaaagcatgggtttcctcctacaaccatgcttagcagcctcccagggttaaatgggttaaatgtgaagacatgtttaggacaaaatgagtgagtttcccagcaagactggccatgtnnnnnnnnnnnnnnnnnnnnacccaaatctctatggctcgggaagagaataaaagaagctctgcagaaggcactgctgggagtggcaggatcttcactgccctgccctgctgggagctgctctagcacgtgggtccccttgggaggcagcaggcctcagagggagggctctcaaagaggcttcatagccgggtgcggtggctcacacctgtaatcccatcactttgggaggccgaggtgggcggatcacaaggtcaggagatctagaccatcctggctaacacggtgaaaccctgtctctactgaaaatacaaaaaattagccaggcgtggtggcaggcgcctgtagtcccagctactcgggaggctgaggcaggagaatcgtgtgaacccgggaggcggagcttgcagtgagccgagatcatgccactgcactccggcctgggtgacagagcaagactccatctcaaaaatgaataataataataataataatagtatccccttttcatgggttagatgagctcctgtgtgtgagtcatctggccacgcctggcaagtagcaagcactaggtgaacattagctacctatggttgtgcaggggagccccaagggctcggccagaagagtagtacaaggaagatgggtacctaaccaactcccatttcctaaaagaataaaaaatggataaaagcatgggtttcctcctacaaccatgcttagcagcctcccagggttaaatgggttaaatgtgaagacatgtttaggacaaaatgagtgagtttcccagcaagactggccatgtcagtggatgttattgtttataaattgctatttattgagcctctttttttttttttcttttgatacaaagtcttgctctgtcgcccaggctagagtgcagtcatgtgatcttggctcactgcaacctccgcctcccaggttcaagcaattctcctgtctcagcctcccgagtagctgggattacaggcacctgactccatgcccggctaatttttgtatttttggtagagacagtgtttcgccgtgttgcccaggctggtcttgaactcctggcctcaagtgatccacctgcctcagcctcccaaagtgctggggttacaggcatgagccaccacgcccagccaattgagcctcttcgatgttccagccatagaaccacctagaaccactagacactttacaagtgctgctgcatttggccctcacagcaaccctggaagagagcttttattcccattttacagatgagggaactgaggctcagagaagcaaagttacctgcccaagtccacatagcttgaaactggctagctaagcatgcttcttccacgaatttgcactgcttccatgggagttaatagctgtgccagttccccgtgtccccatcccacacaccgtggagaggaaggagaaaatcctgcgcacagacgtgcttgaggcctcctctgtcggcttccctggcaggggtcttaccaagaaggattcccgtcaagcccatggactttggtctgtccatcctgccttccctttcccaagagacaggccaggccacaggtggaagccagagaatccagaccgcccacgacacctgtaggactccagtatcagtgagctgcctcaacacgttcatctctgtagaatggcagaggctggcccctcttgaccacagggctgtgggcctcagaatcaccatcatggccaggcgtggtagctgggttcacaccagtaatcccagtgctttgggaggctgaggcaggggaatcacttcagcccaggagttgccagcctgggcaacatggcaaaaccccatctctacaaaaaatataaaaattatctgggcatggtgtgtgcacctgtagtcccagctactcgggtggctgaggcaggaggattacttgagcccagggaggtcgaggctgcagtgagctgtgatcacgtcactgcactccagcctgggtaacaaagtgagaccctggactcaaaaataaaaaataaaaaaagaatcatcattgtgatgacaaaggaattacagggcagggggtaagattcatgtaccctctgaggccaaacccctgctgggagtccaagggctgcctgttgctgaggaatgacatcaaacctgggtgattcatcacccttaatcttcctggtgccagagcggmtcacaagctctttgtgggattggggtcagagccagcaacatgagccctgcacctatagatccaggaagggcaggaagagcagtgagcaaaggtgatagagcattggccaggtttgaatccttagcgccctactgactcaatacagcctcggtttccttatctgtaaatcaggagaataatttgtacatgagtctggcacgtagggaacatcatcattgtttggatctagggtcagatgcttttaaatagtcatgagaagcccctgatgtttgcttatgcaatcattcattcattcattttgagatcccatggaaagcactgtgcaaatctttgaatcaatgaatcagtgagtgagttagtgaaccagcaagctgagccccagccatcgctagccaagcccctgcctccagacagaatgagcaggacacatttgggaagcagcaagtcatcagtgtgttcagtccttcaagtatttattgagcacatactatgtatcagatgctgtgctagatgcaggggagcaggaccgaccaggcctccaccctcatggaactcattgcctgatggcggagacaggccactgacaaggaaacaacccaaaaagcaaggtcttcctaggtggggtgaacgcggtcaaggaaattagcaggggacaggatcagaggtcgctttggatggactggcctgaaatgtctcccaaaggaggagctgggaggagagagccaggctgttgagagagctggcaaaaagccctgacccgagcatgtgatgtgacaagaacagaaatgggcctgtcctgaaggagcagagtgtagggaaaaggactcagaaggacaaccagggcccagattacgcagggccatggaaaggccaagccctagggcactgggagcccttggagggcttgggagagtgggtccccagtgggtgggctagaagtccttgactcaagaagagacccctgtgtgcctggaggagtgagggaatgtggcacctggatgggtgtggggtagagggagtattccaagcaggcctcgaatcyctcagacaggaaaagccaaagggtgacccagacatgtcagcctcataaagacttccagataagcacatgcctctccaggagaaacccactgtgtctcttcctgtgttcaggtttcccaacctctttcccccactgaagccggagacggtggcccggaggacagtggaagctgtgcagctcaaccaggccctcctcctcctcccatggacaatgcatgccctcgttatcttgaaaaggtatggggctgggaaagaacactctgggtcaggggaaagtacgcatgtgatctattagtcatgtctgctgcgggcatgagcatgaggagtgctggcacatttgctgctgatgtactgtacttactgtggggcagcagttctcaaacttgttagtcacggggccccttagagttttaaaaagtatggaggaacccaaagagcttttgttaatgtgagttgtagctatcgctatttactatattagaaattaaaagccagggccaggcgcagtggctcacgcctgtaatcctagcactttgggaggccgaggcaggtggatcacgaggtcaagagattgagaccatcctggctaaaatggcgaaaccttgtctctactaaaaatacaaaaagaaagtagctgggcatggtggtgggcgcctgtagtcttagctactcgggaggctgaggcaggagaatggtgtgaacccaggaggtggagcttgcagtgagccgagatcgtgccactgcactccagcctgggtgactcagcaagactccatctcaaaaaagaaattaaaagccagaaaaatgttgtaagttgtatacatttgtttataatatttattcatttataaatagctataacaaacccattacattaatataaatatatttttatgacaactagttatgtattctaaaacaaaataaatgtagtcaggagtggcattgttctacctttttgcaaatctctttgtttggcttaattgaagacaattggattcttatatgtgcatctgatttcaatttgttgtgatatctcgtgtcacgtagcctctggaaaattctaccattcactgagagaatgaaagtgaaaagacaaataacatcttagtattattacagaaacaatgtggccrggcacggtggctcacgcctgtaatcccagcactttgggaggccgaggtgggtggatcacctgaggttgggagttcgagaccagcctgaccaacayggagaaaccctgtctgtactaaaaatacaaaaaaaattagctgggtgtggtggcgtgtgcctgtaatcccagctacctgggaggctgaggcaggaaaattgccggaacccaggaggcagaggttgaggtgagccgagatcgcaccaccgcactccagcctgggcaacaagaacaagactccgtctcaaaaaaaaaaaaaaaaaaaaattgacctcacagacccctgaagagatcccgggtaccccaaaggttcctggacctcactttgagaaccactgttctacagcctattggacatagcccctgccctcaggaagtttactattagagggaacatggggatcttgatgccaagggctcagaattcacagaagcgtcttagtaccagtcgggtgggatgtagcagggcagaccactttggggaggcaggctttataaatgagagactcctcctccagaatttgcctggcatcctattcccctagaactttccaggctttgtgcagcaaatccttcccatcccagtcccacactcagttttcttgggcctcttagtacagcaggagatccttgtccctggtgccacaagtgaccatgggctcttggctcccctggggctctggccccctcctgactgagcccctctgacctggaagtccttttcaggaaggtaagcccccaagtgccaggctggcccctgctctcatgcaacatgcactcccaggaaagccaacttctgccctggctgctgggacatggtgagccccagctgaggggctgccccaacacatgcagggcacagaaacctcgaaactgaggcgcaagcccgatcagccctctcttccccaaactcaaagccctttcagaggcacagggaagggggcacccaggggcatccaggccacacctcggcctccctcagtccatcctgacctcgggtctgagatgctcctcagccgtctctaggagcccctarttgatcaggggctcaggtcctcactgaggtcaggctgccaccctccacctcaggggagcttcttagaagacttccagagctttctrgagaaaagttggtctagaacacctcagcgctctccacagtaagccctcagccttcattttccaacmttccccacaactacttttgaacaggaagcaggagccaccccgctccccattctctgaactgcatccctcctcaccttccccaggagaaagcaaggctcaactctaataccaccacccccaggaagccttccagattgctccagctggaagtgaacccttttcatcttgtacttagagtgggccaggacccttcagtttgagtcaccaaacagcctgagggccctctctgtgccgggcccatgtgagggcctggggatcagagatgaaatacccgccatgaaggcccccacaggcttgacaagtaaacgggtggggactacaccagggcttgctggggaagcgtcggaactccggttgtacgaggagaagcctgaaggtgagcccaggacgcttccccagaggatgtgacacccaaatcgaacctgattcctcagatccacaccgtcatctttgtggaatcaggggcagttgggatcgatggatctctgagctgcctgtgggcaccaagatgctaagagcctggttttgaaagtgtgttgtatgaagggagagaaggtcagcactcccctcgacaaggagcacagacagattaagccattgtcacctacttagtggcacctaaccatcatttgtttttaatgggtacaaaaaatagaccgaataagaacaagtctttgatagcacagcagggtgactatagttaataataatttaattgtacgattaaaaataactaaaagggccgggcgcagtggctcacgcctataatcccagcactttggaaggccgaggcaggcagatcacctgaggtcaggagttcaagaccagcctggccaacatggcgaaaccctgtctctactaaaaatacagaaattaggcgggcatggtggcgcatgcctgtaattccagcttctcaggaggctcaggcaggaaaatcacttgaacccaggaagcagaggttgcagtgaccccagatcgcaccactgcactccagcctgggcaacagagtgagactctgtctcaaaaaaatataataaacataaaaataaataaaaaaactaaaagagtatagttggattgtttgtaacacaacagataaatgcttgaggtgatggataccccatttatgctgatgtgattattatacatttgcatgcctgtatcaaagtatttcatgtaccccataaatatatatacctactatgtacccacaaaaattaaaaataaaaaaatgagctctgtttcaggatctaggaaaaagataaaaattttaaattaaaaaaaaagtttgctctgaccactcactcactctctgcctttttaaaatatatattttaaaaagagtgtgtgtgtgtgtgtgtgtgtgtgtgtgtgagagagagagagagggacagagttttactcttgtcgcccaggctggagtgcaacggcgcgatctcggcccaccgaaacctccgcctcccaggtcaagcaattctcctgcctcagtctcccgagtagctgggattacaggtgcccaccaccacgcccagctaatttttgtatttttagtaaagacagggttttgccatgttggctaggctgttctcgaactcctgaggtgatccacccaccttggcctcccaaagtgctgggattacaggcatgagccaccacgcccagtctgaaaagaatttttgagacagggtctggctctgccacccaggctggaatgcagcggtacaatctcagctcacttcaacctccacctcttgggttcaagccatcctcccacctcagcctccccagtagctaggactataggcacatgccaccatgcccagctaatttttgtatatttttgtagagacagggtttcaccatrttgcccaggctggtcttgaattcctgggctcaagcgatccgcccatctcggcctcccaaagtacttggattatagacatgagccaccgcgcccagcctccccctgcccttttaacagctgcttatccacttayttgaaagctcttcccctggggagggtgggggtttggggagaaactggtgtgtggcttggaggtgtggggagcactttcaggaaccagccctctgctgccccgtctcacatggccaccagcgacccagcccctggatcctgccccactaaccatcgctatcttcttktcttcctcctaytccagcatacttccacaggctgcactcgaggagatccacaaattctcaggaacctacacctgcatgaacactttcaaagggcggacatagagacaggatgaagacatgcttgaggagccacggagtttgggggccacagcacctgggcacacacccgagcacctgtccattggcatgcttctgctgggtgagcaggacagctcctgtccccagcgaagaatccggctgcccctgggccagtcccaggacctttgcacaggactgatgggtrtaactgacccccacagggaggcaggaaaacagccagaagccaccttgacacttttgaacatttccagttctgtagagtttattgtcaattgcttytcaagtctaaccagcctcagcagtgtgcatagaccatttccaggagggtctgtccccagatgctytgcctcccgttccaaaacccactcatcctcagcttgcacaaactggttgaacggcaggaatgaaaaataaagagagatggcttttgtgatttcctttgttcaaatcttccgtgggcagttgggagggagccagtcccaaccataaaactccatcctttgagagagaactggtcagttcaaggtccccaactgccaagggtggagagaagggggccgaaatcaggagagaaagtggagcccaggcctaggggcagagaggggtgctgggttcctcgccagctccaccaggcccctcccagcagccatgggttgaagccgctttgtctccttggtgtgacctttatgaaacagtctgcaaacagctggccacagctagagatgccctctgtcctgccatggcaccaccagcctccaggccaccaactcaggagagcaaaaccagtgtttatggagcacccactgtctacctagggtgtgtgtggtgcagagaggggaacgttgctgagaagaaccactagtacaagaagccaataatctgggtaggaaaggatcacaagtcaccggaaacacagtgacaactcctcaccataaggccagtgccgaggggtgctacagaccgagtcccatttgatcacaggggcagggggaggtctggagtggcagaagagatcggccctggttccatcaatggggcaaagtcacggccaaaatgacctagtagagatgccccctgcttcctccagggtgcacgctccctgctgccacaagcttaataaacctcaccttgggcagtggggaagaaagtgggccatgtcatttcatagcaagtaaactccattccacacagctcttgcagatgagtgccagggtggcaggaggggagcaggcaaggtccccgggaggtgaaggaggtcacagccctctgacccaacccagaagcttccccaagagttacataaagtcttaacctacatgcaaacctcaggctgaaacctcccagcttagagaatattagacatagctcaggtgatcatcagtctggtctatgtgcagaaatgccaagtcacgattatagccatgctttttttcttcttctcttttttttttttttaaacatgggaacttgctctgtcacccaggctggagtgtggagtggaatggcacaatcacggctcactgcagcctcaacctcctgggctcaaacaatcctccacctcagcctccggagttgctgggactacaggtgcatgccaccacgcccaactgttttctttttatttttcgtaaagacagaggtcttgctatgttgtccaggctggtcttgaacccctaggctcaagcaatcctcctccctcagcctcccaaagtgctgggattactggaatgagctaccacgcccggcctgtagccactcttgaatgagtacctagaatggaggtcagtccccaggcataacattttaactcttcattatccatgccacttggcagcagctgaagaccaaaaaaacacaactccgagaccgctctggagacttccaacagccttgatgtggcgcagccagaatgtgacrcccaaatctcagtggcttccaacaatgaaggtttctgccttattactgctactagtccttcaagaatggctacaggtgtgctccgtgtcatcttcgctctgaaactcaggctgaccagggggcctcagggaggatgtcttatggcacagggtagacatacctggtgaactgtgcactggctcttgaagtttccacctggaaacaacactgtcacttctgctcacatttcattagctggaacaggkcacgtggtggagccgctattaacatagcaggaaatacaatcccgcgtggaggagtagtcgttagttctgaaccaggctctgccatgccagggaagaagacatcatgagcaaaaattaaaatataggttgaggacagagggaagcagctgtatggcttccaactgcaagcccaaggacacagtgacttttgggagggcacaggaggtgctaagcagagccctaaagaggcaactgtcagtgttcatctcacgctaaacttatttaggtcctcactctgttgcccaggctggagtgcagtggcccgatcatggccactgcagcctccacctcccaggctcaagcaatcctcccacctcagcctctcgagtagctgagattacaggcatgtgccaccacgcctggctcacttcatcatttttttgtaaagatagggtctcgctatgttgcccaggctagtctggaattcctggcttaagcaacccttctgccttgacttcccaaaggagtgcaacaaggatccctaaagtctgattggactctgggagttgcaagccccgccagccctccccagttgcattgagaaccaatcgctgtgttagcagagtgggaccctggcgtcccagagccccaggggctcagaagggcagggcctggtcccaccccaccccctccctctcagccaggagctttcagtctttttctggatcttttcccagaggaaccaaaagaaaaagcactgggcagaatcccaggaggccccattctggtccctctcccagatggtttagcactcagagagccttgagagtgagcgtggagagctaattctgtccttagcttggccatgcaaagaagagtgacaagtgccaaacccccaaggggcaggatggggcaggccaaccctgggaagaggacttgggtcctgggaaataacctcattgccatgcttagggttcctccccatccccaaggaaaaccagattggaggtagggatccagcccagggaggcagcagacccaagccccatgctggcaccattccaggggcttggactatccggcctggtgaatggtcaggaattgagtctgtggccactgccctgctcccaggggacagaatgctttgacaaatggactttcttcttcttgagccaaactgatgtccgggagggaccagggtgacagaaagctcctgggctgatcacacggacagctctgcctgatgaggcagacagcccttgcccctggggatgtcccagttcagtggggatcaaaaaaggagccaggtcacaaatacacgaaccccactgccccagtcctaatcagcacagagggaagaagatggttgtggtttgtggacaagagggtcatctacggtgagaagcaacccccacccaccacagcacatctgggacttctgaccctgaggggtcttctctgatattcaggagaggccttccaggggaagcaggtctgtgataagaacccagaggtctatgcctgtgaagagggcttctatatatgggcacccctcacttgaggaaaagccaggaggtgacaaatgtcccttgtattagttcattctcacactgctataaagaactacccaagactgggtaatttataaagaaaagaggtttaattggctcctggttccacaggctgtacaggaagcatggctggggaggcctcaggaacattaacctcaggaatcatggcagaaggcaaaggggaagcaatcacatcttcacatggccagcaggagagagacagaaggggagaatgccacacacttttaaacaacgagagctcatgagaacttacccactatcacaagaatagggagggagaaatccgccctcatgattcgatcacctcccaccaggtccctcccccaacattggggattacaattcaacatgagatttgaatggagacacagagccaaaacatatgattccatccctggcccctcccaaatcttatgtctttctcacatttcaaaaccaattatgcctttccaacagtctcccaaagtcttaactcattccagcattagctcaaaagtccaaatccaaagtctcatctgagacaaggcaagtcccttctgcctatgagcctgtaaatcaaaacaagttagttacttccatgatacaatggaggtacaggcattgggtaaatgctcccattccaaaggggagaaattggccaaaataaaggggctacagaccccacacaagtccaaaacccagctgggcagtcattaaatcttaaagttccaaaataatctcctttgactccatgtatcacatccaggccacgatgacacaagaagtaggttcccaaggctttgggcagcaccacccctgtggctctgcagagtacaggcccaacagctgctttcacaagctggtgttgagtgcctatggctttccaggcacacagtgaaagctgttggtggatctaccattttggggtcaggaggacagtggccctcttctcacagctccactaggcagtgcactagtggggactctgtgtgggggctacaaccccacatttcccctccgcactactatagtagaagttctccatgagggctccacccctccagaagacttctctctggacatccaggtgttccatacatcctctgaaatctaagtggaggctcccaagcctcaactcttgccctctgcgcacccacaagcccagcaccacgtgaaagctgccaaggcttggggtttgcacccactgaagcaatggcccaagctgtacattggcgccttttagccacagctggagctagagcagctggatgcagggcatcatgtcccaaggcaccagggctctgggcctggcccacaaaaccatttttctctcctaggcctccaggcctatgatgggaggggctgtgcaaaggtctctgacatgtcctggaggcattttccccattatcttgactattaacattcagctcctctttacttaagcaaatttctacagccttgaatctcccctacacacacaccaaaaaatgggttttcttttctaccacatggtcaggctgcaaattttcctaacttttatgttctgcttcccttttaagtacaagtttcaatttcagaccatctctttgtgaacacatatgagcatatgcagttagaagcagctaggtcacctcttgaatgctttgctgcttggaaacttcttctgccagataccctaaatcatctctctcaagctcaaagttccacagattcctagagcagggacacgatgctgccagtctctttgctaaagcacagcaagagtgatctttccaattccagtaagttcctcctctccatctgagaccacctcagcttagactttactgtccatatcactatctgcattttggtcacaaccattcaacaaatctctaggaagttccaaattttcccacatcttcctgttttcttctgggacctccaaactattccaacctctgcttaatactcagttccaaagtcgcttccacattttcaggtatctttataacaatggcccactcgtctggtatcaattttagtgccattctcacactgctataaagaactacctgagactagataatttataaagaaaagagatttaattgactcaccattccacaggctgtacaagaggcatggtgggggaggcctcaggaaatgtacaatcatggtggaagggtgaaggggaagtaagcacatattcacatggcagcaggagagagagcaaagaaggaaggggtacacctttttttttttttagacagagtttcactctgtcacccaggctggagtgcaatggtgcaatctcagctcactgcaacctccgcctcccaggttcaagcaatcctcctgcctcagcctcccgagtagctgggactacaggcatgtcaccactcctggctaatttttgtactttttatagagaggtcgtttcactattttggccaggctggtctcaaactcctgatcttgtgatccgcctaccttggcctcccaaagtgctgggattacaggtgtgaaccaccattcctggccagggctacacacttttaaacaaccagatctcatggaaactcactcattatcatgagaacagcaaaggggaaatctatccccatgattcaaacacctctcaccaggtcccacccccaaacctggggattaaaattcaatatgagatttgggtggggacacagagccaagccatatcatccctcaacccaaaaggaagacttggggacatccctggcatgctgagctccctgagagtggggctgtcacactgtgat

SEQ ID NO: 93707 - DNA, 86440 bp, Homo sapiens
  misc_feature (1)...(86440): n = A,T,C or G
taagctagcaactgcattcctacaaaccataaccacctcagagacaggaccttaagccctggcaacccagaatcctttggctacctaaagaaatcctcaatggaaaccataaaactaggagtccactgtccagctcttaccattcttctttgstatgactgagctgaatttgatacacattgctcatcttaacctttagrttcccctcatcatcttcttccaaaggcaaaaacgttatggttccattgaggacatctggaaagaaaaagagaagaaggacaaattacaactgcctagctaccgtctcatcagaagcagtattaaaaatagggatgagtcaagcacgatgctttcaatcccccagcactctattcacaatggcactccaggagaggaacttttgcctttcattcactgctacagcccacagcctagaatgtgccaggcatacagcagccattctctgcaagtatctgttgagagatgcatgagccaggacctgagggaagagccagccaatgtggactctattggaacttgagagctacaatcagagaaaacaggggacctctgccctaactgagtgtctgccacagcctgaccatgatcttcgagtgtgagcaaggcacagaacactgctcagccatcagaggccagttcaggaaagcggatatcagtccaggccttcctaacaaccgctttatgttgtgtggagcccttgctgcatgtacggacttcacagtcaccttcccattaaaatataagcagagtggcatattcctaagctaaatttacagcattctgtcagtttgtgtggatacttaaggtttggttgtataaagttctatctctaaaatcaatcgtgtttacctttgatattaaaaaaaaattgcaaactctgttaaagaggaatatacacttcacaggccaaatatgcacaactgtggttcaccttccacagcagatgaaagaacaagacctgccaaaaggaagcagaggctgaaggggctaagtggattcagatggaaagcaagcagtgtggggccgagaaaactctaacaatcagagtctactgctatggaatacagggtggccagggaagtcctccctagttaggtgacatttgagcagagagccgaaggaggtcagggagtgtgccatggggcacctggaagaagagtgtttcagacacaggagcagcaattgcaaaggccctagggcaggcgtgtgctcaggtgcatggggaatggaggtgagtggcgtggacaaggtgacaagtggtagaaggtgaaatcaaagggtaacagggcccacccaggtcacatagggccttgcagttcatagaagtacagcttttactgtgagtgagaccagagagaagaggactgacacaatgcatcattctttccatgaattatctcatttaaaaactgcaacaggaccaggcgtgatggcccatgcctgttgtcccagcactttggaaggccaaggtgcgaggctcacttgaaaccaggagttagagaccagactaagaaacatagtaagaccctatttatacaaaaaataaataaagtaaaataaagctcacaactttatcatccagtattattttcaccatcctctggatcagggtttcttagcctcagtgtcactggcatgtgtggctggataactccttattgttgggagttgtcccgtgcactgtagcatgtttataagaagccctggcccctacccactagatgccagcagcatcctctccctccctgcccagtgtggcaaccccaaatctgctgtcactgttgtcgctacacaatgataaatttcgatttttaaaatttttaaatttttcatttttgtgggtacatagcaggtatatatatttacagggtacatgaaatgttttgatccaggcatgcaatgtgaactaatcacatcatggagaatggggcatccatcccctcaaacatttatcctttgtgttacaaacaatccaattacactcttttcgttatttaaaaatgtacaatagtggccgggagaggtggctcacgcccgtaaccccggcactttgggaggccaaggcaggcggatcacgtgaggtcaggagtaggagaccagtctggccaacatggtgaaaccccatctctacgaaaaatacaaaaattagctgggcgtcgtggcacatgcctgtaatcccagctgcttgggaggctaagttaggagaatcgctcgaacccaggaggcggaggttgcagtgagctgaaatcacaccactgcactctagcctgggccacagagcgagactactctcaaaaaaaaaaaaaaagtacaattaagttattattcattataatccccctgttagactatcatatactaggtgttattcatattctattttttttgtacactttaaccatcccacctctcccccaaccctccactccccttcccaccctctggtaaccatccttccactctctatgtccacgagttccattgttttgatttttaaaccccataaataagtgagaacatgtgatgtttgaatgacaaacttctgaggatcaaaactgccccgactgaaacctctgttctagatgagaaaaccaggcgttcaacagattaagtaatctgtctcaaatccacatagcctcaaactgaattctgttctttaactaaagaagtcaagttcttaaccactatgtcatcctgtcacctgctactaacagttaagatttcttagtcacattccttttttttttttttagactgagtccccgtctgctgcccaggctggaatgcagtggcacaatcttggttcactgcaacctccactcaccgggttcacgtcattcttctgcctcagtctcctgagtagctgggattacaggcacctgccactacgcctggctaattttttgtatttttagtagagacggggtttcaccatgttggccaggctggtctcgaacagtcacattactcttaagaccttcgtgatcttacccagaatagggccaagaaatatacaaaagttgcaagagcatctccacttcacacaaacagcagctagcatttattaggcacttaccatgtgccaggaactattctaagcactttacaatgtattaattccatttaactcttccagcaactccaagatattttattattatcctattttacaaatgaagacactgaggcacagagaggctctataacctgcccacagccatacagcttgtaattggcaagaccaaaattcaaagccaggctgtctatattccatggaggatacaagtcctctggtgagccttcctggcgggaactgaatatagaaagcaatcctgaaaacgtactccttgttgagagggaaaactgcctccctgagaggaagaaaggaaaaaattctgtcctacccctctgttcagcgaagtctacacatgaaggcctcacgggcactgcctctccaatcctcagtccagtggatggacaacgtaaaatggttaagattagaacacagttgataagagctggaagaactcctaaactagactggactggcagagaggccccctggaggagaggacacctagagtcttacaaaggcacagaggcagacagtattgggagccatcagaggggactatgtacctcccagcaattgctgcctgaggtaggcagaagagcctcccaaaagtgtccatgccgtaatacccaggactcgtgaatatactgtattatatggcaaaaggggcacttgcaaacatgattatggttacagacctcaagaggaagagtactctggattatccaggtgrgcccggcctaactccatgggccacgaagagcagagaattttctctggctggaggcggaggagagaagcagcaggagaggaaggcagagagattccaagtatgagaagaattcaaccccattgctggctctgagatgtaggaagctgcatgaaagaaccagaaagaagcctccagcaactgacagccagcaagggaacaaggaccccagtcctacataaaaaattggattctaccaacgaactgaatgagcctgagaacagattccttcccagaacctccaaataagagcccagccggcaggctgtttgattttggcctcgtgagagagacccacagcggagaaaccagcagagccaatggggattcctaacctacagaactgagacaatcaattttttgtactgaccaatgaatttgcagtaatttgttacagtggcaatacgaaacacatgctgctgaataaagtttcaggtaagagtggctgaggctgaagtgtcaaggtcacgggcagtaaaaataaatgccagagatttaacgaacgctgaggactagtaggttcccatccatccagtctctatgctctttcacagttatttgtctcagcataaatagctctctttatgttggggaaaaggcttatggcatgcctgtataaactggccataaaaatatgagacaataagttgtggaaagccacaagaggcctctgaggaggaaagccttcttattgtcatgatgttcccatgctctgggcgagacctactgtcttacctataaacactgtgttcaaggagaaagacactcctttgaatcactacaatgtggtcagacatgcaggctcctagttaagcacgytcccactggttattctccgacaagttaaagataacgctgtttgagcacaaaggagattcatttaaaccgccactgctatagatgacatgtatgatgcactgtctccctttcaccctttcgccccgaacgtccgcttcttagatctaagtgattgtactcaatagtgtggagaccagagctcccaggctttggcagcctccattttgcaattggccccctggcccccaatctttatgcactcttaacctgtctcgtctcattccttcgtcgccaccggactttgagtaccctacgggtggtgttgaggctggtccccaacacttttacacctacagctttacctgctaaactcctaggtattacgcaatatccagctagtccttcactgtctctttgaagccttccagacaccaccccaatcaattatcccatcttctgtactaaggacacacatttctatgcgcccactcaaaaaactatgaaacacctaacaacctccctaggacatcgcagaggaactagtacccttaggactttttcattgacccgaggttctatgaatgcttttttatctaatcatatccgtccactatcaaaacactcttaccttgcacgactatttccctcctgggagttgtaagggggcaatgtgggctagttttcgggatgacggttctgagaaccacgtcgagctcacgctgcgcytctggctgcgatcccgccccggagctggtraggaagkccagcaactccgaattgccacgggcgagactttgggagaaatcctcccaaagcgaatccagatctgcggcggggaagtcgccctcccttccttcagcatggccggggtgcccggagtccctcaggggcactgaggcggcttccctctgtgcctcctcttgctggcactggccctgggcctcctcaagttcgcaacatgccgtgccctgctcgggtcctgatagcgacctgggacccgggccccctccgggggaaccctggccgggtcccggaccccgctccttctgctccgagcctgcgctagtcccggggccgcgggcctccgcgcagggcagggcggcgctccagcgggcctccaggcgggcgccgcaaagccgtttgtttgccacctgcggcctctccagccacacttcgaccgcagcccagaagccctgtgggagaagcgcgcctgggtagctgatcccggtacggcccacctcagccatggcagccagcaggtgtacagccctggcagcggcgcgccgagatgacgcagcccggtggcgcggcgcgttgacgtcatggaggcggggtgctgggaccggaaatgagaatggcgccgctggagatcctttcctgcttttggtttccctggcaggggttgaactgtggagtgtgtgggtgaggaatttgacctgtgttttattcccttttgagagaattctgggcgtggtatagttacagaatcaaacatcagccagccagcgggtgtggaacgcattgtcctcagtactgattaccgataaaagtcagggagcctaagtttgtgaacgtaaaagatgagtcctcttatgaaagctaacttttctccacttgggttctggtttgcttttagtgctggcattacagccagtgccttcctaagtctgagtgcagccatggctgtttcataagaatgatgtaacgttgtcccatgagggatgaaagtcatctgtcacctactgtagcaggacaagccacagacaaaactcctcagacaccggattaaagaagraagaggtttattcggccgggagcatcggcagacttgcgtcttaagagctgagctccccaaaaaagaaattcttggcctgtttaaaggcttacgactttaaggggtccacgtgaaagggtcgtgataaattgagcaagcatgggaaacgtgactgggggctacatgaatcagctaacagaacagaaagttttgcaatgcttttttcatacaatgtctggaatttacagataacacaagtagtttaggtcgggggttgatgttattattattattttttttaactcctagggccacgtggtggtgccaaggttgtctggctatttatctgacttttgtttctttctaactttttgctttctctcttttcctcctgtcttatgaactaggcaaggtggcagggaggagggcagcaggagtagtagtggtctccttatcccttcctttgagaattttcacaaattagtgggagttctcgcttttatttttactttgagtctctttgggagacagagtgatagtgttttatgtaatacacttgcagtgagggttttaaattctcttatagctggaaactatcttttaaataaagacctaggatcaaacctgtgttaaaccagtacaggcacatgtgccaactttgtcatgtcctaagcaggttagtttttttactgggtcttaaaagcttttttcctagcaagcaacacagtatttcttaataataggagtttttaagagccaratgcttgaacttggcatctgcttggggaaagagttaaagtaatcttgaggcattaaatcttttgcttctcaaggccattggtctctcatgttagcctttttataaacataacatgaagaaacgtctaggctgctggcaatgttttcagccagctgagcaaataggttgtttgtttgttttgctaaaggaggaggctcttgtaacttctggtttatgtgtttaaagaatgacttaaagactcggaattgttgctgggctggacgggtctgggtttcctgactaagtagtatgtgtacaatggggacaccttatrtaggtgtttcttctagcatggttatggggggtaacaataacaaaacaatatacagcatatttgtatccagcaaggacaaaagaggtccttacctgggaaaaagattgaatacagtgacagaacaataggaaaacagtattacaggaaaactattagtcttaagatttttaactacgtttacttgcttgacaagtcctcaagcttcggccatgcgtagactattcagctgccagtgcgtgactagagccgggcttgttgtttcttcaagcttcagccgtgtgtagactggtcagcctccggagtgaccagagcagggctgtcgtcctcagcaacagcttggtctcgtctccgaatcagccgggtaggaagatctgtgtcctgctggctggtctacttgtcctgagctgccagtgttagctgactgtgatggatctaagacacaacacctgcaacttttaacagcagtgggagtggaaaagattacagtataaggcccatcctatatgggtcctagaaaaattagattttactttttaacttaaacagagtcactagatttaaaggggtgtcaggcttataggcatttttatgtatttaattataaacactttgtatggctatttctaaaatctgcatttgctttcttaaggttaattcctttagttcttggaggtcacctttaatttgacctgtgatttgggggtggccgaccgaacaaaatcttatagggtaaatacctagtttgtttggtgagggtgcagctgacttgaaggaggaccataggcaaaagcctgattttatcttaaatgaatttcctggcaatatttttttcagtagctgctcgagtgtccagttcatgcactccactttttcttgaactttgcagccaataggctgtgtgtaacttccattttatttttaacagtcttgttaaatcctgccctatttcagctacaaatgctggcctattgtctgactttaaagttagaggcagtctaaacctggggataatgtcttttaacaatactttagtcacttcttgtactttttctgtcctggtggggaaaactttaacttaccctggaaaggtgcaaacaagcactagcatgtaccgatagcctccagcatgaggcagttctgtaaagtctataagcaagttttcacaaggtatggctctttytcctgtttaagtttcttagaggaggggttctttttctttcccccctttgtaactctatctagtggcttagccatcagtgagaaattggaatccagatatggcagaatcctgctgcttttaacttctaatgtgacaatgggctcctgggagcctaataagaaggtgcctagtctgccctagtctttacattctttagctcctgccagcctgatcagatcagtatttggttcctccaaggtgcggcagcccttggccaatggcctctttgtcttgcagccttggccatttcttttattgccttctgaacattcacccttctagtgtcctttcttttttcatctcacacattaatgtctctctagccttggccggctctcgaatccttgcctaacttgacttcttccacgtctacatccgtgtccacgtcctctcgcattgctaatctctctttttataagagctgttgctaacagattggcctttttccttaagtctttgtttttctttttccttcctgagttctcctgcttctatggccacctggcggggccaggcagtggcacaggccctgcccccgcgcactgctgtctctcccattttcttctgattctcttttttacacttactgtgagtctttctttttgttttgctcttctcttggcaccggtctctagcctcctctttttttctagatagagctgagccggggagaggaatttaacccttggcgtgcctagctgccgcacttgttgcttttgctctttcctgttttgttccttggtcacagctaacatacgccttggtggccacttttatagactgggtgatattcatgcctgtagcttctgcttgatgttaccctgggcttgctttacaaacgaagtattcactatatatatatttatatatatatttacatatattttttttacatatatatgtaaatatatatatttacgtgtatatatttctatatatttacatatatttgtatatatatatttatatatattttttcgaatatatatatatgctgattttttttttttttttgagatggagtctcgctctgttgccaaggctggagtgcagtggtgtgatctcggctcactgcaaactccacctcccaggttcacacaattctcctgcctcagcctcccgagtagctgggactacagctacccgccaccacgcccagctaatttttttgtgtttttttttttttagtagagacaggktttcaccatgttagccaggatggtctcgatctcctgacctcttgatctgcccacctcggccttccaaagggctgggattataggcgtgagccaccagcctcagggttaaataggatgtaaagccagaatgctttacagagtctcttataaaactgacttaggctcttgtcagctccttgaagcacttctgaaatcttttttatattaattgctttttttctactacctcttagcctctgcagaagtgcctcttagtactgctgcaaatgctgaagctgagttgcattctctgggtcttttttcccctttttcctagatcttaacaggcccttttttaaatataattctccatgcagttggagggttaaacaggcatactgagagtcagtgtaaatgtttagtcttaccttcactgagttctaaggcctgaattaaagcaatgagctcagcttaacgacagtgtccagggttatcactgcatatcctgcacatctctctccttgtgggttgatgaagctgctcccgtccatgtatagctcccagtctactgatgcccaaggctggtctcggaggtcaggtctgctagagtaaacttgagtccaacacctctacacagttaatgctcgacagggctctagctgctgggaacaaggtggcgggttcagggtgtttccagtttagtagatcaatggttaaaaagggctgatagatgaaagtctgttgccccaccccctggatgtgggcttggtcattataatagacaggtcctcgtgtctccctgagaggcatttgcatagctccagcaagaccagatctgagagggcccacttgactatcttgacttccttccttggcctcttgaggctccgatcttccccttcaaggtgagacctggggcrtgttagctccttaatctcgtttctcagggggctgttggcctcggtaaaggggggtaggctgggccatatggagaaagaatttctgttatctctggcggctcctgcaaaactggcttctcttgctctttctgggactccccttttcaactctgtgtctgctggtgcagctgttcttactttcacttttggcttttttgcaataagctgttaaacagggctaaatttatgctggtttttgtctatattatatttaaccatgaatcaatataaaggaattgatctaggtccactggctgtcctccaacccctgtcaccaccttaaatacatggccaattgttccctgtctgtagttccttcggtgggccatccaacaccaaaagagggcaattcttttttttttttcttttttttgagacggagtctcgctctgttgcccaggctggagtgcagtggcacaatctccactcactgcaagctccgcctgccaggttcatgcaattctcctgcctcagcctcttgagtagctgggactacaggtgcccgccagcacgcctggctaattttttgtttttgtatttttagtagagatggggtttcaccmtattagtcaggatggtctcaatctcctgacctcgtgatctgcccgcctcggcctcccaaagtgctgggattataggcgtgagccaccgcgcccagcaaaagagggcaattctaattcacatagagttcttaacctctgggggcttaacctctgtaatcccctgcaaaacctttcttaaggttctgtaacatgcattttaatagagtaagttttgatgattagatgactttccttttatttttcttcttgaaatttttttttaacacagtttctagcggagtgggcttactttgtgtttgacctatttttctcttgagacaaaacaacattcacactacaagaaggaaagggtaaaaggttactcactcgtctaattcacactaaaggaaaatcaaaactaaaaccaaagtgtcattaaaggcacacctgtttgtcaaggaatttaagccaagtcaaaatcagaaccaaagccaaagtgccaataaaggcacgcctgtttatcaagtaattcaagtcaagtcaaaaacaaaaaccaaagtatcaagcatttcaagtcaagtcaaaaacaaaaaccaaagtgccggtacaggcacgccatgggtgatcaggccacgcttccactcaaatggagtgtgcaagttccaaagaccagtcttaccaagtttcaaatgtccagacttaaagtgctagttccttcccagtgttcagccactgcgttgatcctccaygggggcttgccatgcaccrctctgacgaggcattccacgggggcaaatgcctaccsgggagcactctcaggatctgcatcgcgmaagctggctggagccccccacagggatgctctacagggcaggcataagctgcctaaggggctggcttgaacgtcccttaatcacctcgcttctcagtcagggaaccaagaaatgtagcaggacgagctgcagacaaaactcctcagacaccggattaaagaagaaagaggtttattcggccggaagcactggcagacttgtggcttaagagcggagccccccgaaaaagaaattcttggcctgtttaaaggcttacaactttaaggggtccatgtgaaagggtcgtgataaatcgagcaagtgtgggaaacgtgactgggggctacatggatcagctaacagaacagaaagttttgcaatgctttttcatacaatgtctggaatttaaagataacacaagtagtttaggtcaggggttgatgttattattattattattattattttaactcctagggccacgtggtggtgccaaggttgtctggctatttatcttacttttgtttctttctaactttttgctttctctctttcctcctgtcttatgaactaggcaagtttgggggtaggagggcagcagtagtagtggtctccttccttactacatgtccccaggaggaacagagaaggttggatactgccaatttagcccaacattatcagcagctggtctgcagaatctctagtaaaatccaaaaacctccaatattcttaattacttttgtacattaatccctccattgggattttgccattccctaaaggatctctgtcggagtaagaaaagtgaaaactaactcaaatcatgtgatttattagagataaaagcacagaccaaatgttggtagaattaagtaaaaggcaaatgagacgtatcctcccagacacactggctcaccctagcccattcagtgtttgatcacatacagtaattgatttttatgctatcttagttttccagggcttccataacaaattaccgtaagtttggtggcttaaaacaacacgcatttattctctcatagttctaaaggctctgagaatccattcatctctcctagtttgtagtggttgccagcaatcattggcattccttgacctgtgcctccagcacttcaatctctgcctccgtggttacgtggtgttcttgtttctccagatctcttttcttcttctaataagggcaacattcatattggattagggccaaccctaatccagtataatctcatagtgaataactgctgaatgaaacagtcactgagattagggagcgtgtcaggagaatggtgcagatggcagaactatctcagactgtttccctttggggaagcaggccccagccagaggctgctgggtccagggagcagggagaaagctggagatatccaggcttaggtcaaggatctgacccactgcctggggctggaaatagtgtctacatagcactgtcctgtaggactttctgtgataatggcaatgttctatgtctgcactgtccaataccgtagttacttttggctactgacccacacttgagtgcagctagtgcaactagggaactgatttaaattagatttatgggaaattgaatgtatttaactgctgcacatttaagtagccacatgaggctaggggctactgttgaacaatgcagcactagagacactcacctgggacccttaaagcccctccattctgagttgtcagcgtctaagtgctggaagctgggtggaactcgagaagcagcagtggaggctccaaccggaagtccctggctgctctgagcgccctgagtggcagccctgttgtgctgatcagaatgatggctccagccacttcacagcagcccccattaccttccagggcctcagccagaaactcatctgatgccaagaccttaacagcatagaaacccgttaaattcaatatgttgggtttataattaaaaaaaaaaatcaggccgggcgcggtggctcacgcctgtaatcccagcacattgggaggccgaggtgggtggatcacaaggtcaggagatcgagactatcctggctaacacagtgaaaacctgtctctactaaaaatacaaaaaattagccgggcgtggtggtgggcgcctgtagtcccagctactcgggaggctaaggcaggagaatggcttgaacccgggaggcagagcttgcagtgagccgagatggcaccactgcactccagtctgggcaacagagcgagactccatctcgaaaaaaaaaattcattggctcaagccagtaacatttgccatagggacagccatttgtttgtgcatcttgtacaaaaccacatttatgttccacaactctttcccaacaccgttttcagctgcctaccacttaatgtgatgtgactaggggaagtgaggtggctgctgggtggtggtgacgactgtggctgagctgtgatggatcattcttggtgccgaatcatcagaacccattcccttcccaaggacctggtgacttcttccagccactcttctgggaatgcagaaccagccaaggaggtggtggtgggaaagacagaagggataaatggagacaaatgaccggagggtgggaggcaactttagctttaacaatgtgtgcacataacaacaatggccaatgacagtcaatagcaccaaggtctaaaactgagcagggaatcggtgtgccgaagggagcagaagtgggacagaagtcaagataaacaagagagggggtgggtgaggccctatggcagtgctcccgtgggtcattgtccactgagttactgatgacactcaccccacccctactgttcacactaggggtccacgtgcagctcctggtggtttcacccagaaatagctaacaaacatgtataaagccaaattcccttatttttttccccaaatttgctcccttggtgtcagtcccagtggcatctccatccacccaggtcccaaatacaacagagtgtagcacgaccccttcctctcttcctacctccccaccaccctgactcacagagaggcccgtgttccctgtcagatgcaggtcagcagtgtcctcaggcccaggaggggagcacggtggatggagagtgctacagcgtgagcaggcaaatgccagaaggtggccccgaggtgaagccacggtcaaagctgagaactacagtctgacctgcagatgccaatctgggaaactaaatggagagagtgaagtcagggggccaaaacttgctacaggccagccctgacaagccagagggtagaggaagacaagtgtgaaaagaggagggtgaaaagggacaggcagagaagggaggggagcctgaggacctggccaaggctggaaacctgtgctttgttttctccatgtcattttgtgatgatgccctaacttaaatagaaccaacaataaaaagccactcagctccctctccaccctccagctccaccaagatggccttatctcaggcccttgtcttttacctgtactggccaccagatgccctgagctcttcccctttagcctgccttccaatgtctacctagaaatggcttccctctccctctcactcctgcaatggacccaaatcatttcccagtgggaagatatttttatttttattttttgagatggagtttcactcttgtcacccaggctggagtgcaatggtgctaccttggctcactgcaacctctacctcctgcgttcaggcgattctcttgcctcagcctcccaagtagctgggattacaggcgcccgccaccatgcccagctaatttttgtatttttagtagagatggggtttcaccatgttggccaggctggtctcaaactcctgacctcaagtgatctgcccacctcgacctcccaaagtgctaagattataggtgtgagccaccacacccagccgaaagatgtttttctaatgtcagtaacacatgtgaacccaattgattagtagttgtaattttggcagaaattgtgacctaaaggaggtgtgagttctgcaataaatggttattttattactctcaacagtatctccaaacatttgaaaaacagtggtgtgtattttttattagaccatgattgctttgtcttcaggcaatccttgttgctcctggggattcagggacctttgcaaaaacacaatagacccctggctgggaaggctagtctagactaaggatcacttccgactgcttagcagggtacctgccaggcccgaaatgatctttcagtcccttccttctgcttttgcaatcggacgctcccactgatacccataattatatgtctgtttaaataacagtaataactgtgaagaaaaatgttgccatggaatcaaggagaaggtatttcagagtagaacagaagtagacagaatttccaaacatgacctgagtatccccacccagatgtcctaccaacatcttaaacttgatacacatttaaaattgtacttctctttctcctccccataactgagctgcactgcccatcttttagttccctataaatgcaaacctttggatttagttttccttgtgcttttttcacttttttttttttaatgcagagtctcactatgttgcccaggctagactcaaactcctgggctcaagtgattctcccgcctcagcctcacgagtagttgggactgcagatgagagaaccatggcgcacaacgcctggctcttccttgttctttacatggcaaattgctaagtctagttgattctgttgtaatgcccaaccttgtttttactaaccctgtttttagactctcccttttcctttaatcacctagccttgtttccacctgaattaactctcccttcgctaagagagccagacagactccatcttcgctctttcactggcagccccttcctcaaggacttaacttgtgcaagctgactcccagcacatccaagaatacaattaactgataagatactgtggcgagcaatatccgcaattcccaggaattcgtctgattgataacgcccaaagccccgcgtctatcaccttgtaatagtcttaaagcccctgcacctggaactgtttactttcctgtaaccatttatccttttaacttttttgcctactttatttctgtaaaattgttttaactagactcccctcccctttctaaaccaaagtataaaagaaaatctagtcccttcttcggggccgagagaactttaagcgttagctgtctcttggccgctggctaaataaatgcactcttaattcgtctcaaagagtggcgttttctctaactcgctcaggtacaacactgtctctgtaaatttcataagaagtgtgtgtgtcttagtttggatctccccaaacagaccttgagacgaggctttgggtgcaggtaattgaaaatggagctgatctcggagtgcacgagtgaggaagtggaaagtgtgagacaaagaaaaacaagtaaagggtgggtgattgagctggttgctgctctggtcaatgagggcccacttccactaggggctctctgagaaactctgcagaaccacggttctcaaacttcagcaagctcttgggcatgccgggtcttactatgttgcccaggctggtctcaaactcctggcctcaagcgatcctcctgcctcggcctccgaaagcgctgggattacaggcatgagccaccacctagagcctgctgattaatttgaaaatgcccggccccagactgggggtcctgatccagtagccttggagtgggccccaagaagggccgcggtgtgaactgcatctcagaactacggcgctccgagagggcagcgactcgccagagtcggtcagccaggccttgcctaaaagcagagaaggcaagagtgcccgggagcgcctggcgaagcttcgtggcttccagcccgcccgggtggcagcggcgtccgcgtttccagggcaacgagggtggcgcggttcgatgacgtcagggcgcccgcggctccgccccgcccatgggacggacggaggccgagaggcgtggcgggggagcagtggggccaggccagagacagctgcgctgtgcgggcagctagtcccagtactccgagtcggtcgcgggccgacaggcatcccctgagcgcctgctgggtgagttggacggtgcagagcagcgaggaccggggagcccgaaggtggaggctgcgttagcgccaggggcgcggacgcgacggggcgggagcgggggcactgaaagtgccaggcccgggggtgtgggggctgtgmggattcgcgggcggggkggccagggttacccagagcaggggccaggagggccggtggcccacgtgctgggcattcggaggactttacacattgaactaggcagctgttcacgaaagggaagtgatycacatcgcagagaagactggaggcagctgttgccagaatagtgatcttgaagccccacttccttgccagaaactgctccaagcgtctcatgtgaatgacagaagcctagacggtagaccctgggcactaggcaggcgtcactgtatttggatgacagtagcctcagacagtagaccctgggcactaggcagacatcaccatatttggaatgcagcagcctagacagtagaccctgggcactagccaggtgtcgccgtatttggaatgcagcagcccagacagtagaccttgtctagacactgggccctagcaaggcattgttactggccggtctttgctcccagggtggtggcaggccggtcccaatggcagcaaggctcttgctctctgacctggggttcttggcctcatggattccaaggaatggaaccttgggccatgcggtgagtgttatagctctattagaagctgtgggtcacggaagagaactgtggaacccagcgactagtgttcacctcaattaggatgaacccaggcacttagctgtgcrggaacaatggcgagtctctagcccgggagcagcaaccggtgcctcgctggatcagaagcgcagtggacaccctgctggatctggaggggggtggaagtcagcggggcgtctgcgacagcagccatcagcagtggtggatggcaagcaaaagctcagctcaaaccggaacaaacatggaccagaaaagtgtgcagttgcaagatttaatatcgtgaaaacagagctcccatgcaacgggaggggacccaaagagggttgcccgattcggcttgaatgcctgggtttatatcctgatcattgtccctccccctgtgctctcaggcgacagatgatctgattatttctttaccacctgtttttagcctcattggtattttagtgagctctctttactacctgattggtctggtgtgagctgagttacaagccccatgtttaaaggtgggtgtggtcaccttccccagctaggcttaggaattcttagtcggcctaggaagtccagctagtcctgtctcttagtaccccctctcaacaggaaaacccaagtgctgttggggaggttggccgatgaccgctgtaactgcttcctgctgaattggggcgtagtagaggtcatgcagttgagatttcctcgggagtggtgccttcgatgtcatcaacatyggagcatgggctagcaggccagtccaggggtccacggtagatcttagtcatggactgcatctggggctccatttgaagaacatttgtagtttcacagctttgattctggaagagacaaacttaacaaggaggttaaagatacagggattgaaatgtgtggcccgaagtgcaggggcatatgggtgtggatggtgaaagtggggtttcctttagaaaaactcctatacaatggggcatcaatatttctgggaagccgcattctccatagaagctcttggtaaggggagctactggtagtatagcggcatggagggggtgaggtgatagtgaaaggggggtaagacaacagtaaagagaaaaatatgacggggggkgccatggagctctacgattccagttactttcctcgcagttgtcgcttgaagagcaggtgcagatcctctagaggttcacaggaatagctagcgttgtctcctgaatttttgggttcctttggcggtatccagggtttgatgtgtctaagactccactccagacactttaactgcactcagggtagataaaatgactgggtagggtccttcccagtatgtatctaggggtggggacttagagggaagggacttgactaataccatgttaccagggtggaattcctttccctcctctcgggtacaggttccctgtaatgttttaagaacttgttgatatttggctaaggaggtgatgtctgcaactaaattggccgtctctcggtcaagcacaaggtcattggttaggaagggctgtccatacagcatttcgtatgggctaagtcctgctttttggggggagttttgtattcttaataaggctatgggcaacagagcaggccatgcgaggtgggtttcctgagttagcttttttagatgttgtttgagtgtttcgttcattttctcgaccttccctgaggattgtggcctccaggcgcagtgtaagtgatattgtatgcctaagtaacgtctgcgatactcgctgggttactgcagccttgaaagcggggccattgtcactctgtaagtctcagggaagtccgaatctgggaattatttcatgaattagtgcctttattacgtcttcggccttttctgtcctacaaggaaaggcctcctcccaaccagtgaaagtatctatccagactagtagatactgaaatccctgagatttgggcatgtgggtaaaatctagttgccagtcttctcctgggtaatggcctgttctttgttctcctgaaggagcttggcrataaggcaggggattatttctttgccacacttcataggccctgactatctgcttgatagttttgaaaagtcctgatccagttaataatgatttggccgtctgataggtgctatcaatgcctaagtgaaaggtctgatgaagggttttaagtaatttcaattggttagctgcaggcaaaagtatttttccttcttcggtggctagccatcctgaggggaagaaactatgtcctcgtgaggttccccatcctatttcttttgagtactggggcttggtttcctacaggggattaccccatactaggggtccttctataagcatttctaatggagggtcccaccttgcggctcttttggcttcagtatctgcttcgcggttcccttctatttccctttcctttcctttctgatcaccccggcagtgtaagactgccacctctttaggtttctgtacagccaattgtaatctcctaatggcttcctgagatttgataggtgttccctcggaagttaggaattccctttctctccatattgctgcatgggcatggaggactaggtaagcattcttagagtctgtgtatatatttaccctttttccttctcctaattttagtgcctgagtgagggctattagttctgccagctgagcgctagttcctggagtgaggggattactttcaagtattccattatcactgaccactgcataccctgcttttcgaagtcgtttttctacaaaggaacttccgtcagtatacaagttgaggtcgggatcagtcaaggaaacctctagaaggtcccctcgagcggcgtaggtttgagcaatcacctgttgacagttatgttttatcttttcttcattgtctggaagaaatgtggctggattaagagttgcacgagtgcgcagtcgcagcactggcccttcaagtaatagagcctgatatttaagcaaacggttgtctgacagccgtaagtctcctttagcagtgagtatgccgtccacatcatgagacatccacacagtaagatctcttccctgtatcattttaactgcttcagatactaagactgctactgctgccattacccataaacaatgaggccaaccctttgccactacatcagtttccttactcaggtatgccatgggttgcaacctggtccctcggacctgtgtaaggaatcctagagctattcctgttttttctgtgacacataaagaaaagtcttgcccctttggcaagcttaacactagggcttggattagggccttctttagggcctggaaagccacttctgcttcaggtgtccttcttactaaatgggtattcactttctgagtttccttaattagtgtgtataatggcctggctatttcactgtacctgggaatccatattcggcagaagcctgttatgccaaggaaccctcttaattgctttatggttttgggataaggataagccagtataggctggatgcattcctcactgagggccctggtgtgtctggataattttagccctaagtatttaacctgctgtgagcagagctgagcctttggtctggaaaccttgtagccacaggtggccatgaagtttaagagcacttgggtggcttgatggcacaaggtttctgaatgggtggctaaaagtaaatcatccgcataccgaaggacaagagtgcccaagtatgagaactggctcaagtctcgggctaatgcctggccaaatagatgggggctgtccatgaacccttggggtaaaacagtccaggtgtgttgagacattagattcaaaggatcttcaaaggcaagcaagaattgagagtcaggatgtacagggatgcagtaaaaggcatccttaaggtccaggactgtaaaccactctgcttcctctggtatttgggaaagcagagtgagtataagattaggtacagctgggtatagaggaacaacagcctcattgataatcctgagatcttgcactaacctccactgtccattgggtttctgtactcctaaaattggagtattgcaggggctattgcatggttttactaggccttgggcttttaggtccttaacaatcttttggagtccttgttgggcctcgggtctaagagggtactgcctttggtggggaaaggaggcggaatcctttagtttaacttgaacgggacgggcattcttccctcatccatatygtccttctgttgcccagacttcaggattaattccttcctcaagtaggggacagcaaacggtgttccttctcccatgttcaggtgtataatggcccctgcttttgctagaatgtatctccctaacaagggtgtgggggtttcaggcataattagaaaggcaagtgaaaagaatgaagttccccagtcacaacttagtggctgggagaagtatctagtgactgcctrtcctaggacccctcgggtagtgacagatctggaggacggttgtccaggaccagagaytaagactgagaaggccatgccagtgttcaggagacagttaaccttctggcccccaatggtcaagcatacctggggcatgggctggcgcttgccccgggcaccctcagtcctgctgctggcttatctggttagtggcttctgactgaaaggaccttcatcccctggggcagtgggccttccagtgattcccttgacatgaggggcatggatgaggggcagcttatttctattcagacaatcttttttaaagtgtccttgtagaccacactggaagcaagccctatcaggcatttgatttgcccagcgtttcccttttccagagcctccaaagtaagatgctctcctcccccaatttctacccagcttacctcccctgctgcgatacaatctccaagccttggctccttggccagggccttagaactgatgacccagtactttaacaactggagctatgcctacaacaacacaatagatcaggatgaaagcgaattgagtaaattaaagggaggtgcatattcctatagtggcaaatgggggcaagaagtgaacttctgcttgcctgagggcccgtttgtcctgttctgcctgctcctcctgatctctattgtgaaaaaaaccgaggttgccaagttcattagagtttctatgttttgctctgggcctaaggtggacttttgaagtttttttcctaatgtttgcattacactgtttaactgacaacaaagtggtattggagtgttatagggtcatagagaagaycttcaattatcaattataggttttaaatttaccctggcttttaaaggaatagggtacactgtttttttcttaactacttatatatctctctctttctttctctctttgactgtctctctctttctctttgactttctgcctttcttcccccctctctctttctttctctctcttctctctctctttcctttctctctctgtttctctttccctctcattctctctcttgatagatggattttgggaacacagcggaagaatgttcgctcgttgcccccatttgcctctataggaatatgcgcctccctttaatttactcaattcrctttcttcctgatctattctgttgtcgtagacacagttccagttgttaaagtactgggtcatcaattctaaggccctggccaaggagtctaggcttagagattgtattgcagtgggggaggtaagctgggtagaaattgggggaggagagcatcttacacaatgggagagcaatcctcctagccatttacaaacttggggccctggcaagggtggtaggtcccacataacttcccatgtcgagagctgtatatctaaattgggagggacaccagggacaagactccctgggttcataccctaggtgcttaaggacacagcgtagagcttccttagatccctttggagatacaacttgctctaatacttgggagaggaagtgagtctgaagcattagtacctaggaggcagggatcagaggaagtagattcagaggtaaggagaattttggggctacactttcaagaaagtcatggttaggacccaggaggtatgggccagaaggagagataggggtgcacgcatgggcaactgttgagtagagacttctggctgcgccatratcttgacyggccaatgccgggaatttgggacgacagctttctgcctctagtcagccctcwgcttccccaagaaaactgtaaaagtggaagctggttccaggcagaccaatgctcccaacccaaaagggttggggattgttagaaagccttttcccagaaagcctcacacctgagtcttaagtccggtggccacaytaatcatttttaaccagccaacaggtgcccagtattttcctccaattctaaggaagggtaggacagaatagcaagtgaaagtggttcaatattactcaccgctttggagaatccccatacgagcccagcaaatgttaccgatgagtgtttgctcccagagctcccaagatggtggtgggccgcttccaaaatggcagcaaacctcttgctctctgacctggggttcttggcctcacggattccaaggaatggaaccttgggccatgcggtgagtgttatagctctattagaagccgtgggtcatggaagagaactgtggaacycagggactagtgttcagctcaattaggacgaacccaggcacttagccatgcaggaacaatggtgagcctctagcccgattgggagcagcaatgggtgcctcactggatcagaagctcagtggacaccctgctggatccggaggggtggaagtcagtggtgggtctgcgatggcgatgatcagcagtggtggacagcaagtgatagctcagctcgagctggaacaaacatggaccagaagagtgtgcagttgcaagatttaatagagtgaaaacagagctcccattcaacgggggggtacccaaagggcgttgcctgatctggctcgaatgcctgggtttatatcctgatcattgtgcctccccctgtgctctcaggggataggtgatttaattatttctttacctcctgtttttagcctaattggtattttagtgagctctctttactacctgattggtctggtgtgagctgagttacaagccccatgtttaaaggtgggtgtggtcaccttccccagctaggcttaggaattcttagtcagccttggaaatycagctagtcctgtctctcagcatcactgtattatcacccccaaggtgcacagatcttaggaaggtcacccagctagaaagctgtaacattgagatttgaacccagacagtctggcttcacaatccttatctctaacagttgtaccataatgcagtaaggttggtgacttcaagtggcatgggcccataggtacttgttaggatctggggatttggagccagctgtgcttgataatagttgtatgaccatggtcaatgtctctaagaagctccagtttcctcacctggaaaaggagactactgatagtacttgggcttggtgggcacagttgaggtctrtgtagctgcttaacayagtcacctgcacacagcaccagctcagtaactggaggttgttatgagggttttatcaggctggagagaaatgagaagattccgtaaggtgttagagatgcactgtggacttggtaatgtactgaggttatggcgcatggagaggggaattccaacatgacactggggtttgtaattccagtaatccttgggtgactggcagtgtggaactggggtgcaggaggcgaagctgggtcagggctgagaggctgaattcagtgttgaacactcagtatgggcatctccagaacatgagaggtggggaattgccgttgactgccaaatgagctcacgagtctggaggtgtgaatcggggagccttgcacacattgaggacgtgatgttttcggttctcttgcgtacatacctcagartggaattgctgagtcatgtggtcactccatgtttaatcacttgtggaactgccacactgttctccagaatggctgggtcactttacattttcactggaagggcatgagagtctgatttctccacatcctctcaatacttgtgattatttttctgtttcttttttctttttttctttttttttttgagacagagtttcactctgtcacccaggctggagtgcagtggcgcaatctaggctactgcaatctctgcctcccgggtttaagtaattctctgcctcagcctcccaagtagctgggactataggcacctgccaccatgcccggctaatttttttgtatttttagtagagatgaggtttcaccatgttggccaggctggtcttgaattcctgacctcatgatccacctgtctgggcctcccaaagtgctgggattacaggcatgagccactgcgcctggcctatttatctggttctttaagagataaggtcttgctgtatcacccaggctggtctcaaactcctgggctcaagctgtcctcctgccttagcctccccagagtagctgggaccacaggcacgtgccactatagccggcatttagtatctttttgctcattgccatcctagtggatgtgaagtggtctctcattgggtttttggtttgcattttcctggtggctaatgatgttgaccatatttttctgtgtttttgttgttgttgttgtttgtttgttttgttttctttgagaccgagtttcattcttgttgcccaggctagagtgcaatggcacaatctcagctcactgcagcctctgcctcccggttcaaccgattctcctgcctcagcctcctgagcatctgggattacargcatgcgccaccatgcccagctaatttttgtattttcagtagcgatggggtttcaccgtgttggccaggctggtctcaaactcctgacctcaggtgatccgcccgtctcggcctcccaaagggattacaggtgtgagcgtgcctggcctttcctgtattttttggccatttgtctgtctttggagaaatgtctatttgaaccctttgcccattttttaattggttttttgtcattttattattgagtcttaagaatttttttttttttttttttttgagatggagtctcgctctgtcacccaggctggaatgcagtggtgcaatcttggttcactgcaacttctgtctcccaggttcaagcgattctcctgcctcagcctcctgagtagctgggattacagccatgtgccaccatgcctggcacatataatcttttttatatgttgctggattcagtttataaaatttcattcaggatttttgcatctgtattacaagagatgtttatttctagttctcttgtgatgtctttgtctggttttggtgtcaaagtaatactggcctcatagaatgagttgggaagtattatcttctcttctgtttttgggaagagcttgaataattgatcttctttaaatgtttggcagaattcacaatggaacccctggtttttcttcgtggacagtttattgattgctaattcaatctcttcagtcattatagatctgttcagattttcagtttttcataaggcagttttgttagctgtgtcttcccaggaatatgaccacttcatatcatttgttggcataccatggttcacaatattcccttataatcctttttatttctttagggtcagtggtgatgtcccgtctttgattcctgatgaggaatttgtgttttctcctttttatttggccagtctagctgaaagtttgccaattgtgtcagtctttgcaaggaaccaacttgatcgtttattgatttttctctatttttctgttctctgtttcattcacagttgctctatcttttattattttcttccttctgctttaagaaggaaggaaataatttaagtttactttgtgtttcttttccagtgtcttaaggtggtacttgaaaggcatgactctgaggttagacattgctgggcttggagcccttctccccacttctcagcggagggggtttgggaaacacagcctctctgagcttccgtttctccatctttcatggggggcagtagtactkggctcacagctgttggagggtgaaataagataagactatagaaggcaggattcctgccgccgcccaccaacaggtgctcagacctgcggctcccacctccctgcacagaggggagtcagcatcctgagcggccagactcaggctccagcaccrcaggctgtttcagctcaaaggactcaaaagttcctctttcctctaggccttaaasagtgaaggtgggcggcccacgcccaggactcagacagacttgggttcaccagccattcccttcaatgccttcatcagccaagccacttggaaaaggacccagtctatccagaaaattccagaatggttatttggtcaagagagctgagttttgggaggcctgctgtgttagcgggaagccaggtgtctatatgtcgaggagaagccagtgcagaagcstgtgatcagaggttctgtgctggaggccctgtgtccaggtggaccggcggtgggtggagacgtgaggtaccattgtgtgtggccagagtggaccagctggcactggctggattccagagggaatgcttcctgaccctgggtttagtgagccttggggatgagtctggatgtccrgggtgctcccaagagggcagggtactctcaggcaaggctgtgtgacagaaaacaagactctgacaaaccctctgccctgtgtgcctggtgacccccaggctgtgcctggctctcttctgtgtccttggcatctgtgttcaggagtggacgagggaattcttctcnccttttcttntgggaaaatgatgctagccattcacagagtgattctcttttgccatccttttggatttcaagtttacttttctctgatttgtaaggtgttgcgggctctcctgttggtgggggtagtttgaacccatagatgggagagcatggattcaggttgcatgttttgtgcaggctcttatcacgcgatggcatccactgtggaaggaggcgacacagctctgctcccagaattccccagggggcccctcgatgcctaccgagcaagagcrtccttcagctggaaggmgctggcgctgttcacggaaggggagggcatgctccgctttaaggtgaggcgtgcggttgtgcgcagcttgtcttttttcccagtggggtcttagttcgttagcagaatgggatttctggctctcacagctcctcctctgccgggcgaggctcatcccaggcagcgcggcctctctcctctctgcaccccaggacaggcctcagggaattgatgaggagtctggaaatgaacacggattgttgatgtttcttaagcctccagtcctctagtccattgggaatgatagtcatatctctgtctgggtgtctccgggtcagactgtgtcccatgaagcctgtggcctggaggtcaactatataagggcacatggagagtccatcttttactccaaataagccttacccatctcctgcatttccagaaaaccatcttctcagctcttgagaatgaccctcttttcgctcgttcccctggagccgatctgtccttggagaagtatcgcgagctgaacttccttcgatgcaagcggatcttcgagtatgacttcctcagtgtcgaagacatgttcaagagccctctgaaggtccccgccttgattcagtgcctgggcatgtatgactcttctctggctgccaagtacctcctccatagcttggtgagcatgcggcctaggggagagggaaacggctttcatgctgcgctgagccttgagggatgcctgtcccagggccaaccaagaggcagagaaacaccagtttgtccagctatatttgcaaattttaaaaattatcttttttttaatgtttttaaaaaaatttcagtcccccttttcatttttttattttcaagcccatccaccatcatgtatttgtaaatttgcacccataagtccttgaataaaatacaatgtggtgaagcttcaagtcccatcagaagaggagctgttgggactttttttttttttacctcatacaaaaaaagagacaaatgattaaaaaaaaaataaaaaaattwaaaaagtaggccaaagggagaaacctgtgtttttccttcctttgtaacataccagcagagctgagcttgggcaaaatggctttgcccttagccttgcctgcattgtttgatgggctggtgggctctgctctccttacagctctccctgctgtcctcaracscccaggactccttgcaggcatcttaattcccaggtgatttctgtgtgccttatacaaggtgctcggcacagagatgtaggtcttaccactcacatgaactcagggacccggggcagctgtgtgtcaggagaccctggccttgggcatccaggctgctggctaacctctcagcacttgttctccaccttggggaaagtgcagtgtggcagggaaccagcgtgggcatggtgttgagtgccgttgtctgttgtgatgttcyggaagagcagtactcttcttacctgccccctgttgataggacgatgttatactttcaggtttttggatcagcagtttacagttctggttctgaaagacatctcacatatattcaaaagatcttcaggatggaggtaagttctggttcatggtaaattgtgagcctggttctcttgcttgatctctgtagagatttgtgaaaagagaagattgtagaagggggtgcccagggggcttatgctcttcttgtttcctagtgttctcaggcttctcaccaaatagctagcactgttctttagcaaacacaggcacattgacttcctagcaccaggtgaattgtcactgaggccttccactgtcttttcctgatgagcagttcctgccaccttgctgacgtggagcagctgcggtcagcttggtttaggctgctgtggttgccagctgagtgtggcagcatgactcagtcaagtcactagttgggtagatggaaatttggggctttgatatgtggtttcatctttaaaggaaagatggcagtgaggtccttctgggaatgtgcacaaagaacttttcttgctttccatcattttgtgctttgacatttagatttttggatgttttgctctgaccgaattaagccacggcagtaataccaaggccattcgcacaactgcccactacgatcctgccactgaggtaggtattaccttcccccgggtccctgagtttggancatatgagacgtcatgagtgcaaatgccgttgcccagaataagaaaaaaaaaacattaaagcaagaggcctgtccacatacacttgtgtagaaatacccactgakattcatcacactgaaaagtggggcccaggagatcaggcattggaggacaaagcctgtgcccaccatgaactttatggggaattgatcgtggtttggatttgtgtgtaatttgagtgcagtgaagaagccctcattctgtaaaatttattgccttgtttacctggctgcctatgcgtagtggattcataaaccgttctcatggcccgtggtttctacggtgggccccatggagacaacatgctccctgccctctgccctttgtggctgtccctctgcgaagagcctgccttgtccatttccgccaccgcagtctgactcctcgggtccttgccatcctcttgacctctctggtacctgcattgtggctgctgcctgggagttctggtgtggtgcagtgagacgggccacagatggatgccctggggctgtcagtgctgtggaggggcacggggtgcagtgagacgggccacagatggatgccctggggctgtcagtgctgtggaggggtggaggggtggagggagatgggccacagatggatgccttggggctgtcagtgctgtggaggggcgcagaggtgcagtgagacgggacacdgatgccctggggctgtcagtgcatggaggggtgcatggagggttgcggggtggagggagatgggccacagatggatgccctggggctgtcagtgctgtggaggggcgcaggggttcagtgagacgggccacagatggatgccctggggctgtcagtgctgtggaggggcrcaggggtggagggagatgggccacagatggatgccctggggctgtcggtgctgtggaggggcgcaggggtgcagtgagacgggacacggatgccctggggctgtcagtgctgtggaggggtgcggggtggagggagatgggccacagatggatgccctggggctgtcagtactatggaggggtgcaggggtggagggagatgggccacagatggatgccgtggggctgtcagtgctgtggaggggcgcaggggtgcagtgagatgggccacagatggatgccctggggctgtcagtgctgaggaggggtgcggggtggagggagataggccacagatggatgccctggggctgtcagtgctgtggaggggtgcaggggtgcagtgagacaggccacagatggatgccctggggctgtcagtgctgtggaggggtgcgggttggagggagatgggccacagatggatgccctggggctctcagtgctgtggaggggcacaggggtggagggagatgggccacagatggatgccctagggctatcagtgctgtggaggggcgcagggcagcgagggaggatggggagggtcctcacccaccctgttctgttccctggccctgcctccctgccaccacatgactctccttggcctccgcttgtccctgaggcctaggtctccctgccagtctttcctcacccgcyttccaccctcccccattggcagtggtcagggaggactgttgtgtggcaggaagtgaagctctgcacctgcggatgtgctcaaccagtcatccatccatcattctttcatccatccattcattcttccatctgtccattcattcttccatccatccattcatccttccatccatccattcattctctcatccatccattcattcttccatccatccattcattcttccatccatccattcattcttccatccatccattcattctttcatccatccattcattccacagcctgggctgtgtggactgtgcctggggtactgcatggaagagcccaggaatgaactcaagcggacccgtagcccagcagggataagaggtggtcctcgcacagggtgcccctgctgtggggccttgggagtggggccaaggctccttctcagagtggggctaggagaaagtagggcatgaggttcttttcagaattttcttttaagccataagatatctttatctgaacccaggtctttctggccccatggctgcttctcctcctgctgtcctctttgcctgtggcctgcagtgccaggaggtggggccctttctgacaggcagatggacaacagcacccaggtagccttggggtggggcatcagaggaccacttcccatttccacctccttctttttggcatttgatccctaagtggaggtcagagtgtggcatcagatccgtagagttggggtgcccaggatccaggctgggctgctggctgagcatttatttggacagcaggcattgctgggtacctgttgtgtgtgaggcacagctttccaagactgggctggaagtggcgagcacagcagacaggtctctgctgtcctgaagttgtgggctggggggagacacagacaccaacagaaagaagtgagatgtgctgggcaccatggaggccctccagagagcaaagctggtatgccggggcgcagggaggcagccagacagtcgagacagtgggaaagatctgtgtggagcagtgcaggccccgaggagccggcttgggccggtgttgcagtgcacacctgcactgcggagaatgagtgacaggtggaggtatcagaactgccgcgtgctgaagaatgaatggggagggcctggctgagactgggagccctccttaccctcrcaggcgaagagctggtggtcccctgagagaagagaacagaaggcatggctggcagccaccccacctcctacttctcctcagtgaaacttcaggatctataggatgattgttcactactctgtttacagaatcccactggttagacaggaggaagccctccccggcacgttattttgtagcctcccaccctgcaggggctggaaccagaaccaaaacttagccacgacagcccctagcagtgactggcaagctccgcgtggaggatcagtgtctcccgaggcggcccagggcagctctgtgggccacctgcgggctgtctgcctgaaggcgctcatctttgtccccttgcggatcccggccacattatgcagcactgctggtccgcatcctccctcccagccttactcgaagggctcccagcagacgcccctggggcaggcccagccccagcggcccagctcctgcctgttcccacgtgctcttcgcttctgacccatgcagcaccctcagtgttccttggggatctgtccacaccccttctagccaaacaccgaacgctgtgatgccacagcccatctgctagttcacgcatgcgttccttccttccttccttctgatgttctgagcggctgccttgtgctcggggcatttgggatataactgtcaatcacggagctgtggatgggagagacagcaagggggcagcagtgtgttgtgaattagaggtcctaaagaactgagtggactgcacggcattcccacagccctgcccacagggcacagacagccccgcccacagtgcacagacagctccgcccacagtgtatccacagtgtttctacctaaggggcgtggttagggactgaagactatatgataatgaaaactccctggaagcgtttgccagcctgcggagtattttgcatctgaaggttctttaagtcataaggcccaggaataggctgtgtttaaaaaataggcctgcctgtgccatacaagaactaaaatgtgcgattagtttcaactcttgcctcagagattttgaacgtagaaaatggaatctgtctaaaaggaaaacaccaattctgcatgtgctttagttgctaattataactaacctaaattttcccttgtgcaggaattcatcatacattcccctgatttcgaagctgccaagttttgggttggcaacaygggcaagacagccactcacgcggtggtgtttgctaagctgtgtgtgccaggggaccagtgccatgggctgcatccctttatcgtgcaggtaggacgctggggtggccctcagtgggggcagtgtttacccccaggaagcactggtaatgtctggagtcatttttgtcataacaagggtggggcatgcttctggcatctggtgagtggaccagggacactgcccaggaccccagtgcatcccatagccccgcccacagtgcaaacagccccgcccacagtgcattccacagccctgcccacaatgcagatagccccgtccacagtgcatcccacaaccctgcccacagtgcacagacagccgcgcccacagtgcacagacagctccgcccacagtgtattcctacagccccgcccacagtgtatcctacagccccaccagcagcgcacagacagctctgcccacagtgcagacagtcctgcccacagtgcacagacagctccacccacagtacagatwgccctgcccacggtgcacagacaggcctgcccaaagtgtatcccacagccccgcccacggtgtatcctacagccctacccgcagcacacagacagctctgcccacagtgcagacagtcctgcccacagtgcagacagccctgcccacagtgcacagacagccctgcccacagtgcacagacagccccacccacagtacagatagccctgcccacagtgcacagacaggcccgcccaaagtgtatcccacagccctccccacagtgtatcctacaggcccacccgcagtgcacagacagctccacccayagtgcagacagtcctgcccacagtgcagacagccccgcctatggtatatcccacagccccttccagggtgcataggcagccccacccacagtgtatcccgcagcccctcccacggtgcagacagccctgcccacagtgcacagacagccccacccttgccttagaaagaaacatccagcccaatgtcccccagtgacacagctgagagggcctggccaaggctcctggccacaggagctgcaggcctctgagaccatctggttgatttgatgcacaaagtttttcaatttcgatgaagtccagttttacgtttttttcttttgttgctcatgttcttatttttcagttgacctgacgtttgagctgttgcagaccagagagatttttttcattgtaaggttacaggacaaaaccaaagtgtttttcctactgtcatgcagccatcacaacgcttctgacattagatgtgtgtgggtttctccccaccagcaggcagctctgcagcagaaagcagctgggcgtcctctaatttaactccatactgatgctgttcacctggggtgagcctcaggaccgcccccaccccgtacccccccagtgagggctcagtcccacaagaagctccccaaccctttggatgccaatggcaagtccaggttgtggcctgtgcctctgatcaatcccctaattgtaccttggtcttcatcctgaagctatttaggggtctgcaaccatctcatgagcacacaaaagactgtcaccactgcagagagtccagggttttaggagtcgtgtgctgggaagcagggacaaggccaaatatgtatttatcacagcatcatagttacctgaggccagtgtgccttgtttctgtgattatagatttctacctggagtggacttcttgcgggagttgcctggactagaattcagcagctttcggcgtgtctgattttggggacatagagccgcagtgttttagacttgtttatgttgtgctaaaaacactccgcaggattgtgtcgcccctctcgccactgcaccaagtgctcagggcacctgagtccacctcccagagccacggcctcctgcctgataaggagggatggaaacagtggtcttggggttatttggacaggattgtgatctgcgccccagacctgagctggtgggcggaggggcaggcatcttttgcaggtttctttctttttttctttttttttttttttgtgagacagtgtctgaatctttactgggccttgctgaaagattttagaaaaggagaggatgtttacatttgggttttagccctttttgagtgtttctttattttaaagttcagtgaagttagatggtgaattgacagacataaacagaagccagctagcaggtcatgcacatagctaaattccccgtagcaccacctccatgtgtctctaaagcagcttttccactttggcactgttgacagtttgggctgggtagtactcactggggcgccctgtatgcccagggctgggctgagcacttctggcgtctggccattctgtgccatagcttcctgcagttaacacaaccagaatctctccagacaccacccgtgtcccctggtggggaaggggaaggtggcacgtctcatggttgggaatccctgctgtaacagtgcccaaggatgaagctccacgtccttccgtcgagttcccacagtgcgcagccattagctggctggacctgtatcttggggagcggtgattgaccagaatattcatagccgtttctcccactacacctatttgcacagccattttgtcactttactaaaatctagcagggagtcctgtgtctaaaacgtgaatatgaaattcccgacgtcctcccggcagcaccggcccccgtgttagtctctcatggctgccacagcaaagcaccacaaagcagggcgctcgaaacagcataacgtattctcccaactctggagkccggggtctgaaattgaggaatctttagggcggcattccctttaaaggctctaggggaggatccttcctatctctttcagctcctggtggccccaggcctgtggccccatgtgggcggcaagccacccaggtgccgaggcaagagactgaggacacgagctgttccagtgtaataaaatataaaataagaataccagatatagatcttagatatgattatatatgaatatcaataatcattagtttgtagcaattactctttatcccaatattataataatcctcgctctataatcataacctaggaaaaaccaggccatacagagataggagctgaggggacatagtgaggagtgaccagaagacaagagtacgagccttctgttatgcccagacagggccaccagagggctccttggtctagcagtgatgccagcatctgggaagacgcccgttgccaagcagaccgtggtctagcggtagcataagtgtcaaggaaaaacacctgctacttagcagactgggaaagggagtctccctttccctgggggagtttagagaagactctactcctccacctcttgtagagggcctgacatttgtcaggcttgcccgcagttatccggaggactaaccgtctccctgtgatgccgtgcttcagtggtcacgctcctagtccaccttcatgttccatcctgtacacctggctctgccttctagatagcagtagcaaattagtgaaagtactaaaagtctctaataagcagaaataatggcgtaagctgtctttctctctgtctcctctctctctctctgcctcagctgccaggcagggaagggccccctgtccagtggacatgtgacccatgtggtcttacctatcattggagatggctcactctccttatcctgcctttgtcttgtatccaataagtatcagtgcagcctggccttcggggccactaccggtctccgtgtcttggtggtagtggtcccccggacccagccgtcttttcttttatctctttgtcttgtgtctttatctctatgctctcttgtctccacacacggggagaaacccactgaccctgtggggctgatccctacagccccagcgctgtactctgtgcctccgtctccacatggccccctcttccccacacccactcctcttctgattctcataggacacttgccgtgggatttagggcccacctgggtgatttgggatgaccttatcttgatgctcttaaattcattatatctgcaggaccctatttccaaataagcttccattcccaggtcctggggttaggacttggatgtaycatttctggaggatggtttaacccacagccgcccagcgttgagcccatggcccaccctgtgggtttctgaacacatttgttttgatttttgtgtgattgtaacagttgctgtttgctgctttctgtggctttgtatagatccgggacccgaagacccttcttcccatgcctggagtgatggttggcgacataggaaaaaaactcgggcagaacggtctggataatgggtgagtgacagaggctgctgagccctgagcttcctgccaaggcccaggctgcgttgtcgctcatgtctgagatctcactggccccrtggatgccatgccctgccctcttagactcaaatgcggtggggacctacgcctagcccccgtgcatgcactggccacgtcctgcttgaactccactttgggaggccaacttgatcagagacctcagcaaaccagcttcaccttggcaggcggctccacactctcagatcagacccagacctctgtgtacanctggtggggcccctgcctggggggctgcctcctctgtgtgaggtcctcctcagcatcctgagcctcccccggctcggcctctgcacacatccatgctgatctcgagggacccatatctgcagtttctgcctccagagtaggcttgctcctttccgggtaatcccagtgtcacagcacttagaaagagaattccgctggcttatttgtttaatcagcccacatatatctatttagcagcacacatgtgacaccgggttggtgtggccaaggcctggctgaagggttggatggggcgtgcagaggggaggggcctagaaagactaatgaatgcttgatggccacatggaggcctgggtggccggggagaagtggccagtgattttggaatgtgcagcgtttcaggtggaggaagcagtgggaagtgtcaggcccaggcctgtgctgggatgcagrcggggtagggaggccaggccgcaagggccttgagggtctttgagggattggattttggagctccaggtcattagcagcatgacttttggaatgagacagatgtgcagccggccctttgtgtcaccttgaccagctttcttggcatttcctcatctgtaaagtaggtgacaagagaggtccctgtgccagggccctgccaggccctgcctgagcaggccgggcttgaacttcctggccactggcccatttggtgcctccctcactgcgaatgctggactccacacgctgtctcccccgagagcctgatccagcagggtgtagacccctctgtgcccacgagatgatttataacttgggggtagtgggacaaggtakgaccatgcctgagcctgatrgcctgaaagatgtctcaggagtgtttctagatatgcgtgtttcatatagtgtttcatagcgaggctggtggagaggagaggagcctgccttacaggagttggaaataactggttatcatgaccaggttgtctccagagggagaagatgggccagtgggcatctgagcgctcagcgatggagaaacctccttctgcctgtctcttctgagaagtcagggtgatgggcagggagtgtcttaaatctctgcttggccctttaaaacaggcagggccccagactgtactaaagaggaaaatcttgattgatttttatacagtgtcaacttgagaagaaagtaaaaggacattgttaaaaagcaaattcttgtgatttcaggcaaaaaaaaaaaaaaaaagcaaaacaagacacatatgcacagccctcctaactccacctgtcctgcagagttctgggttctcactggcttatactaaaataatacaaggaacctgctagttaatgttggagctggcagggaggagagcgccaccccgacctgcggctgtcagttctcttgaatgactactttcgcagggtgcctgggaggcgcttggcatggacggtgcccgtgtagcaggtatggagggtcgctgttcaggcccttcgccctcagggcagcgggaagccccagccatctggaggatgtaatgcggcttggtctgtttgagaaggatggctctggcctcagggtgagaagctctgaagcgctgtgcaggaaatggggtgtaggaagcactgtgttgttctggagaatctgcatccttttattagacccggctgatccctttcagggctctgcagccacaggcactgttacccatctactgaagtgtcctatgtgtgcacgtaaggcccgacaggcatctccacccgggcatatggcggtggtgaattgtcacatccagtgggtggcctcgggtgtgagcaaggctcttcttcactgctcattcagtttcatgaatgagaggctttgacattattttgggacattgcagagaaaccctgcacttggttcccccctaataaacgtatttctagagattgaatccacacctcttactgggataatattcaaaggagcattagatcaaaccattaatgattaatacatcacactgatatggtaaagcctcttgtaagactcagaaatacggtctcctataggatcgccactaacacaataacgaccgccctttgacgctgsttcagagctgctccaccaagccaggtcactgagcccccagagcctttccaccgtgtctctctgcagggtgacagggatgcagtgggattcgtccatctttgatccctgagcctttgaaggcctaggttgggctgggatgggagccagccggggtgatgcaggcggcctgctctccgcccctttccagaaatgcacatttcccatccagggctggagggtctgggcagggcacccagcagggggcgcagtgataccagtgttccctccgggtttcccagccagtttctgcctggatgtctgtcttttccaagatcagcattataatttagtgatttttgttaccaatgttgaaatcatttatcttgaaaaaagtggttacaatttgtaggttagattttgtcactttacaagaactcctgagtatgtgggatgactgcctacaaatccaaggtaaacgtaaattgtgtggattaattttagccaaatagctctaaaagcaaaatcataaagatcttctcaagtgatagtttcagccagactcttaaggtgggctgcaccttaagggtctttcttcgtgcgtttgccctgagctgaggcggtggctgggaggatgsctgccgaactcaacggcctgctctggcggcttggctgggctgggcttggggggcccttccaggccccaaaggaggaaggaagctgctgcaataagaagcaggatgtccagggcgcggggtgtgtgctgaggtctgggcgcttctgggattggagtgagggtttctgtgccacactcaggcctcccgtgccacgtgcatgtccagtgacacacacacacaactcctgtgctgtgcacacacacacctgtgacacacgcacacgtctcccgctggagacactggatctggcttgtatttgagttggccacatgtgaccaccactgtaatagcttttgtggaacagaagggatcccytgagaattcgtggaagtttgctttcctttgaaactcacgggaatgtttttgcaagtataaatatattctgtgtggtgagaatgggggaataatttccactccttaaaaagggcrctgactgtgaccggatcatactggaaaaggcattccttggctttcaagtaacaggctggagcacgctggggccattggcaccgaggcaaggtttttctcacgaggtggggtgttctgagtgtgcggctgtggcatgggggaagctgctaccaaactgggcagctgggcctagggctttggaggagctggcccccccgctgcccttcacttcctgcaggtgggcaggggcctggcaaagcagccgagagctcttccctcaccaggtcacccaggtttccctaaggagctccagccccgtccccacccggccccagggccttgctcctcctggtagtgtggaaactgtcgctgtgtctttccctcaggctgtcctgggagtcaggatcatggcctggcccttgtgcctcagaggatgtcgtctgccccacctgacttgttcataccatgccacttacgtgcccgtcccttaagtctggcaggccccatgcacggtggccccctcatggaggggggtgagccccgggagactgctgagaggcagctagctcacccaggaaccaggaacgttgatggttgagggatcccaccctggggtccgcctcatacccttcccagggtggggcatagaattcccaggtgggccgagggctgcctggtgtcaacagtgactgcatggagggcatgaggccaggagagaacctggtggacggggcaccacaggcaggcaggaccacctcatggcaaggcggtgatgctgttagaggggcagatggggcaccacaggcaggtgggaccacctcatggcaaggtggcgatgcaattagaggggcagatggaggtcagcttggggggatcctccacattggcctccgccattccgaaggcctttgggaaacggcccagctcccacagggaggatgggctgaagaggcagagttaggaaagagccaatatggttgctgcaggaaatcagcccaggagagctgagtagggatggaggtgctgggtcctaggtggggatggaggggagaaagtgaatcgggccagcacagcagagctggcagcccaggaccgggtgacaatgggggtgtggggkcatcctgagcaggactcaaggaagagcccacgcaggaaacgggtgcytctggttcccttccagcatgtgagattattctttatagatgagtcttctgtgrtttagtaaaagactattctgtaggcaggggtccccaaccccgtggtactagtctgtggcctgttaggaactaggccacccagcaggaggtgagcatcgggtgagccagcaaagcttcctctgtgtttatagccactccccattgctcacatgactgcctgagctccgcctcctgtcagatcggtggcggcattagattcttataggagcgtgaatcctactgtgaactgcgcatgtgagggatctaaggcgagcgctccttatgagaatctaatacctgatgatctgtcactgcctcccatcacccccagatgggaccatctagttgcaggaaaacaagctcaggctcccactgattttgcaattttgcattatggctaattgtataatcatttcattatgtgttaccatgtaataataatagaaataaagtgcacaataaatataatgtgcttgaatcatcccgaaaccactcccacctccccctcattcgtggaaaaattgtcttccataaaaccggtccctggtgccaaaaaggttgcggactgctgccctaaggcattgcaagtgawcttaggaatcagacaagttgctataggaactattgatattttgaagtttgttttggggggtttttgcacagtttatgtaatattcttaacctagcatagccttattccctagactgttgtgtaataggttttcctgaccagacaaccataacaggtatctttggttattaatacatcatgatccataacaatgtgtgtgtaatcctatgctcagctgttcaaaagaagtgaatttccttgccgagggagcaccaatgccatcacaccagttattttgtttgactgaagagttttaaacctcattttgccaatattattacactgtgggttctggtttaagattgaaatatgagaatcagagattccaatctttggaaacacagttcccgtcttttctgttgaatatctggagttctgtacttggagtacaacttaccatatacacaatgcttttattattattattattattattattattattgaggtggagtcttgctctgtcaccaaggctggagtgcagtggcgtgatcttggctcactgcaacttccgccgcccgggttcaaacaattctcctgtctcagcctcctgagtagctgggactacaggcacatgccaccactcctggctaatttttttttgtatttttagtagagacggggtttcaccrtattggtcaggctggtttcgaactcctgacctgaggtgatccacccacctcggcctcccaaagtgctgggattacaggcgtaagccaccacacccagcctattttttaacctacatttttttcttttttagaaacagggtctcactgtgttgcccaggctggtctcaaactcctgggctcaagcaatcctcctgcctcagtcttccaaagagttgggattctgggcgtgagccactgttcctgactagactacttttttgaatagaaagttggttgaatgttcctgtctacttgccctctgccattttctttgtcctcggggattgcatcagcttttaggctgcccttggagaagagaagagcctcagggcaggacccctgtttaacagaagccctgctgcttccccacagtttcgccatgttccacaaggtcagagttcctcgccagagccttctgaaccggatgggagacgtcacccccgagggcacctatgtcagcccctttaaggtacaggcatggggggccgttcgtgtgccgtgcttcccaggtgccttcctctgcagggcctggctctgtgctcctccctgcacctggaaaggagacccctccacgtaggccaggtgtcgctggggcatacttctcctggctcgggttctggtgctcccnctagaaggrgactcttggggcagccacagcaccaggtgctggtgtccagggggtgagtccgggccttacaatgcccactccccatcgggggctgcgattagaggactgctcgcttccagtgatgcttccctgaggatttgaaggagacgggtctcctggcgaacygtccacaaagggggacgacaaacagagttccccggtgtccagaactcacgcctggcttaagttcacggagagcagaagagagaccgtggtcctggggagcgatggcccaggtcatagctgatgaccctcaggaatcatgagctcacagcaggtgggccaccccgagcatgcacccttggaataacagtccccagcagcatgcagcatctgacatcaggaagcacggatggaaaaggagcatgatggggatgcccagagacacacagggtgcgcagagtgggaacagcaacacgagaccaggagctgctcacaaacrgagatgttaatccaacatcaattaaaaataaatgattggaagaacaggcacagcatttgggataactatctcaggaggatgaattagggattggaagcttgtcctctagaaggcagaaggagaggattaaagaaaatgaaggctgggtgcagtggctcacgcccgtaaccctagcactgtgggaggccaaagtgggcagatcgcttgagcccaggagttccagaccagcctgggcaatatggcaaaaccccgtctctactaaaaatgcaaaaattagccgggcatggtagcgtgtgcctgtggtcygttacttggtgggaggtgggaggatcactagagcccaggaagtcaggctgcagtgagctatgattgcatcactgcactccagcgtgggcaacagagcgagaccctgtctcaaaagagaargaaagaaagaaatgaagtttagagaaataaaggagagaaatgtctctaaatgagaggggaagaaggcttttggttgaagggactcttggaggaccaaagaggaaaagtaaggaagcacctatgcacgtacccagacacacggtagagaaattgaggaatttctaagagaaaattctagaatcttccagatctgactccagtggaataaaaaacacttgaacttcagatttctcaaacatgacagtgaatgcatgaagacagtggaatcatattttatacccttaaaggaaaatcactttaaatatatatttatatatattttttgaggtggagtgttgctctgtcacccaggctgcagtgcaacagcacgatctcagctcactgcaacctctcctctgcctcccgggttcaagtgattctcctgcatcagcctcctgagtagctgggactacaggcacccgccgccaggcctggctaatttgcgtayttttagtagagacggtgtttcaccatgttggccaggctggtcttgaactcctgacctcaggtgatctgcccacctcagcctcccaaagcattgggattacaggcgtgagccgccgcacccggcttaaatayatttttaaacacaacgagactgtgattcctatgtgagagwgtgattaatacgctcagacacacaattaccatgctgccttggaagaaggacctagatggtcagaggagtggcccgatggggcagcacggggcagggcaggaaggacggtcagatyacgtggcaagggctgtagattagatgtgcccaccgcagcctggacaggccttagcaacagcctctgctgacgccgctgatgcgtgcgaggagatagtggacggaagattccagctagacgcacgtaaaggaactgcctgttcacaggcacacaaggatcaagaggtgtccgtgaaaccccctggaawggctgcctgtaatggactccgcccctgccctctggcagtacaggccacatctgattcttgccaaggttaaaggtgggccttggaatctccaggcagatggtttgcaagtccccamagtgggagcaccctyacccagcgctgtcataccattccctctgctaggactgtaccttctccaggcagctgggtgtcccctcccyggcacccccattccatccacggttcatcagtgacatctctacccgcctgccgcaccgtcctgtgtcttgggcgccctggggatggggcctgggcaggtgggcacaggtctactttggatgaacaaaygagggcaccttcgcctctgagccactctgcccaaggtggccgcgcagcyggrcttgagcttatcatctgtgtccctcccgtaggacgtcaggcagcgctttggagcgtccctggggagcctgtcctcgggccgggtctccatcgtgagcctggccatccttaacctaaagctggccgtggccatcgctcttcgcttctcagccactcggcgtcagtttggacccacagaggaggaggaaataccagtgcttgagtatccaatgcaggtatgaggttttcaagcatcctttcactgtctctctattttatatgcaaattcacttcttttacatagttgccgtttggttactgggagttgatcaaagctcttaaggcaattaacaggatgattagttagcgggagtgcggcatctcaggccgcaaggcttccagcaaatggtttttaatttaaaaagagtagatacgaagtagccaaaaaaggaagatggaaagaagcaagtcttttttttttttttttttttttcccagacggagccttgctctgtcaccaaggctggagtgcagtgggcatgatcttggctcactgcaacctccgcctcccaggttcaagtgattctcgtgtctcagcctcccgagtagctgggattatgggcatgcaccaccatgcccggctaatttttgtattgttagtagagacagggttctgctgttttggccaggccggtctcgaactcctgacctccagtgatccacctgcctcagcctcccaaagtgctgggattatgggcatgagtcactgtgcccrgccagaaagaagcaaggatggggcggctctgggaggtgggtgtgtgcacggccgcacgttcaggtgaggccgccacagcttggcgggtagtggccttgcaygccctgtgcacactctttgacactttcatcccatccctaagaaatgattcctggcaggtgatctggaagaagcagcagctgagcgtgcagccctgttcactgtgatggcatttagaacagtggcgtgggcacagagcgttggccctacacgtccccagagatggggcagctgttgacatgcacagatgcagcccaggcagcagcgtggaaaagcacagacattgttacatggaagggggatgaactgtcacagcgaacgtgccctgtgctctgggtttggtcttcacagctaagagggttgggcttagtcccactttacaggtgagagaactgaggatcaaataagaaatccagttaaagtgcacaggctaactcaggcccaggtcccaggccaagctgtgcatgaataaaggtagatttgggtgaaacttccaggaaattgtaacagaattgcagttgtttctktccacatcctttgaccagggctatgagcctgtttagtaagtgttgccattcatgcctgtgtggcacccatcccctcccgtgtgtggtcacagcactctgggtgccaagggcagctcggcggtcaagagagcgcactggggccaccatgcctggccttaccaccaaggtccacccccagctggctgtgtgcccccaggcaaggtccttagcctttctgtgctcttgctttatcatttgtaagttagaactgatgataaaacttcttcctaggatcagtgtgaggattaacaaagttagggcatggaggcagctggcgccatgtctgctcagcactcttgacacgttagaccatggtggtgatggcggtttcctcaggatcctctcaggcttgtcctgccatgtacccagccacccacccacccatccatgcatccccccacctgtccacgcatccccccacctgtccacgcatccacccacccatccatctacccatctacggattcatccatccacccacccacacatccacctacccaccacccaccatccatgcatccatccacccacccacccacccccccatccaacaataggtggaccctatcctgtttcagacaaagtgaaaaagacatgcactcagcctttcgaggggctgccagctctgtgtgggcctcagctttcccatctgtcccagggtgacggcctcatcctcacaggctcatgctgtcagccagtcagtccgtgtgccggggagttggcccctagcagtgctgccttcttaattcacagatagactggcactttgttctgtagtgactttgatgggacagctgtgaatagcggccatttagcgaattgcgtttgagcttgtctgtcaagggctatgggtgaaagccgaactggctgagttgagagcgtgtcagggtgaaggctttctgatgtgccgggaagacatgtgaagaccttcagcgctagkgggwgtgtggccctgacggcctctccctgcactggctttcatggtccctgggatgggctgcccttcatgggaaccacgatgtgttcacgcaggtgtcttgtctgttctagcaatggcgcttgcttccatatctggcagctgtctacgccttagaccatttctccaagtcgctcttcctggacctggtggagctccagcgaggacttgcatcgggagaccgcagcgccagacaggtgaggtggtgtctgcttcctcagcagcatcgtttaaatctcacacggttggagcagcatagattcaaccttcatttcaaagcaaaatcagtcctttgatttgcgaggacagagcattcctccagttgttcccacccactcggagctcttggcctctgccgcgattgaacgggctgggcacgcgtccacacccctgcctctcaaggatgtgctgacacgactcccggttccagtctgtgagttcagctgttggtctccttttgagaacatgacggttttgcaaaatccacgttacccgcccctcagtggatttcatggttctgagccttttgtaaacagctgcacaaaggtctgaatcccactgactggatttgagttgacagtcagaggatttgtgccagaaacgagcgtgcaaatcccgagatcagcctcggcataaagagacatcgggaacggatttctttgtagatgattatgaactgattttccattgtccctcctgctgcctcctgagcaagagtgaaatgtgaatcaaaagaaataaccgtgtttgaaagcagaggagaaacgccacagattgctgttatgtacaacatcagaaaaagcctgtatctaattagcatatcttgaaatattatcggtgtccacattcacggcagatgatggcgaagggatgacctgcaggattgatggcagagcaaaccccaggcctggaggcctgaggagggagcgcttctgaccactaaaggggttaagcctgtgttttccctggagcgtgagtcagtggagcttttgccagctgacacttgcattgttctcctgtgaataatgttgtaaagggtgaccaggctgattctttctgaaactcagtggtttaacccaggcagaggagggcctcagctcagccccttatgtgaagttgaaaacactcataaaatgggtcactggacttagcatgcgtgtgtgtgtgtgtgtgtgtgtgcgtgtgtgtgtgtgtgtgtgtgcgtgtgtgtgtcttcctcttaattgtttttcctttttaattgtctttcttttttaaaattaaaaattcttcttttactctgaatcagtctcttaagtttttgtttgtttgtttgtttgtttgtttttgagacggagtctcgctctgttgcccaggctggagtgcagtggtgcgatcttggctcactgcaatttctgcctcctgggttcaagcaattctcttgcctcagcctcccagactagctgggactacaggtgcccgccaccacacctggctaattttttttatttttcagtagagacagggtgtcaccatgttgcccaggctgttctcagactcctgagctcaactgatctgcccgcctcggcctctcaaagtgctggcattataggcgtgagccactgtgcctggcccagcctcttaagttttcatcattagatatcaagcagaagcaaaggagtcttctttctttttttttyccccttaaaaaaaagcctgcagcacctgstattcccaggcggtctcccatccaaatactaaccacgcccgaccctgcttagcttcacgagatcaggctcattcagggtagtttggccatggacagcaaaggagtctcaataaaacatgttaggcctgagggaggcacggtgagcccccacacagagcagaccatcagttaccgaggcgcttgcagccttctgggaatggactggtcccggcccttccctgtcctgggagcgagcactgtctgcggtgctgagtctggttccctggcctttcttcatggtttcsctgcaaacaattgcaaccttccatggtgtgtcattcactttgacgtttgtgaactttatataaagtgggccatgacgcacattcttctrcagtttgcttctgggacccgtgttagggccctgagagctatttgctgtgtagagctgtgttttcattgttgtgaaatggtatgagcataccacagtgtatccatacttggataaagacccttttttatttctaattacaattaggtttcctcttctgtcattttcgggatgtcttgtattagactagaggtgatatggtggtttgatgctattgctgacttatgactttttggtgtctaaagtctcttttcacctgttcttgttggattccctcacccaaaggcagagcttggacgtgagatccacgccctggcatcggccagcaagcccctggcctcgtggaccacccagcaaggaattcaggaatgycgggaggcgtgtggaggacacggctatctggccagtaggttttggagaagcgcatggtggtttcctgtccttagccctgctgtttgactctagaccaggggtcggcagactgcggcctgaggaccaaatccagcctgccacctgtttttgcaaataaagttttattggaacacagccagccacccccgttcatttgcacatttcctgcagctgttttcgcactgcaagggcagagatgagtaatcgcagctgtgacagagaccatgtggcttacagagctgaaaatatttactctctggtccattgcagaacaagtttgccaacccctgccctagatagatcccactgctttcagatgcctgatgcttcttggccaaaatataggcagagagcagctgatctgctcatttgaattttaactatttggttaacagcttggtagtaaactagcaccatgttttgtttgaatagaaaattcttacacttagataaagagttagttatatcggcattgatgatgactgaggcagctgttatatggttaagagcggaggccaccagcttgcctgggattgagtcctggctccatctaacagcctggtaactgtgggcaggttgcttaacctcactgtgctcagttttcttatttttaaagtgggggtgataatagtgtacccacaacataggttcttgccagaattaagtgaattaccacgtatgaagtgtaagcatggtatctggcatgtagtgcgtgcccaatgacttttttatttgctaatgctgttattattagaattatcatcagcattatttacagcttacctgcaaaacttcccgtgtgctaatcttaaataattaactggcaaaaactggttgctcaaagaaggccatgtacacactcaaaacagccacagcatcagcaaaactctcttgccctccaggagcacttggtccttgccaagtttgtgagagtttttgtgatgctctatctagaactacacacacactttcagcgatcatccgcccaccactgcagttctaactcgcacctgttccagcatgggctgttagcaacgtggcccctcactcccaccacaatctgtctttgtcacttactgacatgcgggtagccatggctgtacacaagttactcatttgcatgctttgtcctctgcgcaatgcccttagtagtttttgtctttgtaactcatcgggattctataaatagttgaataaggaaattgaatcttgcagtactgcagacaacaaagacgatggaatcaagattaatacatatacatatacatatacatatacatatacacatacatatacatatacacatacatatacatatgytgggattgagaccaatatgaccgaggctccatctaggtttagaaaatcaattgcaaatgtttctgctgaggcctctcccagctcttgttcagtggccaacctgttacgtggcaggaagctcgtggcatgatttgacagtaagtcaggagaaaatcaggtgttctaggtgatcacaaggctaatcacaagcgtgttggcagtatggctgcaataggactcctttcatgctctcaggatccatcagtcacagtacgtgagtgtgagaagtcagctccactcccttcctgctaggcccatcccagcctcacattcagagaacactttccatcacagtaggcaggctcaagtgtgtgagggtctggaaagcaagcctgacaacatatgtgaaggcatccagctaactgataggaaagacaaaaaacagttatcttgaaatttcctgtgttaaaagaagagttcattcagttatggacggaagaagggyagccctgggggcatcagctcgctgagatggctccctcctatcagcraccccatgccaggggrggctctgcagggcttgctgacagcagtgaggagctggaggtgggatatgaagcacaggtggcagttctttgtgtctggtcaagctgagttcagggcttttttttttttggtcagagtcttgccctgtcccggaggctggagtacagtggcatgaccatggcttacttttgcctcaaatgcctgggctcttaagcaatcctcccacctcagcctcctgggtagctgggactaaaggtgcgtgccactatgcccagctaatttttttttttcattttttatagagatagggtctcactatgttgcccaggctggtctcaaactcatggctttttttttkttkttkttkttgttgagacagggtcttgctctgtcacccgggctggagtgcagttgcgcaatctcggctcactgcaacctccgcctcccaggctcaagcgattctcctgcctcagcctcccgagtagctgagattacaggcacacaccaccacacctggctatttttgtatttttagtagaggtgggtttcaccatgttggtcaggctggtcttgaacacctggcttcaagtgatccacccgcctcggccccccaaagtgctgccattacaggtgtgagccaccgcacccagcctcttaaggctttttaaattctcacatagtgacaggctgcttctcaaatatgcgtcttaaatgatggtactattgtggctttgttgcagtgaaccggttgggtgtccttagagatgacaacgatcccaactgcacatacgaaggtgacaacaacatcctgctgcagcagacaagcaactatttgctgggtctcctggcacaccaggtccacggtgaggctctgctgcacactggtgggggcgctggaacccaactggggcaggggtgggttctcctggcctcactgattcagctgttctrtgaatgcatcctaggtttgcagaaggaaagaaatgttattagatagtgcygaccaactccccaaggcatgggcaaaggctggggtggggagggtccttgagacccagaccctcgcctgtgggtctgtggccktcgggtcctctggacactctctgtgctttggggtgcccccagcttggggttcccaatggtttgggttccygtcttccaccaaagtcactggaatgtgtgtcctagatggagcttgcttccgcagtccgctgaagtcagtggactttctggacgcctatcccggcatccttraccagaagtttgaggtctccagtgttgccgactgcttggactctgcaggtaaacacacaggtggagggctcccctggcctcctgatttyctgtcattcccaccaggaaacgcaccgtgcctcggtgaggggacccttggcagttccagccggggcagcagtggtggtgggaggccccgcatgcagcttgtcctgggctggctcatggactatctctttgtgcctgacgccgagttaggcgctgactccacagatgaattgaaggatgcccacttgccaccttataccttgcctcttgccttyccctcccataggataaagggcgtgagaggccacctggcctggtctctgtccactaagcagcctctgccccctgccctggtgcctgggctgctgctgtccctgggccctcccagccacctcacctgtcagtcttccccactcccaggccctgctggctccccaaacagcagatgccccttcccgccctggcgcacctcccgcacctccttcactcggcccctgtggcacaggctcatctcctgtgggtgcggtggtcggggtggggcgtcctcccagggccccgcacagagctggccacggacagcctcctgcaggtgtgtcatgggagctgctgyaggctccgcctcacccacacggggtctgtggctcagagaggtgggagcgagagctgggaatgaggcgcctggccgtgctggcagcatcgaaagcaaagcagcttccctgtagactgcgctggatcctgacaggggatccctctccggagagcagctgctctcgcgttcctgggttaattctgcacgtgctcgttatgtgctcactctgcagttctggggctggcggccagcatgatggagaacctgtgcctgccctcatgggactttacagtctagaccagcagacacagaaacatcccaaggcctcagtcttagggcagcaggaattctgcaaagcagtgatcctggctggtgaggtggagcgtggctggtgaccaccttgcaggggccttggcctttgaattgaggtcagtgaaaggcgggggcagccatggggacccccgatggacgggtgtgtcaggaggcggaggcagcagggcccagcccatgccgagctcatctcgatgtgagcatgcatctcgttcccctgctgtgaatgacgggaggtgagcgcaagaggcctggtggaaaggggtgtgctgtttgttttgatgattcatatttttaaaaatgttcctcatgggaaaaggccactctggctgctctgtggaaatggaggtgagaggcggctgggacaggtgagggggtctgccctgcgcccccacacagaagcacccagccgagctctgcgtgtcctacagggcactcctgaaggctcccttggtgccagctgcctgagcgcagggaggggcggagcgaggattcaaacccaagcctgtgggaccgcaaagctcgggatctctcgttactgctcctggatgcttcttgcccagtggtctgggtgcgatttgacagaagagcagggctggagctgcccccacctccrtgccacccgtgtccctgtcaaatgccttcctcccaccacagcccccgtctgtaaagccgcgtatcacagagaacagctcaaagccrcagcaaygcctccatctcgccatcgcctcactcagcagtatttagtgaatgtcttcactttgccaccaaagcacctatttgtgcagaagagaagggccgagaggggtcccgaygccctgtcccggcgggccaggtagaaactgactgctcccgtgacacccgagacgtggaagagtagcccaccttcctgagtgagagagacgtcagctcccgccaggctgccggggttgatcccggtccctcctcctgctggccgtggaacctacaccaagtccctcagccttcctgcctcggtttcctcatctgcagcacggggacggggatggtacccccttcataaggtgtttgtaccgtggactgagttcatgcacgtaaagcacttagtgcagcacttggcgccacatcagtgctcagctcagcagccacagagtttggacaggaaccgccctcgaggtgccacacgttcaactgggcagatagagyggggacttggagatggaggatgctcttggctttgcattcaggagaccagaatgtgaggcttccctggggttctgggaggcccctggatcctcgggaggagggagcactggcctccctcatgcaggggacaggcacacatggaggacgcgttccagccatcaggaccgacgccgtggatgtgatagcagcccccgagcgtgtgtccttgtccgtctccagccctacaggctacttccttgttcacacggcaaagaacaggacaacagccgtggccgaagccggtgtggagcctgggccggtccggcttcccggcgycttcccctgcccgcaccgtcagcatcgtcatcaggaagcgtctgcatcactgcttgctttctcgtggtcactgcgctgggttacagcttctgacggtaactaaccgtgcagatcttagcctgcctttttgggtgccagtgggaaacggggacacgtttgatgacctatttctgatgtttgcaagtcactttctttttttttttttttttgagacggagtctcgctctgtcgcccaggctggagtgcagtggtatgatctcggctcactgcaagctccacctcccaggttctcgccattctcctgcctcagcctccggagtagctgggactacaggagcccacaaccacacccggctaattttttgtatgtttagtagagacggagtttcaccgtgttaggcaggatggtctcgatatcctgacctcgtgatccgcccaccttggcctcccgaagtgctgggatcacaggcatgagccaccacgcccggccgcaagtcactttctaagcttcccaaatgttgccacagaaagaactagaaaatgacctaatcattgtggtaacttcaacccaaccaatacctttttcctaaaaccatcactccttatattaataaaatcaaaacataaatgggacagccagcttctccatgtgcccatcacgctctgctcttccctccccttcccctgagactgaaagcaaaagcaattttacagtctctccatcatcaggaaagacaccaaagtcatctgcttttctgcaactgctctaatatttacaagatgcaacaaagtgaaaacgttttccggagtaacaaaggcaaatggctttcacttgttcaaagtggtatgggagagagaccgccattatccctcacgccgcagggaagcttgtgggttctgccagccccatcgtctcaagggcatttggtcacagatcccaggtctcagggctgactgcagcctgcgtcatgtggatctttggtaaaagctgtttaagtgatgtggggccctcaggctctgcaggactggagagacacaggccccttccggggttgcgcttgcctgtgaggaagggtggaggatttgccaagccaatggcgggtccttcaggggttcgattctgacttgggtaggggaggctgggttttctgttgagttcctctgatttttgcacaggcatttttgcactgagctgagtgtcacagccctgtgccttgggggcctgtgctgttgcttcctgcagtgggccctgttgtttagctggctcgtatgcattcatagtaagcagttgcagtgttcactactcggacacgtgtgtatttgtggactgcaaggtcatgggatgtgggccagaggtgacatagggtcatgtgtgagcagtggggtcacatggggtgagtggtgaggtcacgtggagtgcacagtgaggtcatgtgaggtgagcagtgaggtcacaggtgagcggtggagtcacgtgggggagcggtgaggtcaygtggagtgcatggtgaggtcatrtgaggtgggcagtggggtcatatgaggtgagcagtggggttcgtggtgcagacagtgctcccagagggtgggagcacaggctattgggtcagcactgccccccgctgtgaccttgagctaggctttaatctctctgagcctgttttccttctgcgagacagtggggagggaatgcggtcaccccatgccacctggcaggggccaggccatggtgccctcggtggggggctgctgcrtgtggggggccacagtcctgaacacttccttggaaacaacagatgcaggtgaggtctgccttggtgggtcagggaatgtctcccacaaaactggcacctgagggtgtctcagagggtccgtgcgttgtgcttttggggagcaccggccattcaggagcaccagagcggcgggcatggtcagacccgggcctgtgatctggctgaggagttggggccgctgtccaggccttgctttccagggcttgcctgggtcagaatccgagttaggagtgctctgatgctgacgcagaggggactggacccagagacgggagaggaaaccgagacccgaaaggcaggcagtgcatgcgaagagctcaccatggggtcaaggacagagccccagctggggagggggcagatcgaggggcagtcattgggtgcacagggcggctgggggcaccttcgagagtccttctggtgtgaggcacatggaaaggccgtggtgacccaggattctgggagagtcttgaggacagaggttgttgacgctgggtgtgtcctcaggccgccagcagccgcattccgagcaagagaattcactgcccgtcagtgcccgttttcctgcctagtttgtttcagcgatactttttcacttccamattaactctgaaaatgacacacacaacacccacctttcattgtttgctttcatgtgctttttggggatcttctcccctgcacatgaacacatcagactgacatgatttattttttcacgaaaaaccaagaaccaaaagtagagtgtaaggaaaaaacacagtgcaaacataactcatttctcaagcgtccctctcacttgaagcccacagcacagtctaactggccatcgacgtgaagcctcatggattaattctggttgcagagacagattggaaaactcgggtaactgccgtgaagtgtccaccgcagagggacacctcctggggcagtgtttgggaatggccaggacaggctgggagggaagcccagccatggctgatgcgtggtgggacacgggggcctctggtgtggtcagaaggaatttgcacaagtggtttctggccggaccgtttccttggttttgttgctgtgtaaataagtcgtgggaagcacaactgtacggcgtctacctttccttgctgttcgtgaccatctgccctgctggggagagcttgggatgttgcagagcctttaggaacaggcggtggtcacaagggcctcccctcagcattggttgcaaaatggacctgagttttccagtaaagtcctgaagggtagcatgtgaggctcaaggatgacccctgggcagcctgccagcagcagagagccacggcctgggcactgaagacagcagacagtgactctcttggtgcagaggcagaaaccccaagtcaggatggggcagggctacccgcctccctctcgtggtgggggggcttttcccgcccaggctcctggcagctccaggagttcttggctgtgggtgcatcatgccagcctttgcctcctctgtgactttgctgtctctgcatcttgtaaggacacgtgtcattggatttagaatccatcctagtccaggagtccctgatgacctcacctgaatacctcaacttcatgacatcttcaaagaccctcttcccaacaaaggtcacattcacagctgtgggggtcagttggggccaccattcagcgccccatgcctggcaggacttggcgaggggagccttggctccctgaagatgcctgcatggaggaagcctccgcccaaccctgcctgtgccctgcctgcggggtcagcagcacccgtctttccatcccactccctctggggagctgagacctccggcaagccgcctgacgtgtgagcctgggaaacggcctgctctggtttgtgacgggcttctcagttatgccgtgagggtgaacagatgtaacagccgaaagcagtcgggtgtgctgtggcaggaactgcaacgttgggtattttctttttttttttttttttttttgagacggagtctcgctctgtcgcccaggctggagtgcagtggcgcgatctcggctcactgcaactccgcctcccgggttcacgccattctcctgcctcagcctcccgagtagctgggactacaggcgcctgccactgcgcccggctaattttttgtatttttagtagagacggggtttcaccgtgttagccaggatggtctcgatctcctgacctcgtgatccgcccgcctctgcctcccaaagtgctgggattacaggtgtgagccactgcgcccagcaacgttgggtattttcttcccagtgacctgggctgtgtgacatagaaggaaatcccaagccccactgagttcagcctttgggctcagactcagtgtggctgatccccattctcctgcctgggatctctgagcaagaccggctgccaggcagaaggcccctgcagcctggaggygcctcgtgtctgggcgccaggccctctgtgcctgggcagggggtgggtgtgagcgtggcctccacatgtgggtggtctgcacccctccctcacatgctcgccatgtacctgggtccctgggcccgtgtcctcatcagtggggtagtagcagtacagcctggtggggtctcaggaccatgcctggtccatacggagtactgtgggaggccagctctggctgtgctgtgsggggccccgcagatgtgggcaccactgccaggggaaggggaggacgaaggggggtctccagctgtcctgcctgacaccccaccccggggcctccctgtctgcaacatctgctccctcctgcccttttgagctttgtggraggggccacgcagggggtgaggccttaggttcccccctcccccaccatgtcagtccccagttccacagctccagcatgcggtgaggtccaagggccaggcagggggaggcgaacggaagcaccccttcctctcgccactgggcgccaccgccggccagttgtcctgctgcccatgcagtcctggctgatgctgtggaggcagcaccacgcttcacacagaccgagcctggtgcgtgcgagaacgtgcagccgtcccactcgggggcccactctagcggcggcaccgtgttcctgtggcctccaggctgctggaacagtgtagaactcaggacagccctgggctgagccaggaagtgcctccagccaggggggccctgggcaggtgccctccctgtgcttcagtttccctacctataaaatcagacccaccccatacacttggttgtcaatgaagacaacctggtacctgcaggatgctggcagtgccttgtccctgggggtgagttgtgacaaatgctgtgttctctattgttactttttctccttctgtttgtcattccgaagtcgccctggcagcatacaagtggctggtttgctacctgctccgagagacttatcaaaaattaaaccaagagaaaagatcaggaagcagtgactttgaagcaaggaacaaatgccaggtamgtatttgttttcaaaattcccttttgtattatttgctcttaattcccnggccgttgtgtccctgggagtttgaacatcctggcaattcaggccccagaccccgagctcccgtgaccttgggcagatgacttgatgactttgctgcttgctcagctcctctgtaacacagggatggcagcacctgtcttgctgggctggggaggtcatggatgttacatttaccgtgcctgacggttcccagcccgtaaaccagagcggtgaagctctgggttgtgagagccttggatgcacagagtggcggagacaccattgcgggcactcagagcactccctcctgactcgtgggagtgatgccagcgccctgcttggttttccacaagttgctctcgccttcccgaggggctggggtggcaatggtgagtgggtcatcgttggccttggaaagcgctttggttctcacacttggacagggctgtctctcatgttccaggaagccacagggaaaaaatagcctgttataaaacaccttgtcatgccaggaaccttccagccctgtcccagcyatctgccctagagcagagcccagcccccaccctgtctagggggcagccggtgggggcagtasggctcccggatgtgtctgtgggtgccatgagcactcttggctggagtgcgccagccctaaccrtagctgtggggagactcaggccatgagtgttgtgcagggaggccgtggatacggagagagctgctgtcaccccttctccctagcgtcggttcatgaggttatgggtcaccttcagtaatgaagcygctatggggacccaggtccacatctgcctgtctctgggaaggcccagcacctcacagcctgctgctggggggcagccccgcccctcaggccagckcctctaggaacctgctagacacacctgccctgggatgaggagagaaggcaggaaggatgggctcctgtcaagctcaaagaaacccagattgggccaggtgcagtggctcacacctgtaatcccagcactttgggaggctgagacgggtggattacaaggtcaggagatcaagaccatcctggctaatacrgtgaaacytggtgtatcctaaaaatacaaaaaattggccaggcatggtgtcatgcgcctgtagtcccagctacttggcaggctgaggcaggagagtcgcttgaacctggaaggyggaggttgcagagagccgagatcgcaccactgcactccagcttgggtgacagagcaagactccatctcaaaaaaaaaaaaaaaaaaggaacccatattgaatttataactgaaaagaaatgaagtcagcaggtggccagggtctgtaaaacttgtagtttagggccatggtgaccaaagcgtgaagtgacccttccagaacaggccgccttgtttacccaccttgggtgatacacagcaggttgggtcattcagaaaccagtggatgcctgtcagcttccactgctccctcctctgcaggccacatcctygcgttaaggtggaataggctgctgcactggctcatgtctgtaatgccagcactttaggaggctgaggcaggaagatcgcttgagcccaggaggttgaggctgcagtaggccgtgatcacatcactgcactccagcacgggcaacagagcaagaccctgtctcagaaaagaaagaaaacatttttttaatggaatagagattctccaaagagttatgaaacaagaaccccagagatggggggcacaaaaggacccccttcctaacaacacctgtgtctcttagaactgcccggtaggtccttagcacccccttccagccccgatctatgctggggacctggcatgtgtgaccccacaacaccccgagtgtgtggctcagctgctgagaaacccctcctcacctgtagcttttccttcgagaacttggtagcagaatttcacggagggctgcggcagaggccaggaggggtcctgggttctgatccggctgagacggtgaccctgggctgagctgtggagctgacagacacccacagacaccagccccaaggccttggagggawaacagttgccagggcagggcttcgtgttccagacctgccccgggtcgcggagcttttaagagcaggggacatttgtgatagctgagagcccttrgggccctgggctgaatgctaagggggcccaggggagacgcagccccttcccctgcaatacggcataccaagaaagcctcagcctagaccagccttttcaggaagatgggaaccggaagctgttaaaaaaaccatcggatttggctgcataaaggttcagcatttctgcattgcaaaagacgctctaaacaaaatcggaagacacacagcagcctgtggaagcccacgtaacatgtcgccgacggagaacacccccaggaaggaaggaattccttcagatagatgccagcctggtcggaaaccagccccagcagccactgacctggagccagggccaggagctgcaggtcaaagccacacttccacaggcatcaggctgggcttgggcagcagcaccgttcatggagagggtgatggctgtgtcctttgggaaggttactgaccatttttgttaaaaatgtgcttactctttgacctggtggagaaaatctattaacttttaaacattttctggctcctgccagtaactgctatccaccatttacccactgtaagcctggcatgcacagaaaggtctttaaaaatgcatttctctcattttttggctgagtgacacctttacatgttcaacagccagtagatacaaaagatgggtggtggcgtccctcctccctacctctagcctgggagtaaaaagatgggcgatggygtccccgcagcctgcctccagcctgggagtaaaaagatgggcggtggcgtccctgcagcctgcttccagcctgggagtaaaaagatgggtggtggcgtccccgcagcctgcctccagcctgggaccaacccctgccacaagggctcgaggtttccttcagggatttgcacatcagaaggyggacaaggacgaggacatttgttctccctgagccacacgctggattctgtacctgggtcatttcacgttgtctactttgggagtgaaggaagttgaggccaagagaaatgcccaaggtcccccagctcgcccgtgccggggccaggattgcacccsggccagctgtcacagagtccaaccctttccccaggctgcatggctgcagtctgaatttggacagtttggggtttgtttttttgcctgaagtatgcattgcctcttaaaatgtacttcaccaaccagagtgtaccagactgggaccctctcctctctcctgtgctgaaggtttacggacagctgaccttagctgcatcgagcctgagaagtgcctgtcacagtcctagctggggacagtttggcagctctggaggggcagctgaggtggtccagaagatccccctagagcagagcccagccccgccctgtctagggggcagctggtgggggcagtggggctcccggatgtgtctgggtgccgtgagcactctcrgctggagtgcgccagccctaaccgtagctgtggggacactttgtccgtgggggagggactgcacctgaggcattactgtccccccgggtcgccagagtccataccgcatgggatgcttcctgggccccagcccaccttggttaatgctgtggtcagctctgctggttgccatggcagacactgtttagggagcccwtccccagagcctgtgtcccccccggtgactgctggccttacgtggacctttcctggaagaacagcgcagtatcatgcaggcaaatcctggggactgagatgccgttgagtacagtagagctgccatcgcaggcgcttcctgtgagagrgccgccctgaccccagcagcaccacgcaggagacaacgctgaggcttggagccatgacgccttttgctcacgcgcagagctgcagagccgagtgacgctgtgtttcaaaactcactggcactcgcgatgcattatttgacagcagcaaggttccaggaggggctgtctttctggcccccgcagcatgtctggcctgtgccatcgctgtatcaagctgtgtcactttcrtggaaaaacactgaagcagtgccgctctaacacagcaactgtgcaggcgacggggagagtggtgcggggcacagggctcrctcagattmggttcaaggacggcctctctgtgcctgggccctgctgggattggcctcatctctgggttcgcagaggacccatggcgagaggagaggccctcgtggtgtgggagcacgttttggggtgtgggcaggattcaatggaattatcgtgttcycgtggacacaggagcagcctacgggggtgcagatgccgtcacccgcttgtttcatggaaggtggaaggaggaagggctgaggcctggagctgcagcaccacacctggcagctcccccacaggcctgtattatcagcctcctgccagaggcctcaggtgggagcctgagggctgccccacctcactcggcagggctctgggaaatttgggtgctagtcctacctagctggggtctgtcaggcagtccctactgccccagagcaagtccagatcctgccaccagccctcactcaccaaaaccaaggcccagagctatagcgcatgtgagatcagaagagggcaggaarccccaaggccccatgctggcatgctccatgctcagacagcagggagcaggacgggccttcctggcaccgacaggacggcccacccaggagtgtgcrgggcccagcgggggtcttgggacaggaccagtcagsctggcatgaagcacagcgggaaaggcgcttctcccggtttctgttttcccgaggctcctgatcccagcagggccctggaggacactggctttgtgactggagaccctgctgccgtgtgcttcaccctgctgtgttctgggaagatttggggcagcgtcatagcagcgtcataggccaggcatgcagccgggtcctcctgcagcagtcagtcccccatacaccatatttcatcacttggctggatttttttttttttaattttaaaagtagcacctgctcatcctaacaagtcaagcaatgcgtgtgttgttttcctaatttaaaaaatctggtaagatgataaatgggagacagggaaagaaaggctaataagtgaagttgatgattatcagcaaatgtttttgatattcattaaaaaagaaaaataacagatgctggcgaggctgtagagaaaagtgacacagatacacggttggtgggaacgcagattcgttcagccaccgtggagggcagcttggcaatttctcagagagctaagagttgcccttccccttgacccagtgatcccattactgggtatacaccccaaagaaaagcaatcatcctgccagccagatacatgtacctgtatgtccatcgcagcgctattcacaatagcaaaaatgtgaaatcaacrcaggtgcccatcagcggtggactgsataaagaaaatggggtacatagacaccatgggataccgtgcagccatcactacgaacagtcatgtcttttgcagcaacatggatgcagctgcacgccattatcctcagcagactaaygcagcaacagaaaatcaaatgctgcatgttcacatgtacaagtgggagctaaacatggggcactcatggacataaagatgggagcggcagagcctgcgggggccttacggcagggggagagggagagaagcctgctttggaggctttggaggacggggtggcagatctttggagaagtgaagtcaattctkagctcagggaggagcctgacaagccccttctccagctcctctgtgtcttcccgtgtggaagaagccaggtcctgggcccttgggggcctcctggtgggcgcccactctgtagccgcagagcatcccgaggccggctccaggctccgtatgcagtgctggtgccaaccccagtcccagacgggagctgagctgagactgaggccttggagggcgtcggtggagccagagcagtcccagctccatcttcataggcctcttccattgygttctggaaacatgtctcgtgctgcgccgcatctgtgctctgcctcaccttatgttactgtcctaggacatgcaygggaacgcagacccgcgttcgtgtttcctgagaacttcctcccccgggaatctgggcggggctgggaccctcacggtcctcacggtgccgtcctgtgttccaggtgtcccacggccgtccgttggcgctggccttcgtggagctcacggtggtccagaggttccacgagcacgtgcaccagccttccgtgccgccctcgctgcgggccgtgctggggcggctcagtgctctgtacgccctgtggtccctgagccgccacgcggccctgctctaccgaggtgaggcttctgactgcgggcttgctgtcctccccagagtcagggcccccgtgttgtatctaggaagctgcttcctgcaccatcgtcctccttccacgggactcactgagcacggcggatggcgctgtggacagatgagaagcccagttccataatgagaagcatatggggcagagcagcgtcagggtggtgccgagaaacccaatttttctttcacttggggttcggttcagagaacacttccagaaggccccctcatgccaggcagcctgccgggctctgcagagagcagaagcccacccmctaggtcccataaggcacagacagacacgagccaggagtgcctagacttgggaatactggaaggcttcctggaggagggggtgctggggctgattcctggaggattggtgggaataggctaaaccaaagtttgtcaackttttgttcgtctttgccccccaggaagctttttaggtggtttttcccaatggctggcacccatgcatctttggtactaggatacactgcatatccattcatgtcctgtgtctctgggcttgtgaagaataagatcctccccaccccaagagccagcgtttaccccctggagggtggtgctgaccccgtggaggccttgacagtgctcaggtgcaccaaggaagggacacaagtgtctgccagagagggcgggcacagggcaggagccccactgctgcctgagaaaaaccctaagtgatgagacacagttctctccagcggaaatcacagcaaacgcagatcccaccacagatgtgctcccgaacgcacaaggccacagccttggacctcttagggccctgccagaaaccacagcggctggaggtgacaccaaggaccaagtccccctgcrgcctctgagtccctgcaggtgcccaccgcccccaactcccctgggtggtcccaggcaccccctcgcccctgcgccccctgccatgcacccctgcttcactctgcccaggagccccttcctcactttctcccgaggaaggaacccgcccagcctccctgaaccccagcaggtatgagcccagcggccacctgtcacctctgagcctgggaccttgcctccctcgctgccgcgggccagagaccatcaatgcctgagtgggaaaagggtctcagaactcggcccctgagcagcacattccttgggtcacatctgggctggggacagcaatgacactgatgtgttcacccaaaacaggcctcctatatggccgatttggaaagtgcactcagggcatgttggtattgggggtggttttggactggacccagcccccatgtgaccgaggctgtgcttgcaggaggatacttctcyggtgagcaggcgggagaagtgttggagagcgccgtcctggctttgtgttcccaggtgagccgtgggtgctgtcgcgttctctacatccatgttacacaaccgcccagagcgacacgcatccccttagcatcacccagaccgacacgcaccgccttagtatcacccagactgacacgcacccccttagcgtcacccagagcctacacgcacccccttacccagaccgacacgcacccccttagcatcacccagagctgacacacaccgccttagcgtcacccatgagccgacacacaccgcctttgcaacccaaacattcacgtgtgttcrgtgtttagtaaaaactgtaggattacaagaaaatatggctacatcagaaatttttgcaaaagaaacctgtyggggcgtctccagatctgcacacacccaggccctctcacacaccttttgcagctactttgagaattctctgagcattcgggggactcagcctccaatttaaatttgtttcctggcagtttccttgtttattatattcttttacctatgtcacccaggaaatcagagggccccaaccccacrttctgatccggcatctctcttccatccggggacagaagctgcagtgctgtgctgtttagcacggcagccgctgggttgggggaaggcggctgtgtgagtgagggtctccgatttcctttcattgcactgattttgaggagccacttgtgctggtgctggtgctgctgcggtgggcagggccactgtgtccgtggagacgtcattccacttttgctgctaggaactggactgagtgctgctgcattttagcacaatgtctcaggtgactgcagacgtggcctttcatctcccctgtcactgctttcacacttgatctgggaccagtggaacgtccctgtgactggctctgagcctctctcgggattcgttgtataaagcccttccctgagcctgcggttccrgagaggggcgtgtctgattgtggcgcacgtatgtggccacatttactcgtcttaacatcgaactggccacagggaggggttttccttggctcctccaagagccaaattttacccccttggggcagtgttgaccccatggaggccttcagagtatgcaggtgcaccaaggaaagcacgggggtctcctcgccagagaggggggcatagcggggaggtgttgttgataaaaagtgtccgggtgtggtggctcattcctgtaatcccagcactttgggaggccaaggcaggaggatcactggaggccaggagttcgagaccagcctgggcaacgtagtgagacttcatctctacaaaaaataattttaaaaaattagccaggcttggtggcacatgcctgtagtcccagctgctcaagaggctgaggtagggtggcttgagcccaggtgttcgaggctgcagtgagccrtaattgcaccatcacactccagcctggacaacagagcaagaccccgtctcaaaaaaatgamagccacaactgatttcccagtgaggctatggccaaggctggatgaccgttgtgtgccactctgtgtgtgcccatccataccactgtcttggggaggccaaggtcagccaggtggagaagttgccagcsatccactagaccagggccagcaaactcagtccaatcctgccgttcacctgagtgtcgtctgtgggtgcctttgtgcttccacggcacagtaggcagttgccmgagaccgtggcccgcaaagccggtaacatctcccacctggacccttacggaacacgtttgtcgggctcagcgcctgtgctctgccgagagcttctctccgggagcagtggcatttgtctgcggcctctgtgctgaggcacgtggaccaggaccaggtggccacgccctgcagagcgcggcgctgaagcgcagaggtgcactcagttcctccattgtggcctttcttactctgtactgactgattgcctttgatccatatcattagcggtgtctcccattcctgggttctatgcagtgtagccacggcatttcatcatattttaaggataatttttgttttgcatcttaagaaaattcttgagagtccactcatataaatttcatgtgtcatattgaagaataatttgtccagtggaatgggagagtaataaaaccaccgccaaccgaggaggcttcatatgcttatggcttttccaagtgctcataaatgccttctctattacatgttttctgracatattttcctttactggaacagcagttgcccagataagccaaggcttagaaackagcctctgaatgcagttgctaattcacgagcttcagggtcgtcacttttaagggccttttctaccttgttgggaagaaacaagccctrgaagtcctgagtgaaaagcagcatggtgagaacattccagtgcacagcaagggcctcgaatccaggccggtgaagagatcacgcatgggcagcagagccgcacgtgccgctcaggtgacccgttgctagtgggtcctggcaaccacacacggggctgttatgctttggtcaccatggaaattcccgggaggtgccaagtgtctgggctttgttttcyaacagctgaaagacgatgcagttgccctggtagacgtgatygctcctcctgactttgttctggactcaccgattggcagagccgacggcgaggtaaagggaggacagggcctcacgggagtgccccaagggttgatgggcatttctgcggagctgagatgctcctgtgggtcaggggtctggtgtcttctggaaagtggtcacacatggaggagcttcttggggagggcccgggacaagtcaggactgtctcactctggtgcttccccatgctggctctgtggttgcaggggacttgcccatcccctgcctgccttttcctcccgagatggggtggtggcactgcccgcctgcacaggcagaggttggaggtccacacactgtgacctctgccctcctcccactccccccggcctccccggtcccaggtcttacccccatctgaccatgctcctggccctgcaggcctcttcccccatccctgtcctggaatccccaggcccctctgtcccctctgaccatccatggttgtcaccggggttactctcccctgccccgctttcccccaaccgcctccctgtggctcctcagctctcctcctgccccccatgttccataatgattccttcatagcagatggggtcaggccgcccccctgagggagcctccaccagcctcctcgactgcctgccacgccccagccccacrcagccactgaatccttccaaggcccttcaccccacgctcccctcctgcccaccagatctagccttactggcctccccgtctgtcgcgccaggcccatgcccaccccagggccttgtgcctgctgctcgggctgcctggagtgccttccattctttcagtataagctgactattgctgccttggagaggccttctctggcctccagctgaggcagtgcccccaggcactgtagtgctgcccttgctggcctcatcactgaccttgtgtctccctcccacctgatgatgccctcgaggagcgatgctcacaggtccactgggtgccttccagcaccccactgcttatggggctgtgtctgtcttctgctagagggactcggcgtgtcaatgctcatgtcccrtgcctgaggtcccctggctgtgagtcacagaggggtttgaccccatccctgccccctggccccgcractgagttatttctgctgaagcacctgctgaagcacctgggtctctgcccaaatggagattgagccttagtgggcaggaccctccctcagtcctcagggaatgctgaagtctgtacatgagcccttaccggcttagccagggagggcccagcgcctggcctcagcgyggcccaggctacacctgggttgggctaggtgtgccaagaggcaggtagtgccaggagccgggtgggcagggcaggaggtgagagttccccgtagtaggagaggcagggatggtcatctctgcagagggcctgctgtcctgcatcggggactgaccactgaccatccccagagcccatacagcccagatgatgactgccgctgagagctgagagccagagaagcccagtgggtttcccagccagggagtggcagagccaggatttgaagagactgtgccctgctgtagggagagaagacttggcgggagccttgggtcctgggggagcgcataggagagggacttgccctacccacctycctgggagaggcagtctccccrggaggtgggggctcaccaggcagacaggcattcgaagggacactggagccagacccgccatggaggacccccaagcacacgggactgtctgccccgtgcaggagaagccggagcggccttgagcgtctacctgctgygccttgctctgcagaggcaggcccgtctctgaggcagggaacgaccaaggaaaggagagaccttgcccatgatggaggggccccctggctctgggttccatagttaaaaccagagccagctggaggtgtcgctggcaggatggtttattaaacgtgcattcctggctgagcatggtggctcacacctgttatcctagcacttwggaaggctgaggcgggcggatccctttagcccaggagtttgagaccagcctaggcaacatactgaaaccccatccataaaaattacaaaaactgaggtgagaggatcccctgagcttggggaggtcgaggctgtggtgggcagtgatcgcgccactgcactccagcctggccaacagggtgagacctcatctcaaaaaaaaaaaaaaaagtgcattccttccagttgcaaggaactggtgtattaaccaggagctgccaggtgagaaattcactataagcgaacaaacagagctgcaggggagttgagaccatccttaaatcaagcccgctgctccaaactgtgaaacataagctggaacctaggccctgtggagcagcagcctgggtctgtgtctgtggagcccagagtagcagagtggggaggaggggttgctaagtgcatttagcgggtgcaggcagaggggtttcttctcaataaaatgggtcagcgtaagctggatrcamaatagaccacctccccaggccctggagatggtctgggctgcccctttccaccctgcacgggtgaagtgtctgctcagctgcccttcgcccttcatttgtacaaccttcctccaagacaggagcgtctctccccatcttcccagtgaggccacttaggctgagagcagtgaagtctgcacctcccgtaggggagtgctggcccggggcaggaccagaggagcagggtgtggtggcccaggtccagaaatcagccagtaagggccactcggcgagggcatcctgctgctggtggccacgtgccacctgtgcggcctgtagcggcctggggtgtgagagcagatttcagagcagcagtcgatgcagccttgcagcatcctgcggtggctgcagttactaagaaacagcgtgtccactgccacgatcagttctttttttttttttttgagataggatctcactctgtcacccaggctggggtgcagtggcataatctcggcccactgcagcctcaacctcctgggctcaagtgatcctcccacctcagcctcccaagtagctagaactacaggtgaactcctccatgcccagttaattttttgcttttttttttttttttttttttttttttttgtaaagatggggtttcgccgtgttgcccaggctggtctcaagctcctgagctccagtgatctgccttcctcagcctcccagagtgcagggattacaggaacgagccacctcacccagccaataatttccaaagaagagggcgaggggkgattttcattataaatgtgttttatagtactttataattgaattgtcctaattgttttctactagaaaaaaaaagaaaatattcatataaatttaaaccattttaaaatttctctaaaaagtgacagagaatttcctgtgcttttttgttattgttgttgttgtttgtttgttttgagacggagttttgctcttgttgcccaggctggagtgcagtggtgcaatctcggctcactgaaacctctacctcccaggttcaagtgattctcctgcctcagccttcygagtagctgggattacaggcatgcaccaccacacctggctaattttgaatttttttttagtagagatggggtttctccatgttggtcaggctgatctaaaactcccgacctcaggtgrtctgcctacctcggcctcccaaaatgctgggattaygggcrtgagccactgtrcccagccgaatttcctgtgtttttaacaaaaactttgaggagttgcatttgcacactcagccrtctaggaatcttttccttcttatttctttgtcttcacttgctgtgtacgtgttgtttgcagctctacaaaaacctctggggcgctgtcctgcaggaaagcaaggtgttggagcgggcatcctggtggccagagttttctgtgaacaaacctgtcataggaagtctgaaatcgaagctctagtgggactggcacacattcagccaagtctaatgaaacgaagggaactaatcagacgtggacctcaacttctgattccagaacacrccggagattgctgctgctttctgagcccgcacctgtgcgcctaaactgctgattggcctcaactgcccaggcggacgggagggaggcacccggccggctggactaatctgggatcgcggtgatttgcagcgtggaaaagaaatkcagatgatcatgtctacctgatgcgcygtgggttttttgataattagaatttcgcacattcagttttcagggttcagctcctttctctaaagtaaacagcccattgtcagggatcttctggtcagacaacctgtgattcatctagattttttaccgagctccacttcattgagaagtcaatgatgccagtctggttctttgtcaactctccctcggctttgtcacataattgaattatgtcataaccttattaatttgcacatagatcatctgaatgtcgtggtttaagacttaaggaggaacatctgtttgattactttcttttgtggaactggaaatttccatcgaggaaatgtttttttaaaaagtctaatgatttgaatgggcaattcagtctccaaccgcccccctccccctgccrccagttatatacaaatcactttattggtaacatgtatgatctgtttgtccctgcagagtctacccagcaagtccttgcacacatgtggcctgtccccatggcgctggccacagcctgactgcagcagaccggggccatcagtgcacgcctcccccggtcactcctgctccctgcagggccatgggcttggctgcccttcccagtgttaggttcccggagcagttctgtctttgcatctgggtcctgcttcttaacctctgatcagctcagggcacggaaggccttcgtcttcagtagcagggagttgggtcactctggtgccccctgacccccgtggccacactcgtatcaccacagcccatcaaacagatgtaacccagcatgtctcaggacggtgccgaaccaaataagaccagttcttatttttccaggtagcccagagaacttttgagcgtctgaagggcatggtccagaatgtttttaaaaactgaatttccagcactggaaatcacttctgaagccattttcatgttagaaaagggtcaggacaccacccccccaccacatcccacccgtctggggctccaggggcatctgaggggtaattagtgacttctttgatgatcacctaccgcctgccagcaccttactgagcactcaggattcatcatctcgtgggacgctcagccaaccgcgtggggtgagctgtgccgtttgctgcatctgcagagaggagactggtcccaataggctggacactgccgcaggcagacagcaggaggtggccgagcgggaccagaagccatgggacctccctggtgcctgagtgccccagcacagggctgagacgcaataggtaggtgctggtatccattgtcactcgaacccaggagcatmcccacctgaattcatcttactctggtttagaagcttccttgggtttaaacaaactcttcgtgggttacatgtgttttgtctatgatactcttcctgctttcagagagaatgggaatgagagtgctcaggcccttgcgaattagatggagcagttccgagtacaaacccagagaacacgtcagtggtgcctgccagtgtcggaggggctcattccccactgaggctgccacccacaggcctcacgggcccggggtccccagccccactgcctgggggtcccagcccaagagcagttgggcctrcgtgggctgtcaactggggtcatgcagatttccaccaggggtccccctcataggatgcctcaggccgtgtgtgtgtggacggctcctttacctagacctgtagcttttctaagcgagaaggaacaggctcccaagtcctctgatgtgcccgcagctagattctaggtggtggccagcctgagttagagtcacggtcactcctgcctcaccaccctccagagcaggccccagctgtccttgtctcccaagtaacagctttgggcatctccggaggggttttcatgttttgccttttttatcacttgggaccttggtttgtggtctcgtccagcctttggtctgaaactacctgtttttctaccagcaggtcacagaagttgttcaaggtcaagggtatgttcaaggtttacagaaaaaaacacatttgacttcggtgtcatatatgacgggttctcatgcaggagagctttgtgatgtcacgatgtcaccatgtcagacacgacaggttctcgtgcaggagagctctgcgatgcctgtggccatgatgtcaccatgtcagacacaacgggttctcgtgcaggagagctttgcgatgccacgatgtcaccatgtcagacacgacgttttcatatccacctgttggaaaggtcctcattcgccaactgtgggagctggcacactttactggcagtgttgacaaaaagccaagctctgtgaaatatttgaagaggtttattctgagccaaatgtgaagactatgacctgtgacacagccctgggaggtcctgagaatagctgcctaagattgctgggttacagcctgattttatacattttaaggggacagaagttagaggcagagaggtcagtcagtacatggagagtgcacattggttcagcccagaaaggtctgaaaacaggcttctaggtataggtgtgttacaggaaaagggaccccatctggaccccaagagagggttcttggatctcatgcaagaaagaattcagggtgaatccatagagtaaagtgaaagcaagtttattaagaaagtaaaggaatagaagaatggctactccatacagcagccccaagggctgctggttgcccatttttatggttatttcttggtgatataataatcaaagggtggattcgtgcctccctgttttagaccttgtagggtaacttcctgacgttgccatggcgtttgtaaactgtcatggcgctggtgggagtgtagcagtgaggacaacgagaggttactctcatggccatcttggttttggtgggttttagccgacttccttactgccacccattttatcagcaaggtctttatgacctgcatcctgtgccgacctcatctcatcctgtgacttaatgccttaagtgtctgggaatgcagcccagtaggtctcagcctcattttacccagctcctattcaagatggagttgctctggttcacatgcctctgacatttctcccctcccttttataagacaacctttaatcctaagggttgcagagggatgaagatccatcttctgtaacttcttcagggtgaatagggtccatgatactcctgcctattaaggtctcttctgttcagggtagagaagagctcagccagaaagccttggaatggtgagagccattcataactcttgagttctcacaaaaggtgatatatgaaagattattaagtgtttaagaaaacattcagtaagcttgtcctatattcctacacaaagagtacaacagcaatataacagaataagcaaagctatcccaagtgaactaaattagaaggctttccatgaactgggcatgttggaactaagctgacatggggctgttagctgattctaatgtgcccagaattagaatactgatccagatgtttacattatccatccctcttgtttcttctgagcagcagccagagatcactggttggttcacaggaataagcagggttagcctaaattgcagaaacaaacttaaaaacaacaatgaaactagaatttaagaagtgtaccatagttcttgaaacataatttctctctctagtttcccattttccatttttactaaaaacaaatcttggtaagactgattttattatacttggcctgattgtttgtataaagtacagcaagaataattatttttcacataagctctttttaaattggctttgatggaactgtgttccatagaaggaatctcagataagacttttttagagccaggccctgccatgggtttgtaccctcaaatacctatgagttgagtaaattcctctcctcttgagcctcaagatagcttggggctactggacctgtcagaaagtgacattcttcatttaccacaggtcaggaaccccatacagggactgtgaagacaaggtatgaggcatttcgccaaggggcttttattggctttacaagtcaagtttgattccttaatgcaaagcatcccattccagttaaagccttggtaaaataaccagtttttccaattgtctcctgttacaaaagaaatcagatgtttattgcacttatgcaaataactatattgccattaaattaagaatactcacaaatagtttccaaattctggagaaaacagagaaatatgctccaaattttgttcacaggagtatattttactcaattgctaaaagctgtacatagctcaaaagaaaagtttccttgactctgaaaaacgaaacaaaggatcagcaacattttaagtaaagttaaaaacattacttcagttttttattggttcagttaatttagttaactcctgttttgcttgatattcatgaacatttcagctctctatgagagttctgaaagtttttcctccattctaatatcacaatttccaaagttattaaaaacctgcgtttaagaacccctgtgagagctccatagttggttataaaccaccttctaaaaaggattaaaacaagataacaattgtctgtggataacaaaatattttagggcagccacaatcaaaaacatgaaatttggttacctttgtggcatgcaatgattttatgtaacaattataattattaataacatacagtaagtcacattagaattagaggattttcccatacttttggaacatataccaataacacatttatacaaataacagcccaaagaaaaccaaacaccatttcacatttgataatgcttcctgagcaatttttgtaccaaataagccaaacgtcactcttgcattagtgcactgttgatgtcaaagccaattaattcttaatgaaatcttatagacaaatgtgttcaaacttaatcagtttggccataaggtaagtttctcataagcctttgataaccctttacacatttttattaaagagcaggtcataggcaggtttttgctcgaagaaaaaacctgttatgcttttattcccatgttcagtttacagaaaaactgaataatacccctttaactttagcccatttgttcacacccagaatttttttacaagattaacttataacaagccttccacaacttgcgtaaaccttcagcttgattctaatttaaaacaatcctttttttttttttttttttttttttttttttgagatagagtctccctctgtcacccaggctggagtgcagtggcatgatctcagctcactgcgagctccgcctcctgggttcacgcctttgtcctgcctcagcctcctgagtagctgggactacaggcgcccacaaccacgcctggctaatttttttttgcatttttagtagagactgggtttcaccgtgttagccaggatggtcttgatctcctgacttcatgatccgcccacctcggcctcccaaactgctgggattacgggcgtgagccaccgcgcccggcctaaaacaattctttaactctttaatctaggtaagaaaaatccacatttccatgtgttcttataatcttttaccaaaagacacatttcacttttcttacacatcttgcatgtaaaactgttttttttagcagtcttaattacatgtgacgatgttaattgttagtgacttttactcttggtgaaaaccttggtaagttggggattctaattgtgtaccaggtgtggaatttagcctaggacacaccaggcagaagtgcagataagggggctgactccagcatagctaggggcgtggctaactccacatgtccctggccttatctagaatctaatgctccagagtaggaaactgaataatttttaaaagtcaggttgggcgcagtggctcacccttgtaatcccagcactttgggaggccaaggcaggtggatcacaaggtcaggagattgagaccatcctggctaacacagtgaaaccctgtatctactaaaaatacaaaaaaattagccaggcgtggtggcgggtgcctgtagtcccacctactcgggaggctgaggcaggagaatggcatgaacccaggaggcggagcttgcaatgagccgagatcgcaccactgccctccagcctgggcaacagagtaaaactctgtctcaaaaaaaaaaaaaaaagtcaaagaagcagtttatgaccttaaagcatttagcaaacttaatatctcacctgcataatttagaccaaatgtttacatgtttgaagatatttttattttgccaataatctttaaaactccttatttcccaaagattacttcagtcacatgaactaaaaggcattacactttttacttttctgacaaaatatttaagcacttatttttaaaccaattagttaaagctctttcattcataaa

SEQ ID NO: 93708 - DNA, 17032 bp, Homo sapiens
aacttcagaaaacagtattttgatggtataccacaaagctaaagatacaaataactatacacaaatacagtactgtagttagtaaatttatttctcacagttatggattaataattctgaagctacttcaattgtactataattgaacaaataagtaaatatattgtgaaaaataaacttgtcagagaaaggagttataaataaggaagggggaggctgggcgtggtggctcatgcctgtaatcctagcacttttggaggctgaggtgggcagatcacgaggtcaggagattggctaacatggtgaaactccgcctctactaaaaatacaaaacattagccaggcatggtggcaggcgcctgtagtcccagctactctggaggctgaggcaggagaatggcgtgaacccgggagatggagcttgcagtgagccgagatggcgccactgcactccagcctgggcgacagaacgagactccatctcaaaaaataaaaataaaaaataaaataataaataagaaatggggaaggttataattacctatatggttttgaacttttttccaaaaaaataattggaggtatcggggccacgcacagtggctcacgcctgtaatcccagctctttgggaagctgaggtgggtggatcacgaggtcaggagatcgagatcatcctggctaacatggtgaaaccccgtctctactaaaaatacaaaaaattagccgagtgtggtggcgggcacctgtagtcccagctactcaggaggctgaggcaggagaatggtgtgaacccaggaggcggagcttgcagtgagcccagatggcaccactgcactctggcctgggcgaaagggtgatactctgtctcaaaaaataataataataataagtttgaagatcttgtggtgcaagaaaggaagtgtttttgcctgagctcaggagattgagaccagcctgggcaatatggcaaaacctcttctctaataaaaatacaaaaaatcagccgagcatggtgacacatgcctgtagtcccagctattccggaggctgaggcacgagcattgcttgaacccaggaggtggaggctgcagtgagctgagatcacgccactgaactccaactgcctgggcaacagagcaagactctatctcattaaaaaaaaaaaaaaaaaagatgagaacatgttaagacaacataggtgtaaacttaaaggaactcttcatggccaagatggaacaatttgagttagaaaataaatagcatagaaaataagcccctactaatataaatggttgaatacacaactagaaggaaaagttttgcccacagtagaattcaaattcttcatataaaaagaatgaggaaaccaggaaaacaccagtaataattgctacagccaagaacttttgattgatgctgaaatggctacaattagtgagtggaaggaggtattgagaggtgacaccctgctggcagcccttgcagccctcgcttgctctcggcgcctcctctgcctgggctcccactttggcagcacttgaggagcccttcagcccaccactgcaccgtgggagccccttcctgggctggcagaggctggatcctgctccctcagcttgcggcgaggtgtggagggaggggcgcgggcaggaaccagggctgcgcgcagcgcttgcaggccagcgcaagttccgggtgggcgtgggctcagtgggccctgcactcggagaggccagcctgccctgccggccccaggcagtgaggggcttagcacctgggccagcagctgctgtgctcgacttcttgccgggccttagctgcctccccgaggggcagggctggggacctacagccggccatgcctgagcctcccctctccgccgccgtgggytcctgcgcggcccgagcctcccccacgagcgccatcccctgctccatggcgcccagtcccattgaccacccaagggctgaggagtgtggcacacagcgcagcacttgcaggcagctccacctgcggcaggtgcgggatccactgggtgaagctggctgggctcctgagtctggtggggacttggagaacctttatgtctagctaagggattgtaaatacaccaatcggcactccgtatctagctcaaggtttgtaaacacaccaatcaacaccctgtgtctagctcagggtttgtgaatgcacgaatcgacactctgtatctacctactctggtggggacttggagaacctttgtgtccactgtatctagctaatctagtggggaagtggagaacttttgtgtctagctcagagattgtaaatgcaccaatcagcaccctgtcaaaacggaccaatcagctctctgtaaaacagaccaatcagctctctgtaaaacggaccaatcagcaggatgtgggtggggccagataagggaataaaaggaggctgcggagccaggagtggcaaccggctctggtccccttccagagcatggaggctttgttcttttgctctttgcaataaatcttggtgcagctccctctttgggtctacactgcttttatgagatgtaagactcaccgcaaaggtcggcagcttcactcctgagccagtgagaccacgaacccaccagaaggaagaaactccaaacacatctgaacatcagaaggaacaaactccggacacgccgcctttaagaactgtaacactcactgtgagggaccgcggcttcattcttgaagtcagtgagaccaagaacccaccrattccggtcacagtatggtgagaaaagggacatttgaaccatctcaaagtatctccccacaacatatttattaattacaaaaggaaaaatagtaactttacagtggagaaacccgtcagacaccatcttaaccagtgatcaaaattaacatgagtagtagtgagatataccaatatcatcgagaaggacaccatatcactttgtaacattcttgctaaaaatacataacctcaatctgatcatgagagtgtatcggacaaacccaaaatggatgacattctacaaaagcttgaccagtactatctaacagtatcacagtcataaaaggccaagaaaagtatggagatgtcacagattagcaaaaactaaggagatatgaaaactacatgcaatgtgagagcctggaagaaaaaagacatgagtaggaaaactggtgaaattaaaataatgcctgtagattagttaataacatgaatttcctggtttccatgattgtacaatggctatggaagatgttaacattagggaacctgggtgaagggcattttttctgtaagtaaaaattccacttttgcaatttttttctgtaagtaaaaatttatctcaaaaaaatttttaatgtatgttcacaaaggaacattaggaaacagtagcagaaaaatttcaaccgtaatcctgcaattaaaaacaactgctggccaggcttggtggctcacgcctgtaatcccagcactttgggagtcccaggtgggcagatcatgaggtcaggagatcgagaccatcctggcccacatggtgaaaccccgcctctactaaaaattcaaaaattagctgggcgtggtggcacatgcctgtagtcccagctactccggaggctgaggcaggagaatctcttgaacctgggaggcggaggttgcagtgagccgagatctcacaactgcactccagcctggcgacaaagcgagactccgtctcaaaaaaaaaaaaaaacgaaaacaacaacaacaacaaaaacctgcttatgcagatattgatttggcaaaagaaaaaaacttgtcaatatgctgattcttttagttattaataatgcaaggaaagtgttctgagcactgactaagctcaaagcacctctctttgagcactccaatcttatgtaaaattgccatcctcctactccagatacccctcctccatccctactgtaagaattaaggaaagaggaaagaaacatgaaagctggcttggcagtcaaggacaggtttattttagagaggggcagctgtctgagttaggtcagaggcacacacttacagactaagagtttttaaggattcagggtgggagagtttaacagaggcttggactgcttctgtgtctttttgttgtgcctatctggaagggagagtttctgtgtctgttcccatacatctttctgcagcctcaggcatactccccaagtctgcttttagctttcctatcttagtgcacctgaagggaaaagaatgtgcttattaaggctcactgttttactggggcccattttatgagggtgaagtttggcagttgccagagaaactttccgaacacctccctctctgcccgagctgtcttatctgtgttttatctgtgttttatctgtgttttactgtctactctttctggctgtttgtagtgagaagagaaatgatttccttgaaatgcatgaggctagaaagggagctggaacttaaagtggtggtgtttgtccgagatgacggtgctcctgccctgtcacctactgcctctctccccattgcagtgtcaccacctatcacatgatgtcatttactagtatgtcttttgctgattgtctgtctctttctgcttaagcggaagccctgtgaaagtagaggtttctgtttggcttactgagtccaagggcttggattaggtctgggatggaagatgaacaagaggccaattcatggactttgaattcctgtaaaacagcctgaaatgatgggaaaaggagaggctctatccgacgtcaccagagtccttgagcgttggagtatttctttcaactgaagcctggaccagggctatccagatatacagagagggaggcggttctgcctattggaggaactactgtttccgaaagtgcaatgtttaacaaaggcagtggtctaccccggggggttgagacctctgaaccctgacgtggccataaagccaactgctataggactggcaacccagaataagaagagtgaaggaagccaacagagatccctggaggttgtgttagtttgcttcggctttgtattaggtactttgtggcttacacaacagacattttattgtctaacagttccagtggcagaaatcaaagggcccaacagggttgattccttctgagggctgtgagggagaatctgctccatccctctctcctagcttccagtgttttctggtaatctttgccattccttggcttgtagaagcttcaccctgatctctgccttcatctttgtatggccttctcccagtgtgcctgcctgtctccaaatttcccatttttgtaatgacatctgtcatcttggattagggcccatcctagctgccctagtgatctcctcttaactaattatatctgcaatgaccctatttttaaataagatcacattctaaggtaccgggactccaacacaggaactgagagcaggaaggaggaccacagtccaaccccttacacagtcgagcactggaggtaaatggtattctcgagaggaaagctgtttgatggctcttgggatagattaggttatgctccagcaactgcccatctcaattatcatcagcttaatacaacaaaagtctatttctcactcacactaagacccctgtgagctgcaggactttctaggacaactgtcttccgtgccatgattctacaccccagattgctttcatcttctggttctaccagtggggcagggaagggctggggagttgcatctcatagtccccttgctggagaaacctggaagtgacccttcataccagtgctcatgttttaccagtcagcagcagggccctaggtctccatccctgcaaggggctctagagtgtagggaacagatggaatgttcacaagcaccacagcccctgccacagtgacttttttaggactggtatcgcagagtgtttacttaaggcggtggaagctaaattcttagcatgtgctggagagcaatgaaaaagatatttactttatgaattaaagctggagtcagtgtcagcccgaaggctgaaggaaaaagagcaacagatccagggagcattcacctgccctgtctccaaacaggtgaggatggggaataaagtgaaggcagtgctttggtgggaacttcaaggatagcctctggctttttccaggtttagaagctcatatgagacaggggtggaggaaaagaagaaagaagaataagaagagaaagttgaggccctggcccaagttagtgggaagggaaatccacccccattaaactctctccctggtggactgtggggtgcacacgtgaggcctgcacaggtgctggaacatggtagaggcccaggacatacttcctgtgaatgaatgattgagcggctgaatgaatgagtaccactaaaagccctcttttctattcccaaatgccacattgagcagaagggagcaatccttgctcagcaattggtagtccctttgggtgtgcaaatgagtccacagcctgcaacagcagacagtctctgccccccttagaggcgattgcagggaggtggctgaccgttgatcacacccagagctggttatgggaatttactccatggaaagactgcaaaactgcctgaaatgtgttttggcatcagctactgacacgtaaggtttcccaatcctcamctctgtcctgccagctgatgaggggaaggaaagggattacctaggggtatgggcgaccaatcctgagtccaccaactgaccacgcccatccccagccttgtgcctcacctacccccaacctcccagagggagcagctatttaaggggagcaggwgtgcagaacaaacaagacggcctggggatacaactctggagtcctctgagaggtaaagagccagcgaagctgatgtcctgtcaagagcagaattcctgctcattcgctgcctttgagagtggctgtgttgtgcatgcatgtgcatgatttgatatgtatgagagggtgtgtgtgcatgagtgtgttgagtgagtatgtgagtgtagtgtaagagaggatgttggcactatcaggtaaktacgagagtgtgtgtatgtgggcataggtgtgttaacatgtatgtgtttgggaacttgtgtatgtggaaggggttagaaggcctagaagagagaggttgatgctttcattctggaggaaaatactgaggccgagcctccatgggtgccttggagactccaagccttgaatccagtgtggggatatgcaagctatgtctagcgagggacacatcctctgacctcaggaacctcccaggtagttgggaggaacctggttccaacctcccaagaactctcagtctgatgaggtacaggggaggtctcattagtgtatcatggggttctccacaggtctgagggcctgatgtgtgtgaaaccattctgcagagctgggaacgggtcaggaggtggttgtgtgtgtgtgtgtgtgtgtgygtggcattgctggagggcactccttgtgtgctctgagtgtgacagaggaagtcaccctggacttaggttggatgggagagcatgtctgtgtgtctcagagccaccaaggaggagcaggggagcgacggccggggcagaagttgagaccacccagcagaggagctaggccagtccatctgcatttgtcacccaagaactcttaccatgaagaccctcctactgttggcagtgatcatgatctttggtaagagctgaccctgacctctgagcatggggggacagccccagaagggaagcactcttgtcccttagttttctctcccattgcagtgatcctctctcagggggamaaaagaagccatttgggaggaaggagagtagcagagaggggcagagagrgagggcrcagaaccccatgccccatcaccagacaactcccaaatttccttccaggcctactgcaggcccatgggaatttggtgaatttccacagaatgatcaagttsacsacaggaaaggaagccgcactcagttatggcttctayggctgccactgtggcgtgggtggcagaggatcccccaaggatgcaacggatcggtgaggccacctatcyctccctaccctcctagacyctggcccaggcagggctgggagctgcaaagacagtgccggttcctgatgggcrcagaggtctcaggatggcctggctggaaaagcagccggcaygttggaacttctgctctagactgttgcaaagtcactgggtctctgcccagggtccaagggggtgagaccacaggcaccaggcctcctggagctrtgggacaagagccccaacagggtgtctcctcacagctgctgtgtcactcatgactgttgctacaaacgtctggagaaacgtggatgtggcaccaaatttctgagctacaagtttagcaactcggggagcagaatcacctgtggtaagagtcctacctcaccatcgagtggccctcatttgtttagacagtgctggggactgtgctgggcaccaaagatagacacagagggacacagttcctgcttcaggaagctcacggttgagtgggaagccaggaaagtgaaaatccaatgtagtaaagactccagtgggaagtaaacaaacagataaggcattaacacagcctgaggcttgaggaaggctcctggaaggggtgacccctaagctgagtctgaaaggctgtgcagagagtcagggaagaggagggagcattcccagaagaggacacagcatggtcaaaggcactaaagggcactgtaagccattctgtactgcccagcagaaacatgaggaagaggagcagtgctgagccatgatgctggagacataggaaggagctaggtcaatccggccctccaggccgggctgtatttaggttttgccctaaagcaataggatgctattaagcaaaggagctacagggtcagatttgcattttagatgactcactgtggggacagggtcgatggagacaagtggaaggggggcagagaaagctattgccatcatgcaggcaagagggagtaacatcttgacataaaacaatggaggtcaggatgggaaaggtggagaaaaaatcaagatgcatttgagatggaatcagctgaactggtgactgagttgggagggatggggagagggagttgttggatggatatgtggctgcatggatggcacaactgtgataaagaccatgggagcaggtcatggtggagggtggggaggagcagttctatttccagcatgttgagtttaggggcctccagcacccagggaggggtccagcaggcagctgtctatacaaatgcagctcaggggagaaktcaggactgggacacagattcagaagccagcagcagagacctgagaggtgggtgtgatcactcatttgctgtttaaaggcccagaaaggagacagagaagggatggacagagagggagaaggggaactgagcgagaaggtcaaggagtcagtaaggaaatggttagcaagggccaagtgaacagggagtcctccatgaaaagggccaacaaggctcccctggatgttgaggcagaaacgcatgagggactcaggggaagctgtttccatggagtcgggagggcaaagccagattagaccaggtgggggctgatgggaaggcaaataaagacaggaggcaaagacaacattctggagaaagtttggccctgaaggggaggagaggtgggtggcactggaaggctttgcttggtgtccccasacagctgactcatgagtgggatttggaaaaagcgtrgactcctgcccatggcctgagtcctttaagatcagaaattatgtctcccatcatggcctctccatagaggcatgtatcttcagcaggcgttaggtcacaagccacatgatgccaagctgacagtggcttgcataatggggatatgtgactgtcgcataactagaattctggaagagtgcagtgccaggcttggggcagctttccagccatgtcattaagaatccagccttctcctggccttcagctatgccacgtggccagtgtctacacctgggatgtcaagagacaggctgcaggtccaccctcctggcctcatactatggaagaggctttccttttgggcatctctctttttggagggaggaaatagatcgttcccagaagcccccagcagacttccccttgttgctcattggttggaacaaggttacatgatacacaaagaccaatcactgcaaaggaaaaagggatgaccctgcctggcttacaccaatcacaatctattcccagacccccgaggctagggctttgcctcctggacacatctgttagcaagaggaagagattatggctgttaggaaggcctttgagaaagtatcccagtgcctggctgtgtctccaccaggctggaggccagcatcccaagggcaagaattctgtctccccattggtcagaaatatctggagcgcaggtgtttgtctccaactaggagcttctggaggacagggctgtgycttctaccccagggttcccacaagaagccactgaatattaataaactcccatcttgtgtttattttcttatgatttcagcaaaacaggactcctgcagaagtcaactgtgtgagtgtgataaggctgctgccacctgttttgctagaaacaagacgacctacaataaaaagtaccagtactattccaataaacactgyagagggagcacccctcgttgctgagtcccctcttccctggaaaccttccacccagtgctgaatttccctctctcataccctccctccctaccctaaccaakttccttggccatgcagaaagcatccctcacccatcctagaggccaggcaggagcccttctatacccacccagaatgagacatccagcagatttccagccttctactgctctcctccacctcaactccgtgcttaaccaaagaagctgtactcyggggggtctcttctgaataaagcaattagcaaatcawgtatatgtgtgtgtgtatgcattgccctatgcactgttagcatgagaacaaacaggggtaggggttaaaaatacaggctctgagtctggtgtagtgctgtgtgcctgttgtcccagctgctcgggaggctgaggctgaagtgcaaggattgcttgagctcacagaagttcaaggccagcctgggcaacacagggagaccttatctttataaaaacaaaacaaaacaaacgaaaaaaatagcttctggagtcagactggctgtgtcaaatccccgctcccccatctcactaagccttagttctttcatctagatggagataacactggtgcctcctgcatgggcatgtttgagaattagaatgatgacaaatgaaaagctttgggtctgatatgtctgatagctgccatgactactacaagcgaaacccagacatctccctccccttccctaggcaatagcagctcctactggcctgctgggagaaagcaggaaggttggtcttaatctgggaagctgtagtccaagtcttccgcatggaatgctcttctcctgtgttgccagtctagtaaggaggaaatgtggggtgatataatgctggccaccagctggaccctgggggtgttatcccgtcaccagggttggtttcccaggtgtgcaacccctgcagtcccatagcatcctgtgtttggaagggtgccacgcctggtttaatgctgcgctgtggctatctgaaaagtcttactaatctttaatcaagagttccttcccacacttcattttgcactgggctgcccaaatttatttatttttattattttttaatagagatggggtctcgctatgttggccaggcagatctcaaactcctggcctcatgcagtgctcctgccctggcctcccaaagtgttaagattacaggcatgagccactgcacccaacccagtcacacacatagtgtagcgggtcccacctttactgggatgctacttcccctcctgctgttcagggttccgctgggaaattcccacctggaccagctacagccccacctgtttctccaataacacgcatctgggctgctgggtgtggatcccttcacaaaggcaccctgcacaggggacacaggtgggagctgagtttcccacaggagaaggcccctgcacagcccagcaagttctgcattcccccagaggagatgccttcccataatctgtcttcccagaagaagcaccttttctaattctgcaccaaatgtttcatttgctgaaggcggccctggtcatgttcactttcacacatagcaagagaaatgcacattaaaattccactgagatgccatttttatctattacaatgaaaaaaatccagaagtgtgacaacttgatctactagcgaggctgcatggggaaacaggcactttcataggtagctggtgggagggcaaaatgcccacagagggcaaattggcaatatctatcaaaattacaaatgtatttatcctttcactcagtgaccccatttggaaatttaccctatggatgcaggcacacaccacacacccgcacacacacgtgtgcacacacagagtgatgtatgagcaaatttgttcactgcagcattgttctgaattgagctggaaataatccaagagtatgtgtcacgagaactagttaaataaataatgataccaactcaaaaagggacccaatgcatttatattatgagggaagctctctctgctccaatggacaaaggtcttcaggatatggtggtaacagaaaagagcaaagaggagaatagtataaacagtgtgccacaattatgtagcaaaatacatctgttaatatatttgtgttaatatttccagtaacactcaaagatcatgcaagaaattcatcaaaatggctatctttaggggacaaggctggcaagaaatgagtctggcacagatggggtgacagaaagattttttgatacataactttttatattgttttgatttttaaccccatgaatatatttcctattcaaaagaaaattagcatcatcaaacacacacaaacattcctgcgtctaagacagataactaactctcagagacaatatggtctaactcatgggttggcacactatggcctgtggaccacatctatgcactgcctgtttttgtccagcaggcaagataagaatggtttttatgtttttttaatgcttgaaaaacaatcagaagaatctctcatacaaaaatgatatgttaaaatcatattttaatggcaataaagttttctcaaaatacaatcatgctctttgggttgtaaattctcatgctggctttcacgtgacaacagtggaactgaatcattgccacagagaacgtatggtcttttgcgaaagaatttgccaatatccagtataatccagtgcttcttaaaccattcgtggtaatggaccaatttattctttattttttccaactctgtctcaaatcaatacttttgttaaattaaaaatgtacaaaatacaatcccagatgttttattattggatgcaataataaaattactctgtcaaattgtttgaaatttcctaacattctcaatctctgtatgtacctccccaggaaggggaagcagttcacagaccagcatcgccccatgaaccccaattgggaaatactggtcgaatttgaattgaggaaagacaaatgaccttaatcattttttttttgagacagggtctcacactgtcatccaggctggagcgcagtggcgcartcactcactacagcctccatctcctgggctcaagygatcttcccgcctcagcctcccgagtagctgggactacaggtgtgtgccatcacacccagctaaattttttatgttttttttaatgttttgtagagttgcggtctcaccatgttgtctaagttggtcttgaacccctaggctcaaaccaccctcctgcctcagcctcccaaagtgctgggattataggtataagccaccatgtctggaccttaatgattttagaattagcagtttgttttcatcctttgacttagaataagtaccatttattacaatataaacagagtcattttctttccagctaccctcatagactgccagggtgaggttgggaccatattactcctcagtgattcctctttagcttctaaacagaggcggtgaaaagctgcttgaaataaagccttagtcaaatgcttgccaggggctttacctccatcttgatctacggaaaagaaagatctaggaaaagagtatacatctctccctccagtaaagactttgcatttctgggtatttatctaagaatattttcaacatgagtctttgtgtgcaaaattttgaaggccttttattcctgaaagcattttttacaacctcacattgaataacaatttcgaaagatataatatccttggttcattttttttccattcttccttattaccttagaagcattcctccatttcttccaatcccattccaatattgctaataagaagtctgatattaacctgactcatcatctttgattggatatttgctctttccctctggaagcctgtagaatttctctgtgtctttgatgttcttaattttcactgcaatgtgtctagttgacagtttttctttatctggcctttttgtactctgaagtcctttcacttgtctttaatgataggaattttatattcattatttcattgaacatttccttccttctctttttcctgtctctttctgggacttttactatctggaagttagtacatctgtactccatatctctttggatttttttaagagatagagtctcccacccagcgtggtggctcatgcctgtaatcccagcactttgggaggctgaggggggtggatcacctgagatggggagttcaagaccagcctaaccaacatggcaaaaccccgtctctactaaaaatacaaaattagctggatgtggtggcctatgcctataatcccagctactcaggagactgaggcaggagaatcgcttgaacccgtgaggcggaggttgcagcgagccgagatcgtgccattgcactccagcctgggcaacaagagcaaaactccatctcaaaaaaaaacaaaaaacaaaaacaacaaaaaaaaagagatagagtctccctatgttgcccaggctggagtgccgcagctattcacaggtgtgatcccactactgattagcaccgggagtttcgacctgctccatttccaaccttggccagttcacccctctttatgccacttggtggtctcccactcccgcgaagtcatcatattgatgcccaacttagtgcggaacacccgatctgcacagcgcattatagcccaaaactcctgggctcaagcaatgctcctgcatcagcctcccaagtggctgggactacaggcacacaccactgcatctggtttgaattttccttgctattttctctattttctttttattctttttccctaagaagacatctcaatctaagcttctaactctatctgtgacattcttcagctagctattccatttcaatgattatactcttcctaagtaacttttatacttgggatttttttaaataatgatttgttcttgcctgatattgctaacatcttcccttatctacataagtatgtttaacacgcatattttagtttcttgctcatccactctggcaattctgttttagatggtatgtgttgacaagtacatttcatctttctagtgggtgtagtctgggtgtctcaagataaacttggggaaggggaaggggatgagtccaagatatgatgattctcatttgctgccaccccaggcaggtgctcctgctgacagggtttcatcattgaacatctgggaagcagcagccctggcaggwagcagcactccaaagctgttaccggccctccctgagatggggcagggcggaagggggaacagtgcaggatgagatgagggaatgaatggctgagggcacttgagaagcctgcatccatctgggtcaattgcttacccaagcagggctttgggacagccctaacatcatctctaggacttgggcatttcagctgttgctctaagatgaagacgcaaaaggagaaaaagaacaaaacttaaagagcttcctcccaacctacttgctgcttgccaaagcccaccaatccactgctccaaggcacagccaacccctctccccgagaaccacacccagcagccaagatcagattctaacttcctgcaagactctgcagaggttcttctgctatttcatcatccaagattctctctcaggcatgtatctattaggctggttttggcacagggagccggagcctatgctaatttgcaaacttggcagaaaacagggaaatgtatagcacaatatctgtgtaccagtttaaaagcctccacagagagtcaaacaaacactaaacatttttcaagaaaccatatatctaaataaacataggaagaataaattggtagtggagatggaagatcaaggactaaagtgaataaaataaaattggtaccttgcagaaaccaacaataacagagcgtgatgaagtgaagccgtggtgcacacagattaaggcttggtcagttataaaagcacttatcctttcactcagcaaaccacctctggaaatgtaccctatcaatgcatgatacataagcagtatgtaagagacagcgtgagagtgtatcatgtctcatgtgtgtaagagagagagtgaagactcaaacccacagctgtctccatctaagatctggtctttccaccttgacagtcagctgacaggccagccagttgcacctctgggtcctagtttataccattggaccagaatgaaatacccatttctcaattattgccttagcttggctggatgaatgatgatcacagataatccaaaaatcacttatatttcacttttgtcctcagttt

SEQ ID NO: 93709 - DNA, 24275 bp, Homo sapiens
gtacccaggcctgtgaaccactgctccttgaagaagcctagttttaccctgttcacattgctcaccttctgtaggtgctcaaaattcttgctgcctgaacagctgactggtaaagttgggttgctgagagacagattcaggctagaaggtaggtaggattcagtgtcctggggcaggtggctgggcctgggaaaggggatacaaactggcctacctgagttcccagagggtggtgactctcactgtggccccttggggcttctcagtttcatttttagggctcatttccttcgtttgcataacgaacgctcagggaggctgccaggttcccctaagccccctcctgttccttacccactcaggaagtagatatgctgagctggaggtttctgaagctgctgaatcaggaagaaaaagccacgaacccaaggggtatgttggggagggctgggatgccagtgacattggctgctctgatcgccctctctctgggatgcccctgggaggcgatcctcgcactcatcacaggccacgaggcccctctctctaacacacccatgcagcactggtggtgaggaggagcccagggtccaggtcttcggatgatctcctgaccatgggcccagtgtgtagagatgagtccagggaggctagagccaagggacagcattccctccttcccacaggccttggggatagctctggcctgggcagggcttcggggagcttgtgggtagactcactggatttcaccacgtgtctgtttggcctcccagggtttgggctgggctcttccagtttcagcacttggcatttttagcacttggctttctgccttttccgctgggagctccccaagtttgcccaagtagggcctgcttccctgagagctgagctcaggggtccttgggaagaatcactagagttaggggtggccttcttgggccttctactctcaaatggaaaaattctatttcctttggccagtcccaaaaactcatttcctggtagtccccagtctgcattcccccctcccgtccttatctctcattcttcagcctcacctgcttcccaggctccttcagccaccctttccccagtgccctcagcccagcctctgccacccatgccctgtctggccctgtgcctcctccaggatctcccccgtctcctgctgcctccccaggtcccctaggccccaggctttccccattgcctggcattcacacccatcctggggtgacaggtggtggagacagatggggtgggtgggtcataggtggtagtgggtcacttcgcttcccagcctgaccacccctattggcttctggaaggtcagaggcacattgctccttttgagagtggctcccagcctcgtccggctgggcccaaggacacacactggactggctggctgttgccatgggaacctcccagggttaccctgacacaggaatgtctcctcatcctgcctggttctgggccacagatgttcctggccccttcacatgctcacagcaggggtctggtagggacagtgcaggttgcagggtaggggtgtggagggctgttgcctaaatcagacaacaggttcttcccctccccaactcagctgcctgagccacagaagccccttgttaagcacttatctgagttccctgtcccacctctcccaggtctcccttaaggtggccacccatctctttggtaacctttggcacccaggataggtgactgccgctcccaaatggagaacaacagtgaaccccttccccgctcacctgttcttctggctgggcctgttcctggctcacctgttcctgggccaggggggctcccagcccagatcttttctaaccagagctttgacctgagcgagatttgaagtcggaaaccccagagtggcggtctccaccgctgcccacctgtgggccttgggcaagagggctctccttgcttaagggctcagctttctcatcattgaagtggagaccacagactctgctctcagaggctgtcccgagggtgagatgagtcaatgtaagatacatgaaaaggctttgcaagctaaagggcactgaaacagagcagttatttttattgtacttaacctctaagggggaaactgggagccactgggagctactgatatgggaggaaagggtgttggttccccgatgtggcaggagctggcgggaaaagatgctaactagcattcaggtctcaatactgtgctagatgctgtggggccccccaatccttgccccgaggctaattggattagctgcatacaaagcagaattttaatagtactctcttaatggtgccaggagcagtctgccaactgggtgaagaggaagaaaggggtggcctttgagttggatcttgaaagataataggatttcagagatgggagaatgggggaaggtatttcaggctaggcaaaggtgaggcctgaggtaagggtgttatagcctatagctagatggttcacagagggggcaaattctgccactggcagcctgcaggtctgaggggatggctactgtaggaaatgggaggggtgccactaatcctcaccattccccccaccctccacttcctctccagagcagggcccctttgcaggagttctcaccagcatggggcacttaccttcgctcagccccaggggaggcattcagcagaggggagggtcatccattgaggtcatcactgagactctgttcaaaatcaaagggacaggtcatctggctagagcaggataggcagacacctgaagccacatgctgtggagaggaaagtgctagatagctccctttggaaggtccattgcccatgggtcaaacaggctggccatcaatgcttgctcatctggaatgacaggactagtccagaaatagtggcatgaggccagcaaaggaacaggctggctgggcgctgtggctcatgcctgtaattccagcactttgggaggctgagatgggaggttggcttgaggccaggagttcgagaccagcctgggaaacatagcaagaccttatctctactaaaaattaaaaaaaaaaaaaaaagtttaactcagcatggtggcacacacctgtagtcccagctactcagcaggctgaaggtggaaggattgcttgagcccaggacatcaaggctgcagtgagcttatgatccgccactgcacttccagcctgggcacagagtgagaccctgtctcaaaaaaagaaaagaaacaagccatggctgtcatctaggtggatcattaacttttctttcttttttttttttttttttgagatggagtctcgctctgttgttcaggctggagtgcagtggcgtgatctctgatctccgctcactgcaagctccacctcctgggttcacgccattctcctgcctcagcctcccgagtgtagctgggactacaggtgcctgccaccacgcttggctgttttgtttttttttttttgtatttttagtagaaatggggtttcaccgtgttacccaggatggtctcgatctcctgacctcgtgatctgcccgcctcggccttccaaagtgctgggattacaggcatgagccactgcaccgggccacatttaacttttttcccctgggttgtggaaggcaggcagagcatgttatataatgtaaccagttccaccagctagtggacttgggagggaagtgctactttggggagtatttgagcaagtgaccttggagggttgggtggatgagcatgtgagtttgcaggttgagcagcttctggtgatgacaaagcccagggtgtgtccataggagctggcctctgaggaggagaggggggaaaaggctttgaacagccagggccaagggattgagcagcggggtgttggatgggctggccatgaccgtgatgtcaccgaggatgatgacagcaactctgtagaaaaggagactgggagccagtggctgagtctcagaaaatgagaatgaggctgggtgcagtggcttacactggtaatcccggcacttttggaggctgaggccagagaggactgcttgagcccaggaattccagactagcctggccaacatagcaagaccccgtctgcataaagaaacaaaagaaaatgaaaatgaaccaccaggattgctgggctgccagtactgaggaaagcaggagggtagcgcaggcaggtggcatgagccttagaggaaccatagttttccaagaggcaggatgagtaatggtgtggaaattaaaatggggaggaagggaggccatagactcaaagcggatgctgagggatgagggctgggagactaaagcctccacttgagacaccagtaagggacagtggagttcagttgaggcatactaggaagcctagtatgggggaagtttttttttattttttgagacggagtctttttctgttgtccaggctggagcgcagtggtacaatcttggctcactgcaacctctgcctcccaggttcaagtgttctcatgcctcagcctcctgagtagctggattgcaggtgcccgccaccacgtccagctatccagctaatttttgtatttttagtagagatggggtttcaccatgctggccaggctggtctcgaactcctgccctcaggtgatccgccttggcctcccaaagtgcggagattacaggcgtgagcctgggggaagttttctgatcgctcactaggtattcagggagctggatctcagagtcagagagggaggtaaggggcgtgcattgggtcaggtgaggaaagagactccgggagtaagttctgactccttccatgtgactcaggtaaaacaggagatgtggactttccgtggaggcccaaatacatgtttattgaagatgagctggaaaatctgattctgtgttgaatgacgaagtgctaagaataaataacaaccccttacatctggatgatacttgagaacttacaaagtattttattgtaccttgtcatatattttcttcattcctttcttattataaccctgggaagtgggccttatcagtggtaaactcagagtgacttgctaagtgtccaagctgggactgaaaatccactctgtgctgccttctagggcgttgatgagtgcagtgttttctgggttgctgaaaaaaaacaaaaaaaaccccaaaaaacaaaaaaccacctccttaagtctgttctttttgcatctgaccactctcctgtgcctcttttcaacattcaggaaattaatggtttctccctaagtctccacactacactttttctctagtggaggcagtaatgagttgcaggctctgttctgacatgctcagaaaaatgcaggacggcaagtcatagccaaaaacaactcgacgtactcagctggggcaacccgtcacctactgcgggaagaggcagaaccggggatgcagggaaaggacagattattcttatcctgcctctcaaactyctggctgggagccagacttcggatgaaaccaggcaatctcatctagggattcaacgctcccttactattgatgtcacccacgccgtttgcttccgaaaacctttgggccggaggctgcggctagaaaagcaatcaaaggtttctcgccgggcttaaagggccacatcttagtgacgtctcgggttataaaatctgcttgacaatgaaatatcgtgtgcgcgattctgctcctcccccgacatgacgtggccagacacgccgctcgcgtcagggctgccttacgcccccaggaagacccattcccactctggggcgcgcgcagatttgctgtggcacatgtactataacgcacaggcaaaagggcagtttccaaaacgtctccaacgtgatctcactccagagattttttttcctaaagttttagggctgcgcggaagggaacatggggttcacctcaggaaatttcagacgtcacccccctcggaggaaggtagtcgcgtccggttcctccccgggtgtcagttaagcaggccaggctgtgagcgaaggttctgggcggggctggactgttctaagtgagttcgggtgggggagcttcacgaggggaggctgctctgtgaaggaaccgcctttctctccgcgtgtctcacccttttctccccatatctgtttggacatgagctgagggcacggtcgcgggcggtcagccctgttcgcagctacggcgaggaggggcgcgattgytccttgttgccgctccgcttagtggccgcgtccattccgcgcggtgtcccgattttaggggtagggagaagtgtcagcttcaggcatcgcgaggcgtggcggccccatggccccgctgggaggcgccccgcggctggtactgctgttcagcggcaagaggaaatccgggaaggacttcgtgaccgaggcgctgcagagcaggtgtccgtgaggcgggaarggtggaagggggagctctccgcatcacgtgacacgaggagtgcttttgggtgtcacggagtgagctttggagtacgggtcgtccgtttgcaaggcaggaggagcactgggctggggaaggtggaatgccaccattacataaaacagtagtctacacaggcgagcctcaaagaagcaggtgaccacctctccaaagaccttcagctgcaggtctctctgagaagcattaataatggttcctacgaaggcactttctatataccaggcgttggataccagcctgggcaacatggcgagaccccgcctctacgaaaaatccaaaaagtagctgggcgtggtgacgcgtgcytgtggtcccagctattcaggagcctgaggtagaagaatcgcttgagcccgggaggcggaggttgcagtgaggcgagattggccactgcactccagcctgggcgacagagcgagaccctgtcttaaaaaaacaaaacaaaaaaccctcttcacctctttgttaggtactgtgtgccattattagcatctccatttcacaggtgaagaaactgaggctcttaaaaagttaaacaggccgggtgtggtggtcatgtctgtcaccccagcactttgggagacagaggtgcgaggatggcttgagagcccagtagtggagaccagcctgggcaacacagtaagaccctagtctctacaaaaaaatggaaaagttagcctagtgcgatggcgagcacctctagtccaagctactcaggaggctgaggtgggaggatcgcttgaacctkggggctacagtgaattgtaatcatgctactgtcctccagtccttgcagcagagcctgagaccctgtctcgaagtaaaataaaataaaataacatacgaagttaacaacaaaaaacccttgctggtcacaaagtaagtggcaaatccaggattcaaattcagctttgtggttcatgatgggcatctcagcaattaatatataattgaaacaaaaagaaaaaaaacccaaacaaattcaactttatcttgcgccaaggactggtttctttctgttttatctggctgcctccccaaataataataccttttgcacagtgttttctgtcaaagcaagatcttctgtgcaggagcattttgctgagacctgggctaggagagcagaggttggggagaaagtggggctcctctcctcttgaaggccagtgtggtgggggtaccaggaagctgcttttgggtaccacgggggttctatgaaggtgtgggagagcccagagcagaggtcaccacctgaatttttcatcactaagtatctcaccaccttttcctaagttgcatttctcctcacctccaaaccctgacgtcaaatagtggtccgaagcacaggctctggaattagactgctgggatgcaaaccctggctcactgttgattagtgtgtgatcttgtacacatctgtcattcactctgtgcctcatgttttttttttttttttttttttttttttgagacggagtcttgctctgtcacccaggctggagcgcacccaggttgcggctcaccgcaacctctgtctcctgggttcaagcgattttcctgtctcagcctcccgagtagctgggattacaggtgtgtgccaccatgcccagctaacttttgtatttttagtagagacaggtttcaccatgttggccaggctggtctggaactcctgacctcaggtgatctgcctgcctcggcctcccagagtgctgggattacagacgtgaaccaccaccgcacctggcctgcgtctcagttttgtcatctgtaaaatggggatgataatagggtggttgtggggattaaatgagataatgtgtgtgaagggcttagaataattattggcacctagcagaggtgcaggaactaaatgttggctatatttattttaccaatcttggcttcactacttgcagtgttgctttgggggagtcaatcctcctttcacaacctcagcttcctcatctgaaacatgaaaataagaacacttacagccagggcaacatagtgagaccccctctctacraaagataaaaaaaattagctgggtatggtggtgcatgccagtaatcccagatactcaggaggctgaggtgcgaggattgcctgagcccaggagttcaagattgtagtgagctgtgatcataccactgcactctagcctgggtgacagcaagaccctgactcttaaaaaaccaaaccaaaacaaaacaaagaacacttatcgttgggcgcagtggctcacgcctgtaatcctagcactttgagaggccgagaagggtggatcacttgagctcaggagttcgagaccagcctgaccaacatggtaaaacccttctctactaaaaatacaaaaattagtgggacgtggtggcgcsggcctgtagtcccagttacttgggaggctgaggcaggagaatagcttaaacccaggaggtgcaggttgcagtgacctgagattgcaccactgcattccagcctgggctacagagtgagactcagtctcaaaaacagcacttatcttcctgtgcgttaagtgtattgtgagcatctcaaggctaggacaggaagcatgtatcattcacatttgtatcacctagatccaaatatggtacccaataaatggttggttaagccaggaggcagaggttgtggtgagacgagatggtgccactgtactccagcctggacgacagagtgagactctgtctcaaaaaagagaaaaaaagaagggccgtgtgcggtggctcacgtctgtaatcccagcactttgcgaggctgaggcgggcggatcacgagatcaggagtttgagaccagcctggccaacatggcaaaaccccgtctgtactaaaaatacaaaaattagccgggtgtagtggcgggcgcctgtaatcccagctacttgggaggccgaggcaggagaatcgctcaaacctgggaggcggagattgcagtgagccgagatcgcgccattgcactccagcctgggtggtggagcaagactccgtctcaaaaaaaaaaaaaaaaaaaaaggttggttaagtaaattaaataacgaatgagttatttttatttttattttcatttttgagatggattttcactcttgttgcccaggctggagtgcaatggggcgatctcggctcactgcaacttccacctcctgggttcaggtgattctcctgcctcagcctcccgagtagctgggattacaggcatgcgccatcatgtccggctaattttatgcttttagtagagacagggtttcaccgtgttggtcaggctggtctcaaactcctgacctcaggtgatctgctgcctcagccttccaaagtactgggattacaggcgtgagccaccacacctggcttttgtttcagttttttaaatttgcttttcttatttcatttttatgagacagggtctcactctgtctcccaggctggcatacagtggtacaatcatggctcactgtagcctggaactcctgggctcaggaatgctcccacctcagcctctggagtagctgggagtacaggcacatgctgccatgctcagctaatttttaaattttttggtggagatggtatctctgggtcttattgtgttgcccaggctggtcttgaactcctggcctcaagcactcctcctgccttggcctcccaaagtattgggattacaggtgtgagccaccatgcccaaccartgaattaataaatgatatatgttatggtgaccaagtcagtggagacagatacctctggctatgagagaattagtttagggtctgggcaataacctaatccagctagaatattgygcgcctgttcacactgtaattagcactttataggttttacctgttagtttcagggctcttttatattctttagagtttcataataatcctgtgtgggagacagaacagaaagtgttatccccattttctgatgaggaaacaggatcagggacattgagacctaccaaagttacataataccagtagtagaaatgggacttcaacacaggcctcttgactccctttctgggacatggaagctcctggaaattctaggctaactggattctgatctccctgtcctgcagacttggagctgatgtctgtgctgtcctccggctctctggtccactcaaggarcagtatgctcaggtaggtggtgctttgtggcatccggtgtgttgggcggggccggctccaggactttggagctgtggctgctgcctgagtcactggcatgattcccgtcaccactgctggcagggtggtggccagctcttggttttctgtgagtggrcctttcgggggcattttcagcttatatttctttcctaatagcctccctcccttcagagtgagttcaggaaggtgtgcccaggaaaggctgtcgacactcgagttggcagctctgatgctgtgtgattagtaaggacctgcctgtgcctcctcacaccaccctctcactcagctggcctgacacagcccctagaactttgctcctagaaatttagtacaggccgagcacggtggcacatgcctgtaatcccagcactttgggaggccgaggcaggtagattgcttgagtccaggagttagagaccagcctggccaacatggtgaaaccccatctccgtttctttaaaaaaawttttttttaaagtaaacaacaacacacaaaaaagaaatttagtcccagaagttgtcaaaatatatcattaagtgaaaaaaaaaaaaagccaataccaagatrtagaacagtgtgtagagaatgctacatttgtctaaaactgaagaggcactttgtgaccaagaattgtaaaagaattctaaatatatctgctcatatatttggctatttaacaaatatttacagggtgcctgtctcatgttcagcactgtttcaggtgcctgggatgtgttcctgcactgcatgggaaagacaggttagaaaccgtaccattggttgcccccagggaggggacagggtgagagagagattttcgactgtaaattaatgtgtatctttgaattttgaaccacatggattaaaaaaaatagratcgttaaaatagaataaaaaaaataagtcaacaggaactctcagaatcttagacttcagaaagggaacttggaaggcaagatcagcctcccacatggtgaagagccctcttgtcgccacattttgcccttgacctctaggtgcacccttctgggacgtgtgctttggcccctcaattggccagagtgtggtttccggaaccacataaaatgaattgtccccccttctatatgccatctttgcctccatgggaagcattgggtcatctctcaccagctgaacagacctattcatagggtggcagcctgaggaattgtaagaataactaaattaagtgrtttatttttttttctttttgagacaaggtcttgctctgtagcgcaggctggagtgcagtggcgcataatggctcactgcagccttgacctcctgggctcaagtgatcctcccacttgagcttcccaagtagctaggaatacaggtgcatgccactatgcctggctaagtttaaaatttttttttgtagagatgggagtctcattatgttgcccaggctggtctccaactcctgggctcaagtgatcctcccactatggcctcccaaagtgctaggatttgggcaggagctactttacctggcctggttttcaaaaattttaagcaggattctttcccaaatgaaactggatacagaatttctttgtatccaggagacagactgggagcgatgctgcagggtggtggggtggtggtggggggatgggaggaaggaaggggtgaaggggaaggcactgagccttccctagtggggcctaggcacttccaaaggcctcccaggagcactttcaaaactgatcttccaaagttcccagayaggtcttgcttctgtcctactgagtgagactggtggggttgggtggggggcgggaggaagaaggagcaggagtttgcatttttatttatttatttattttatttatatttgagacggagtctcgctctgtcgcccagcctagagtgcagtggcacgatcttggctcactgcaacctccacctcctggggttcaagcagttctactgccttagcctcctgagtagctgggattgcagccatgggtgaccacgcccgggtaattgttttgtatttttagtagagacatggtttcaccatattggtcaggctggtcttgaactcctgaccttgtgatctgcccgcctcggcctcccaaagtgctgggattacaggcgtgagccactgtgcctggccagtttgcatttttaaaagctccatggaagactctgataggccagactgcccttgctctgtgcaagtccagcaccactctatcccccactcccattaaaaaacaaaaccaaaatgaaatgttcatgcattgatttcctaagtcacaagaagaaatataaccaacaagtagaccacaacgctcctggagggaaactggttcaggagcaggaggtggctactgacctcctcttgcagcaaggggagcaggtgggtgatcaagaaattgagagcctgaggggagaaggtcttgttgcagtgagttcatggaggagccagaatctgaacgaggtgatgcttttcagacccctcctatcctggatccctttggatggacccctctgcttggaaaggggagaaaggagttccccagggtggtcagagtaacctctcctgccttgggggtcctctgggtgtgggaggccttgcaagtgcccagagccagatggagtgatgctgtttcagcaaaggcgccaggaatttggggatgggaaggggtaagggggagagaaaggagacacaatctccgtgggatttgggatgggggcaaacaatgctagtgggaggacatggagtgcaggattttttttcccccctcagatttcccactttagttgaaggctaagcctttgcccaggggatgcaaactaatttcagtattagtttaagccagaaataattgggaaggtaaaacttgcaaaagagaaaccacgccacatatttcaaagacaaattgaaacaatttctggattatccccagacctttcttctgtctaccagtgatcgggatttcttagttgctgagactcttgcccttgcagacctttgtcctggctgaaacctcattaatccttgcatcagccctgggggaggcaggtgagggtgagggatggctcttccgctgttttaggagagaccactgaggttgaaaggccggtgacgtagacataatgtcctttgggcaggagcatggcttgaacttccagagactcctggacaccagcacctacaaggaggcctttcggaaggacatgatccgctggggagaggagaaacgccaggctgacccaggcttcttttgcaggaagattgtggagggcatctcccagcccatctgggtaagagggctccatggcagcatgaagaacacctgtttccctagctcttcgctgtgtccatctctctctgtctccactgccaccatcctggcccaagcccccaccatttctggcctggacagtcgcagtagcctccacactggtctctagctgtggctcttgccctctgtggtctattcattacacagtagccagackgaccttttattatttatttatttatttatttatttatttatttatttwtttttgagatggagtctcacacttgtcgcctgggctggagtgcagtggcgcaatcttggctcactgcaacctctgcctcctgggtttaagtgattcttctgcctcagcctcccaagcagctgggactacaggtgtccaccaccacgcctggctaatttttgtatttttagtagagacgggttttcaccatgttggccaggctggtctcgaactcctgacctcaggtgatccacccaccttggcctcccaaaatagtgggattacaggtgtgagccactgcatgcggcccagactgaccttttaaaaacgtgaaccaggtgatgtcactcttctgtttagaatactttggtggcttcccattgtgctcatgaacaaaatgaaaatccttcacatgaacttctgggccttgtgtgatccagtttctgctacttttttagcctccttrctccttrrgctgtagcaacactggccttcttggtcctcaagtcagtcgaactccttctggaatcagggcctttgcacatgcccttccrcctgtctggactgccctttctttctctttscctggttagcttcagctcagttgacatgacacctccacagggaagccttccctaatattcaggtcttaactggtgctccctggcaggtgctcctatagcaccctacccctttttttcctcattcattctggcagtgaatattgagtgtctacttctgccaggtgtggttgcatgttgtggggatatattggtgcaaaagcgcaatgaaatctcttccttcagggagcttacattacagctgagggtggcggggagataggcacagaataaatacagaatatatcaggcagtggtaaatactaaggagtaaaataaagtaggcctaggatatgaggagagatagggaagcgttgctgttttattaagggtgcctgggaaggctacactgatatgatgatgtttgagcaagacctgaaggaaataagggataactgaatggatatttggggaagtagctttccagagagagggaggaggaagtgcagaggcttgagtggtgagtgtgcctggtgtgtctgaggacaagccaggtggccagagtggtggaaggtcaggtcagacttcccagggcggacctttgggagagctgggattttattctgagtgagatggggagtcactacagcgttctaagcagaggagagacatgatctgatttcagattgagaagcctggccatagctgctgtggggaagatgggagcagaagcacaggggccgggtggaggactttcctgtgttttttttttttttttttttttttttttgagacagagtctcactcttgtcaccaaggctggagtgcggtggcgcgatctcagctcactstaccctctgccttgtgggtttaagcgattcttgtgcatcagcctcccgagtagctgggattacaggcatgtgccatcatgcccaactaattttttttgtatttttagtcgagacggtgttttaccatttggcaaaatttgaactcctgacctcaagtgaaccacccacctcggcctcccaaaatgctgggattacaggcatgagccaccatgcctggccaggacctttctgtaacagacaaaatgactatggttggggcgcasaggggagcaaacgtagagtggagagaaggggtcaattttgcgtgtattttgaagagaaaaccaacaggatttgcccttgggttggctgtggggtgtgagagactataccaaggattttgttctgagcaggtggacaaatatagaattatcattttctaagacagggaaggtggggaggaacaggattggagaggaaatcaggagttgagtttcagccgtgttgaggttgagacacttgttgacatacactgtaatcacatggttatttgattactgaatacttgttcagtgtctcccactagactgtaagctctgagagggcaggcacagggtctgttttgcttaccagtctagccttagcacctagcacagtgaccagcgtacagtaggtacttactataatacttgtttaattggattaatgaacttgtcagcagcactgcctgacatgtagtcagcactcagtggtgtatgttcaatgaatgaatgaatccgtgaatagtgagtctagctgctgacatgctcacgatgatgggggggtagagccacaccccacactgccctgggttctgtagtcctcccacctcccctcacttctatcatcctgtcctgttggtcacctgtctgtccctctcctgcagctggtgagtgacacacggagagtgtctgacatccagtggtttcgggaggcctatggggccgtgacgcagacggtccgcgttgtagcgttggagcagagccgacagcagcggggctgggtgttcacgccaggtgagccactctatgtgtagggcacaggaggacacaggctacccaccctgtggtttgtctaccgggcaggcctgggggaagtgaataagggatgataaaggagaatctgaggcctcctgattagggagtagcatggtggacagaatcctgagggtcaaggttcccttggcttaacctaggctatcttctcatggccagtgggctgctttggtggtctggctgggacccacccccatgattcttcacctttgctttccagcccagtaggggctgacagtggtcaggggcaaacctgacaaagctcacttctgtttaacacagtagtggagttagaagttagtagtggagaggaagttctgctgggagcttcagtggtgcaagcccaggacccgctctgtgggcttcagaagcacagctcaggcttccttsctgccctagatcactgtgacttagagcagcagttcagatccaatgggtatgaccactactaatgctgctcatttctggggcactcacatgtccaggcctgtgctaagcattttatatgcactgtctcactttaccatcaaaacagattcagcaggtagatgctgttattagtttacccatggttggatgaggccctggcctgaaaggttaagtctctttcccagggtcacaaagagtgagaggaggagctggcctcctgaccctctgcttctgactccagcacatgctgcctcctgaggggattgagtcagacagatttagggatagaaaaggacacaaccagcttgacagaaaatgaaaacacagtgcccttttgggttgtgtgtggttttagatgacccgattcaccctctgtaggcagtagcaagtgaaggattaagtcaggagggatcagctgagaggcccaggtggctatgggctactgaacctgccatcacagtgtttcaggggtagggaggtgccttctgggtgggtagcccttggctctagggtagcagaggagaggccgggagggcccactccagttggggttagcaggccttgatgcctgctgtctgtctggagggctgaggcctgacctcaccatgcttccttcataggggtggacgatgctgagtcagaatgtggcctggacaacttcggggactttgactgggtcatcgagaaccatggagttgaacagcgcctggaggagcagttggagaacctgatagaatttatccgctccagactttagtcactaggttctaggagtgagctggggcctgctgaggtgggggtggggctgactctgcaaaatgggggtgtcccccgatcctggccgaggtgaggaacagacagggggggtctagattctgagggggttggtggatattgggcaaggcaggaaacctctggagacctcattttctccatggggaagacagccatgctyttcaggaggagactccaagggcaaaggagggtgtcttggctgtgcttgaaggcgaaaccctgccatatccccagtgccagtcccctcagcctgtggtggccttgcatcctgactggatgttytcagccccttgttytgggcaaraacccagagctccccagtgtggatactaataaacctcttggagcacactctcagagctgcttgtctctcatttccttgatgccaagctggcctgggtggggtttagaaggcgttagggtgtcatggtggctggagggtccctgttccacctcccacctggctagaatgtattcttcagaggttgacctatgctgcaccccacaggcaactggcctgtttatgttggaggtgggattgggttgaggcccttaccctctggtatagcgccatgaaaggctgtgatccatagaaagtgccaccagcaagtgccccctccccccgctttttttttttctttgagacagggtcttattctgtcacccaggctggcatgcagtggtgtgatcatagctcattgcagcctgacctcctgggctcaagcaatcctgcctcagcctgccaagtagctgggtctacaggcacacaccactatatttggctaatttttttcatttttagtagagacagggtttcgctatgttgcccaggctggtcttgaactcctgaacttaagcaatgctcccaccttggcctcctaaagtgttgggattacaagtgcgagccattaccatgcctggccctgcccttgtaatttatatagccttttataatttccaaatttcttctagattcttcacagctaccccctgaaatgggcgaggataggattttcatcgcatttagcagatgccaagaactcaaagaagtgaaacaacttctccagggttagagggcttagtaagtgtcagtgctgtgtggaacccaggccacttgactcctgaccaggccccttctgcacattcctatggttgtggtacaaagtcccaaggctccttgctgtccccaggccaagcctaagccctccaactctggccctggcttcgtaatcctcccacaaattctgttctcacagataaggggacagccaaagaaattacactttcagtgtgacccagactgaatcttgtttctgcccagatctcctctgctctgctgccatcatccttgctgggtgccaggcactgggcacataaagatgaacaggtcacaggactgttccttaaggaactcttgacctcagtgagaaatagacaccctccaggtgcccaggaacctgaaggcagtgccaaagacaacttcagttctctgggaaggagggtgggcttccatgacacccaggcctgccgtgcctgggtgagcactgaccccttgtcccaggggcactgccattgctgcttggaaatccctctctggagctgggagcaaatgattgtgaacaatcccagtcatggaaatgtccaaaagtcactggggccaactctgatgaatgtgggaggcaaagtttttgggttacaaaccttaacgagtcataaggtttgtaaagaagtcgattaggggctggggtggggtggctcatgcctataatcccagcactttgggaggcagaggagggtggatcatttgaggtcaggagttcaagaccaacctggccaacatggcaaaaccccatctaccaaaaatacaaaaattagctgggcatggtggcaggtgcctgtaatcccagctactcaggaggctgaggcaggagaattgcttgaacctgggaggcagagatcttgccactgcactccagcctgggcgacagagcgagactatctctgagaaaaaaagaagggcaggaaggacacaatcaaaccagggagaacatagagtccacggggccagctaagaggcttctgcaagattccaagcaagaagtagcacaggctgaaggagagagggtcactggaaagcagatgggttggtggtggcattcaactttgtttctgacccagcccacctgataccgggcatattcccatcagtgaaactggctcactgcctgaaggggagcagaggttccgggcacaggagccctgtcagaacctccgggttggaggtgaggaaacacctactgcatgacatcattacctgcttgattccagcatgtcttctgtagtcctgtctcaccatgcattcaatcacatccacttcctgagcacctgctgtggctctaggagctagggacacagctacaagagagacatgggccctgccatcacggaatttacctttcagaaataatcctagacagggtaggttccacagaacttggggaccgattagccacagcagctggggagatggaggagttcaaacttgtgccagaaaccctgggttttatcgccttccctgaagggggtgtcttcagcatgtgggaatgtggtagtaccttctcagtttggaagccagtgaatccctgccttcgtaggcaatgagggtcaaagctccagatggatgtgaacctatcaagtgtggtactagagtaagagttgatgcagacaggggggtagggactggtgggtctcctgtgccctccgggaggggtgctgccctgctttcttggctctgggtatttagaggagacacaggattatgacttgggagccagtgggtctgtctacctggtgacaggttggtagtgatgccttttaaaataggaagcccagtgtctgccggattcgaagttcataatatttttttttttttttgagatggagtctcgctctgtcacccaggctggagtgcagtggcacaatctcagctcactgcaacctccacctcccaggttcaatgcttcagcctcccgagtagctgggattacaggctcccgccaccacgtccagctaagttttgtatttttggtagagacgaggtttcaccatgttggccaggctgttctcaaacttctgacctcaggtgatccacctgtctcggcctcccaaagtgctgggattacaggcgtgagccactgcgcccagcctcataatttttttttttaagcaaggtcttgcgctgtcatctgggctggagtgcagtggtgcaattacagctcactgcagtctcaacctcctgaccccaggtgatcttcctatctcagcttcttgagtagctgggaccacaggtgtgtaccaccatgccaagctaattaaaaaaattttttttttagtgatggggtctcgctgtgttgcccaggctggttttgaagtcttgggcccaagtgatcctcctgccttggcctctcaaagtgctaggattacaggcatgagccactgcgcccagctcataattttttttaactgatatttccctaaatataaaaaccaagaataaccctcacttttgacactatatgttatgatgagagccttagctgctttttatttcaagacattctccccacttcactgctacaggttgaccatcccgagtccaaaaatctgaaacctgaggtactccgaagtccaaaactttttgagggctgatatgacgcccaaaggaaatgatgagtggagcattttgtattttgtgtttttggatctgggatgcttaactggtaagtataatgcaaatattttaaaataaagatcagaaattcaaaacacttctggtccccagcattttggataagggatactcaacctatagtctttgctcactttgtctgtggttataatctcagagtataaagctacttatttatttttttctttaagacagggtctccctctgtcacccaggctggaatgcagtggcatgattatagcacactgcagcctcaaactcctggactcaagtgatcctcccacctcagcctctggagtagctaggactaaggtacgcgccaccatgcttggctaattttaaattttttttgtagagatgggggtctcactatgttgccagggctggtcttgaacttctagcttcaaacgaagcttccactttggcctcccaaagtgctgggattacaggcatgggccaccatgcctggccaagttatttttaatattatgtgtctgttattttactacttcttctttttttatttattacccacccatgaatgtatgtatatgttattttagtcatgatttgtaacactaacagcctctttaaaaatttattattatatttctaaacaactttattgagctataattaaaatataataactacatatatttaaaatgtacaatttaggtggggtacggtggctcacacttgtaatcccagcactttgggaggctgaggcgggtggatcacttgaggtcaggagttcgagaccagcctggctaacacggtgaaaccccgtctctactagaatacaaaaattagctgggcatggtggtacatgcctgtaatcccagctacttgggtggctgaggcaggagaatcacttgagtcaggaggtagaggttgcagtgagccaagatggcgccactgcactctagcctgggcaacagaataagactccatctcaaaaaaaaaaagtacagtttactgagttttgacatatgtatacatctgtgaaaccacagtacaatcactatggacatattcatcactctcaaacatttcctcatgtccscttgtaattcctcctctcgcctctccctgattccccaccctcacccccaagcaaccactggtctgctttctgtctctatggatgtttatattttcaaggattttgtataaagaataataaaatttggcgagatgcagtggcttacgcctgtaatcccagcactttgagagctcaagggagggcagatcacctgaggtcgggagttcaagactagcctggctaacatggtgaaactccatctctactaaaaattagccaggtgtggtggcgaatgcctgtagtcccagctacgtgggaggctgaggcaggagaatctcttgaaccagggaggcggaggttgcagtgggctgagatcgtgccactgcactccagcctgggtgacagagccagactccatctcaaaaaaaaaaaaagattaataaagttttatacaaagaacagtatatattctttattgtcttgtttcttttcattgagcataattattttgaggttcatccacattattggtggtatcagtagttcattcctttttttttattggtatgtggtatgaatataccacagttgtttaccagttcacctgttgatgaacatttaggttgttcctagtgtttggatatgacaaataaagcaactatatacattgatgtacaacatgtataagtctttgtgtggacatgtgctttcatttctctcaggtaaatatcttttcaacttttttttttaagacggagtttcgctgttgttgcccaggctggagtgcaatggcacaatctcggctcaccgcaacctctgcctcccgggttcacacgattctcctgcctcagtctcctgagtagcttggattacaggcatgtgccaccaagcccagctaattttgtatttttagtagagacagggtttctccatgttggtcaggctggtctcaaactcccaacctcaggtgatccacccgcctcagcctcccaaagtgctgggattacaggcgtgagccaccacacccggccgacttttgtttttgagacagagtcttgctctgtcgcccagactggaatgcagtgacaggatctcagctcactgcaacctccacctcctgggctcaagcgattcttctgcctcagcctcctgagtagctgggactacaggtgcctgccaccatgcccagctactttttgtgttttttcatagagactgggttttgccatgttgcccagggtgatctcgaactcctgggctcaagcaatctgcctgccttagcctcctaaagtgctgggaccacaggcatgagccaccgggcgtggcttaactttatttttggagactgtgtctcattctgttgcttgggatggagtgcagtggcatgatcacggctcactgcagcctcgacccccctgggctcaagtgatcctcccatctcagtctcccgagtagctggtactacaggcataaaccaccatgcctggctaaatttttttgtattttgtagacaaggtgtctccatgttgctcaggctggtctcaaactcttgggctcaagcattc

SEQ ID NO: 93710 - DNA, 45378 bp, Homo sapiens
cagtgatgtcctcaaaggtctagaaaggtggacctgggtatataggatgtctctcgtctccccacagcatagagctgaggttagaaaaagacggatgttttactacatgctgctctttttcactgtggcccagtcctcagaggaaacatgggtttcttattatagaaaagagagagatcagattagatggaaccaaatcccagaacttgattttcaacagattccaaggaactgtgaaccctgataaattccttggccttttttttgtctacttcaaaaattggaaaacaggtgatttggagaatatctttagattttggcagtttgaaaattaaattcagctatctagtaagtcagaaagcagaaagaggtttttttgcttctgacttttattgagatctgtttgcttttttgcattttggacagtaacgctcatatgtggaaagtgcataacaagatgaatgaaagtattagtcaatgggttggtgttttaagacactcaggatcaaaataattgttacttcatttaaaaagtattatcaaaactctctagcatattttaaaacagcagtgttagctctgataactaataatgaccactttctaataatttgatcattttctttagtgaagaactggtggctgaagcacataacctctgcaccctgctagaaaatgccatacaggacactgtgagggaacaagaccagagtttcacggtaacagcttgtgtgagactcctgcgattccatgtcctttctttctatggcaaaatagaagagaaaatggaaatgcaatctggcattatcctcaacctcagtgtttgtttgtttgcttgtttatttgtgacagggtctctctctctcacccaggctggagtgcagtggcatgatcttggctcactgcaacctccgcttcccgggttcaagtgattctcatgcctcagcctcctgagtagctgggactacaggcgtgcgtcaccacattcagctgattttttcagtgtatatttataattttctagtacacattttttattattcataataatagtgatgtctaacaattattgaaggcttacaactacatgtatgcattatcttatttaatccttggaacacttaattccgatgatgaggaagaaggtagcattgttcccagaagcctgtccccacctgcaccattggtactactgctgagtatttgtgtgttgagtgctgggctgggagcaggaaccagccatggccttgtcctcagggccttggagcttagtggtaggtagtactagttatgagaaaactagccaagttacaggtacattaagacaaagcttccattgttgagagaatcctgcatcatttgcttagatctttacatggcctttacctgctaatcacttgctaacctcccctaactttaagcttttggaagaattacaagggataccactgtgaattgcagcctttgctgatgtagtcgcatgtcctcctccagtctgtggacattctatatctcttgctgctctcctcctcctggcatgataatgttttgatcagttcattgcttacttgcatgtctgtgggaggaagaggaagtctcatcaggccaagtcatgtggtgaggctggaaatccataactgagattagctacccacagtgagcatgggagtgagtgctgtgagccacagtggtactgacatcgactttctaattcccacagtcacagaatctcaaggactctgagccaattcaaagaaaagatcctgtacagtttgaatatgtaacttagcttaagagtaccctgcagtcacaagatttattaataaaagggtttggctttttaatttgtatttgtttaatttatttgttttatgcagcctgggtcttgctatgttgcccaggctggtcttgaactcctggcctcaagcgatccgctcgcctctgcctcccaaagtgctgggactataggcatgagccaccatacccagccaataaaggggtttcaatatatttctttttattttttattttttgagatggagtcttgctcttttgcccagggtggagtgcaatggcacgatctcagctcactgcaacccctacctcccaggttcaagtgattctcctgcctcagcctcctgagtagctgggactataggagcttgccaccacgcctggctaattttgtatttttagtagaaatggggtttcaccattttggccaggctggtctcgaactcctgacctcatgatctgcccaccttggcctcccaaagtgttgggattataggcatgagccactgtgcctggctgggttttagtatatttctcaattgtcctgatttcctcctgaagaggaaaaataacctgaaatgtgttggtggctgttgtttttttaacatgtctgttgactttcaggccctagactggagctggttacagacggaagaagaagagcacagctgcctggagcaggcctcatgatgtggggggactcgaccccctgacatggggcagcccatagcaggccttgtgcggtggggggactcgaccccctgacatggggctgcctggagcaggccgcgtgacgtggggctgcctggccgcggctctcacatggtggttcctgctgcactgatggcccaggggtctctggtatccagatggagctctcgcttcctcagcagctgtgactttcacccaggacccaggacgcagccctccgtgggcactgccggcgccttgtctgcacactggaggtcctccattacagaggcccagcgcacatcgctggccccacaaacgttcaggggtacagccatggcagctccttcctctgccgtgagaaaagtgcttggagtacggtttgccacacacgtgactggacagtgtccaattcaaatctttcagggcagagtccgagcagcgcttggtgacagcctgtcctctcctgctctccaaaggccctgctccctgtcctctctcactttacagcttgtgtttcttctggattcagcttctcctaaacagacagtttaattatagttgcggcctggccccatcctcacttcctctttttatttcactgctgctaaaattgtgtttttacctactactttggtggttgtcctcttttcggcaaagttggagcgagtgccaagctctccatctgtggtcctttctgccaagagcgactcatagtaaccaggatgggagagcagctgccttattctgaatcccaaaaattacttgggggtgattgtcacagaggagggacagaaagggtatctgctgaccaccagcctgcctacccatgcccatgtctccattcctgctcaagcgtgtgtgctgggccggggagtccctgtctctcacagcatctagcagtattattaaatggattcattttaaaaatagctcctatattttgtaacatgtctcaaacactcatactgggttccacaatccactgttagaatacctatggttagggcttctgaactaaaataatggaaaattttaacaatttgtatagtgcctggatcattactagtgccataaccctgcttcttcaacatttcacagaacttctcttttatataaaggcaagagcacaaaatgagttcagatgatcacaaacaggtgagttttgttggagaagaaagttggagtaggagactttcacaagtggtttccatggagatagaatgaagcattctgtggtcaagtaagtttagggagctattcatgtttcacttgctttgtggagattcacactatgcactgggaaagtatctgaaaagtcttataataaagaaacaggcttaactttgtgtaagaacactgtttatcaatgtcatttggctatagaaacattttctcctgctgattgtgtgtgtgaaacatgtattaacattccaatgaactagcatttaataaagcacaattttggaaaccctggtaaatgacagtgggaaataacacccgaaaggcaaggacgggcagattggggagggaaaggatgttgggctaagggctgtgagcttatgttacaggcaactgagccactgaagaattttgacgaagaaaatgccaaccaaagcagtcattttaaaagtttatggctgttcagttacaggacaagttgtgaaaagaaagaaaaaaaaatggaaaaaaaaaaagtttatggctgaaacagtgtaattgattaaaaagtgaaaatccaggccgggcgcggtggctcacgcctgtaattccaacactttgggaggctgaggcaggcagatcacctgaggtcgggagttcgagaccagcctgaccaatatggagaaaccccgtctctactaaaaatacaaaagccaggcgtggtgggacatgcctgtaatcccagctactcgggaggctgaggcaggagaatcgcttgaacccgggaggcagaggttgcagtgagccgagatcgtgccattgcactccggcctgcgggacaagagtgaaactctgtctcaaaacaaaaaaatttgtaaaactgatcccacaattccctacatttgtaacttttaaaattcagaggtaaatacatttttatttaaggaggaataattcttcagagcaaaataatctgaatatcacctggaatagagattggacagaaaaaagtgtgaacagggaaaactaggacaagtcatatatgtaaatgagagtataaagagtaaatgagagtggtcactgctcactgcagcttaactaatcagatagttaagttgcaggcataaagtttttttaacttttattcctcaagtaataaattgaggaaaatacaaatatgtacaaaatttttacaaaagctatccataaaagggcaagtagtaatatatagaaaagatctaccagattagtaacaaactacccccattaggaaaatggtaaatgatatgaataggaaattcaaaaaaagaagaattacagatttccaataagcataacttaagatatacactgatattgtaaggaaacacaatcaccacaaccttgctaatcaaagaaactaatgatatttattggaaaataatgggaatttttaatagactgggttagaagactagaagtgtacgtcccaaaatattaatagttcagctgtagggtgagatcactgattttaattttctccttttatacatttttccagatttctctacagcaactacgtatcattttgtaataaattttaatttttcgatgcacaaagcaattgcctggaattgcagttcgatatgaacccaggagttacgcttgtaaaataaactattgctgatgtgacatttccatttctcaagcagactgtaaatttctcagatgtaggtcatcatgttataattagggttccattgctcatgatctagatgaaacacttctccctttcttgtggtctcttcattaatttggtccctaccgcaaaggcagggggattaaaaataaaatatcttttgacactggttggcaggtgtactaacacgtgtgcgggaggattcctgttctcggcatggttcacgccgggctccggcagcgccctagtacgtaaggggctgcactggagtgtggactgcccggtatccttagagaaagttttgacagtgtgacgccagtgtcgcctctaaccacgtacaaaacgcgccatgcattgggtagctattacagtgcacatttttgtgcaggaagctaccccaccagcgcaagtatttcagaatcaagatcgcactcccgtttccccttctagggaaaggattccagataaacactgagaaaacagatttaatatcttaggtcaaaactccaggtcttcccataggaaggcccctgggctgtcattctgaggtgcctatttcccccgcgccgtgtccacgtccacgagtccacgaaccctccgagttctctctcctcacctgccgagggctcgcccctctagccccgcccckccccgcccaggacgcgtgacgtcacaamaagcgccgtgcgccccgccccccatcgggggcaaccattgttccgccggtcgcgccggagctgggttgctcctgctcccgtctccaagtcctggtacctccttcargctgggagagggctctagtccctggttctgaacactctggggttctcgggtgcaggccgccatgagcaaacggaaggcgccgcaggagactctcaacgggggaatcaccgacatgctcacaggttarcaccgggccgggccccgctggctttcttctttccttccagcctcttcccctgccttccttctctcccacaccgacagtccagtgggtagggtaggttccttgcagcgggtcgtcttccgtggggatctccctccggcgcccctggctggttgtsagtcctgccggctacacctgggccatcgcttgggctgcttttggtctggcccttggaggaaacgggtggtcactgtctyttagaggctgccatatccccttccagaaaacagttctcgtttgtttactcgtggttcttgttcacccgagccttctgttgcytttcagaactcgcaaactttgagaagaacgtgagccaagctatccacaagtacaatgcttacaggtgggacagtgcagcattctcgggtagcatacgttctgggataccctgtttagtgtggcaattaacaggactgagggcccagtggatatttggtccatctgcaagagcgggaaaaagcaagaatcgaggctggtaccttactatttcttgaagaatgtgggcagtgcgttataggatcagttcagataagttcccaattctgattgcagatagctgtagcctgatacgtattttgtcatcatcaaacatgaattactagaaatgcggtgtaattttaaccgtaatgaaagacagcggatgaagtccatactgtgaaatatatgtggttcaaggaatcacattttttcttttggttggtctaaagttgatcctgtgggatcctgatcctgatccttgttccttgttcatgggatcctgtccttgttcatctcaccaggggccttatcctattcattctttccacatccacctgcttctactccttagcctatatttatttatttatttatttttatttgagacggggtctcgctgtggtatgatcatggctcattgcagcttcaaccttccagcctcaagtgatcttcccatctcagcctcctgagtggctgggactactacaggcgcacgccaccacacccagctaatttttttttctttctttttttttctttttttttttgtagagaccgggttttgctatgttgcccaggctgatctccaactcctaaactcaaatggtccacacaccttggtctcccagagtgctgggattccaggcatcagcctcggtgtcagctctccttagcctataaatatgtgcaagtccctcagctcttaaaagcaaaaccaaaacaatcttaacttccctctagctagcaccttccctcttttctcactttatggtgaatcttcttgaaaaatcttcattccttgcctggacttcttaatacctaatcatttactcaagaagtcccagtccttgcctggacctaccagtgctctgaaaatccgctcacctacgtctcatcttattggactctctgtggcattcacccctggctcatgctgtgaatatctcttgacttctgtaatggcactctttctggtctttcatctcttcttctgtcttaccttttaatgttggtataggttgagcmtccctaatctgaaaatttgaaatgctctaaaatctggatgattgccgacatgatgacacaagtggaaaattccacatccgatctcatgtagtaggtggcagtcaaaatggtcaaaactttgtttcatgcacaaaattattaaaacgactatataagattaccttcagggtatgtgcgtaaggtgtgtgagaaatatgactgaattttgtatttagacttgtatctcccatatccctaagatatcttattatgtatacgcaaatattccaaaccctgaaaaaaattcaaaatctgaaacaatgctggtcccaggcatttcagataagggatagttaacctgtggttccggggagtctgcctgcccttagccctcttttcttacttctgtagtttccctggcaatcttgccattcttgactttgaaatgccacttatgtcagtgactccaaatctgtgtatcactggacttttttccacatttttagccctatactgtctttatcccaagtcagctcccttcttccattcccactccacacagttcagagctgattgtgctccctcctttccttacttctgtgacttcctctgtaaagtaaaataattgtattatcatccatacatttgatgattcaaaattacagagatattcaactttgtattctatttggatcacagcaggtctcagaaaggaggtgtttagtttgaagaagctcatcgggataagtgagagggccagcagtctagacaaataaaatgtgccaragcattgagacatgaagggtataacgttttctggaagtcagatgttcagtttgcttaacgggtatggtatgagtgggaaataagtctggaaaagcaggtgattccctaccactcctgcatgctcctccctaccccagtagacatttmtgttgattgtggccaaagtattcttttgaaaatagttatctgatcttgtcagtcaaataattaaataatattttctctttaccttgataaaacccaaatacatcatagcatacaaaaggcctttcatctgattcttcttcccttttaggctttgcctcacagtgccaatgacctggaactacttgcctttcctgaaatgatcccctccataaactgtgtttgcctgctcctttacttataaatatgtcttttcagattcatcatcagtcatgtgcttagagagaagttcaaatccaaatataaagggttatttgtgctataacagaatgcaaatccaaggttccaaagactatccagtgtttatgcttttgacttagctgtactgtcacttctcatcagcatcaactctgaattacattttgcattgaaattatagacagaataccgtcagcgagctcccagggtgtatccaatctgtcaccagattaacaaactggatatgtgtggaggtgggcaagaattacaggtcaccgctttatgctgaactgcagtgggaacaattttttttttctgtccataagtttattgtctttatctgaaaaatcctcgtagaaaattgtttggtttagctctcagcagccccctcctgagccgtggggaagcttgccttcttttgagctatgcgatctttcttctgagcaagggacattttgggatggttccacctctttttaacttctttcttgagcttcttttcatagactggattctctcctatagcagcatgagctttcatctccttcatcatgtctgaagttatgctattctttatgtattgagagaactgtttcttgtaagcatctttatcttccattaagtagtgcatgtaatctgcaacattctggcctatgttgtgcttctggtgtaattctgcattgaattccttgctttcagaatcataaccagggaatcatttggtactttgagggatagacaagcctccatccaggtcaccaaaaactttattgccagtggtagttctggcaaggcctgcatccaaatagcaggtgaaagcacctggctgaccatcaatgctttctacattgtaktatcgccagtcacctccacttggccttcatagatcttgtccatgccaaacctattgagaagcctgtgggccagcagcaggccagtacaatatgttgcagcataatttgtcaggccaaccttcacaccatattttggcagttcgtgtgcatatgctgcgcagactatcatatccccctctatacgggcataagcaatctgacaattgatatctctgtttgttatatgaactatcatcctctatttgggtgtgttgtatttatttttatcctgtattaccaagcgtttctgagcatagtaatcagttttaccatcttgtcatctttaagtttcatttggtatctcttaaagtaggccttattcttaacaactttaacaaagtccatcctgtggaacagagacctgcaggcccagcagcactagggggtggaaaggcgggarcaatttttaaaaactgatgtaggggccaggcacagtggctcacgtctgtaatcccaccactttgggatgccaaggcgggtggatggcatgaacccaggagttcaagaccaacctgggcaacatagcaacaycccatctgcattaaaaaaaaataaattgatatagggacataagggaatgcagtttgaaactatgaattttaaaatagctatccaagggctgcgtgtggtggctcatgcctgtaatcctagcactttgggagaccgaggcaggtggatcatttgaggtcaggagttggaaaccagcctggccaacatggtgaagacctgtctctactaaaaatataaaattggctgggcgcagtggctaacgcctgtaatcccagcactttgggaggccaaggcaggcagatcacgaggtcaggagatcgagaccatcctggctaacatggtgaaaccccgtctttactaaaaatgcaaaaaattagccaggcgtggtggcgggtgcctgtagtcccagctactcaggaggctgaggcaggagaatggcatgaacccgggaggcggagcttgcagtgagccgagattgcgccactgcactccagtttgggagacagagcaagactgcgtctcaaaaaaaaaaaaaaaaaaaaaaaatatatatatatatatatatatatatatatatatatatacacacacaaaattagccaggtgtggtagcatacacctgttatcccagctactcaggaggctaaggcaggataattgcttgaacctgggaggcagaggctacagtgagtcaagatggcgccactgcactccagcctgggtgactccatctcaaaaaaaaaagtaacataggtatccataagcagatctggtgtctaataattcamatgtggcacatttttatgaggaagttatgaacaatttctaaaaactagctattttaaaaagggcccaatgatgatttctacttactcccaaagaaagacagctggtctccccatcccttgagtattatgtatacagtttaaatcactttgttactcagcacaaatcaaaacaaatcactttgttactcagtacaaatcatactctttgacgtatagagtttaaattcagttattctcaaatgtggagcttttcaagatactttaaaagttagacgtaggccaggcgtggtggctcacgcctgtaacccagaacttttggaggccaaggtgggcagatcacaaggtcaggagttcgggatgagcctggccaacatggtgaaaccctgtctgtactaaaaatacaaaaaaattagccagatgtggtggcgcatgcctgtaatcccagctactcaggaggctgaggtaggaggattgcttaaacctgggaagcggaggtgacagtgagctgagatcacgccactgcactccagactgggcgacagactgggcgagactccgtctcaaaaaaaaaaaaaaaaaaaaaaagtggccgggagtggtggttcacgcctgtaatcctagctggttcacacctgtaatcctagctttctttgggaggctgaggcgggtggatcacctgaggtcagagtttgagaccagcctggccaacatggagaaaccctgtctctactaaaaatgcaaaaaattagccaggcatggtggcgggtacctataatcccagcaacttgggaagctaaggcaggagaatcgcttgaaccccagaggcggaggttgtggtgagccgagattgcgccattgcactccagcctgggcaacaagagcaaaactccatctcaaaaaaaaaaaaaaagttagacatatattaggtggtctgtcagctcatctgagttttaagttccatatggaggtagaaaattaggccaggcgcagtggctcactcctgtaatccccgcactttgggaggccaaggcaggtggatcacgaggtcaggagatcgagaccatcctggccaacatggtgaaacatcatctccactaaaatacaagaaggcgcgcctgtagtcccagctactcgggaggctgaggcaagggaatcacttgaacccgggaggcggaggttccagtgagctgagatcgcgctgctgcactccagcctggcaacagagggagactgtctcaaaaaaaacaaaaaaaaagaaaattagttatcttggtgaaagcataagcatagatatttgcttgtatatgtattccagtttaagaaaaattaaggccttgatggatttctaattggttttccttttcttctttccttatagaaaagcagcatctgttatagcaaaatacccacacaaaataaagagtggagctgaagctaagaaattggtaagtttagttagcatgttgatcgaagagttcacacgtgtccaaatttggtgggttcccaccaaaccaaacttgcctgtctgaagcagccttgacccacacaggctgatttcactactcctgatttcttggaataacattcatgctgtttcatacacactttttcaagctcaaaatgttttcatttgggagaagatgggttaaaatttttaaaaatatatgtaattacagttttctttctctctgttacaatatatacatgtactcacgttgaatttcaacttgagtgttggtttttaagaagagtgaccaagtggcactagcatatctggtcccacctatttttctctgatccccaggtgtaggaacctatgtgagttagtgggagtgcgtgttccccagagagatcttactaataagcacatgattaagacccttttgttttatggcatttagccctgttctctgtaatttccacgaagccttgtgtactgtgtcacagtttctagagggtcacatgcctcgttaatttgtaatataataccccttatctgaaatgcttgggaacagattattttggattttggattttttttttgaatatttgtatttggttgaatattcctaacccaaaaatccgaaatccaaaatgctccaatgagcatttccttttgagtgtcatgtcagcactcaaaatgcttcagattttggacattctggaatgtggatttttggattagtgatactcaacctgtaatatcactgagaatatcctgagatggtctatctattgacaatcagattgttgtctcatctaaatcttactaaatgattcaaagttccttaaatttaaggaccatatcttattcatcttttgtgaaagatgtcaaattatcatggcttttttgtttgttggttttgagacrgagtctcaccctgttgctcaggctggagtgcagtggcacgatcttgggtcactgcagcctccgcctccagggttcaggtgattctcctgcctcagcctcccgagtagctgggactacaggcatgcgccaccatgcccagctgatttttgtatttttgatagagacagggtttcactgtgttggccaggctggtctcaaactcctgacttcaggtgatccactgccttgagcctcccaaagtgctgggattatagtcgtgagccactgcacccagcctgagatgccttttgagtagtccaggtcctgatagttatcacctccttttgttctttacctattaatgtttcacaaatgtcctctggaatttaagaattaatatttgattatcttttaaccttctcaggagatgagccataattgcccttttttttcttttttctttttttttttttgagacaggattttgctctgtcactcaggctggagtgcagtggtggcataatcacagcttactgctgcagccttgaccctcccagccaagcaatcctcccacctcagcctcctgagtagctgggactacaggcatgctccatcacactcagatattttttttttaatttatttcttttgtagagattggatcttgttatgttgcccaggctagtcttgaactcttgggctcaagtgatcctcctgcctcagcctcccaaagcgctgggattacaagtgtgagccaccatgactggaccataactgccgttatatttttgcccttcagagtcataacattaccataaatcttggacattgtgtgatttagtgacagattgtccacattcaacatgtgccacatcttaaccttgacttcgctactcagtacaaatcatgctctgatatataggctttaaatccttgtggcatagacagttctcagcatcagtatatcctccttaaatagactagccaagtaagttataaatacattagactttaattctgagtttctgtcttggtgaactgacccattgatagtctcaggaactactcctgcttccattcacttcctcttttatccctacagtacttccttttttatgtttattgcaaatagcctgctcatttcttagagaaaaactgaaaagctctgatacacttcatctcaaatctgcgcttatggtatattcctaaaaagaatacaaaggtatccaaaattccttttgcataagactggttgtaaaaatctcatcattattccttttcacaattattgaagaatcacagagttgctatctagcccatttctggaattactcctcagtaattctagaaattattctagaattactcctcagtaattctagaaattattctagaattactcctcagtaattctagaaattattctagaattactcctcagtaattctagaaattattctagaattactcctcagtaattctagaaattattctagaattactcctcagtaattctagaaattattctagattatctaatctattccttcttagtaacggaagtaatagattcttcttagattatctaatctgttacttctcagtaattctagaaatctgaaatttccagaatgagtagtttgtcttttattccttaatgtttggtatagaaagtagcttgggtctgaattgcttgaggtcagtatgttattgagtaaaattattgtagcactatgtgtaaagggaaaaataattaccctttaaaaaaatattgtgatacaggaaatgagcctgagcagtttcctttttctaatctattctgcttcctaaatcttttgttcatttctatctggtaattgctgttttccaaacttgaatatgctttcagtaatttggggacatttattaaacattaaataaattaagaatattgatgagtgaacctaggcctgagaggcagtagagataactggcacacctgttattaagcatgctgaatgtttaactaaaaaggacaggacatttttcaatacacatgaaaaaaagttcaattttactgataccaaagttgcaaattaaacaagacactatatagtgcccatcaaatacatgcagtgtggagaaagatgtgaaaaaaaggaccctcatttactacccatgaaagtgttggttgttacagcctttctgaaggctgctttgtcagaatgtatatatcgtttgacctagcaattccactttgacgtatgtttcctaaggaaggtaatagagatatgtatctactaggattcattaattcataatttttgatcacctgtatgccagtcactagggataaaaaaatgaaaagacaggatctctgctctcccaaaacttagattctagagaagtgctgcccaatacagcaaccacaagccacatttggccattgagttcttgaaacgtggatgttgtgactgaagaatggaattttaaattgtaattaatctaaacttaaattgtcatatgtggctagtgtaccatgttggaatgtgcagttccagagcagcgcttcttagaacaaggtgtctaggccagcagcatcagcgtcccctgagaacttaggcatattcttggccctactccagacatggtgaatgagaaactctagggtgggacttacattctgtgttttaagaagtgcccccatgtgatgctgatgtatgcaggagcttgacaacctctgttctaaaggaagtttatgaatattattatactgtcaaataattggaaacaatctacatgtttacctgtagggtatttgctaattaaattattatgcatttatacaatgatatactgtgtagccataaaacaaaagttaattttaaataagatataattattttctcagagtttcccttttgtcattcatgtaagcattctgtcttcgggagaatttattttcactggggttcaattttctgtgtcctttatttcaaaccttatcacatggtattcatttgtttttcattttctgctttttactttatcttttagtgatttggtaagcattatattcatatgacttttatatttctaattttccatgtagcctggagtaggaacaaaaattgctgaaaagattgatgagtttttagcaactggaaaattacgtaaactggaaaaggtaaaattttaacttgtttacttcattaattatagtatctgcctttatggccactatgtagcgtcattgcagggtgaccaatgtcattcactgtagtgagactcacaggaaatgaggtgagtgaagttgatggctttaactttttgaatgttatttccataaaatgttcacttgttttatgtggcatttaagagactattaacacccgtaatagagttggctcatcgttttcagtactattcagaaaagagattataaactttgactgaaagatcgttatcttttagaatttctttatttctttatttatgtttttgagatggagtcttgctctgtcgcccaggctggagtgcagtggcgcgatctcggctcactgcaagctccgcctcctgggttcatgccattctcctgcctcagcctcctgagtagctgggactacaggcgcccgccaccacacccagctaattttttgcatttttagtagagacggggtttcaccatgttagccagtatggtctcgatctcctgacctcgtgatctgcccgcctcggcctcccaaagtgctgggattacaggcatgagccaccatacccggccatcttttagaatttctatgtttacactcwcccaagcatttttatggttttatttcaccccatgatagtaattatatcacttctgatctgttaagaatagaccttttaaaagtattggataacttagagatgagacatcttcagttactctgttattcacctattactccttaggttacttgtgaataattttgtgtgggtcacccaggcaaatgtaaatagctcttcatgtcttttagcagactggtaygtttccaataagatcatttaagtcctcaaagcattcctaaatcattgttagacttttttttttcttaaagattcggcaggatgatacgagttcatccatcaatttcctgactcgagttagtggcattgggtaagaactattttttaagcagacacaatcgtcagttagtttatttttcctgttagccaaagtaaattacatgctgtttctcaaaacctgtacttcaccacctctgtaccttagccatacagttcacccttccatagcttatgatctgaggccgattcttcagatagtgtctctactgtaaggtccccatccaaggcagatgttacctccttcatgaaaccagtttggttacccaggcagaaagaacctctccctcctctgaactccactaccatttcctccgtgtgcatctatttcctgctccagcttggcctcttttgtttctctgagcatgatatttatcatagcacctcatgaatttggaacaagccctcaagctttttttaaattattttttgagacagggttgctatgttgcccatgctggtcttgaactcctgggcttaagtgattcttcctcctcagcatcccgagtagcttggattataggtgcacgcccccttgcccagcttcaagcatttttaaatgaagggattattatcttaaaatttgagctggtaccaaggtgggcttttttgacactggctgaagtaaagattaacattgaaatattaaggctttagtgctctcatctttatggcatggggcattcctttaaatataatgatttgttctttaaatggcagcattttcggtgaaagttattctaaaacatattaaattcttaaacctagtatgttgaaaatgaaaatgactgcttggggactcaaggccattataaaattttcattggaagaattacaaaaattttttttttttttagagatagtgtcttattctgctatctaggctagagtgcagtggtgctattatagctcactgtaaccttgaactcttggggtaaagtgactctcctgccttagtactccttttgagtagctgagactacaggcttgcgcaaccatgtgtggccaatttttgtatcttttgtagagaagaggtctccctatgttgcctaggctggtcttgaactcctggcctcaagccttcctcccacttaagcctcccagagtgctaggattataggtgtgaaccacaaggtgttttagagagcatctattatcctttttttctaggcaagagaactgaaagttgaatatagaacatgagtaaccatggcagagccagatttgaacccatatcttctgactccgagttcagttctgtttcttctatgctgcattgccttcctaacatcagtatcagtttctatatcacaatataatgtgatgatatttgcatagcttactgaatgatacaggtttatttgtcccgaaacactgtggccccagactattgtgcttgtatgtttatatgtgtgtgtatgcatttctttctgttcaccgctcctgctttattatgctgtaaactggtatggtgagaagagagtcaggaaatctggataatggtctagagctagcaccagctagatttgtgaccttagcaaatcrcttcatctttctaggtttcagtgtccttccttatgaaataagagagaaatttggttaatcagtaagcttccttctgtccccatcctataagagcatcttcagtcatttctgacattctgatttatttatatgaataaagtgatattttagaaacctaaatcagattttatcattgctttgtgcagtgtcctctaatagctttccattgcactcagaataaaatccaaacctatcaccatggctctaaaagcacagtagagtgtaacacctgcgtactgttccatagcacctcataccgtcacttacatcactctatgcatcctagtttttctcttctcttgaacaggccaagctcatgccagccttagggcccttgcactaattgtttccttttcccgaaacgtttttmtctttgatcccctagatagctggttctttagtcattcaaacctcagcttagataccatctcagagaccttctaccactcagtctaaagtaggacccagccattctgtcatattctattttaatttatccatctgattttttcttgtttatgtaactaactattgtctctatctacccacttacattcttattcctgctacattttcagcacccaggaaagtatctgacacataatggccctcagtaaatcttagttcaatgaatgaacagttttcaagtgccatctgtacatgggcactatgacagcagctgcttagacatcctttttatgtctgaattcatagttgtcttcctaatgattgaagcttcaataattcgtacttcggatacagttgaacattaccaaagtagccatgcaacattttagcaggtcttgtttagcttaatagcagctcttcttactattaagacatggttgttacaaggatcccaagtttcacccaatgttgagataatgcttttgtttttgtagtccatctgctgcaaggaagtttgtagatgaaggaattaaaacactagaaggtgagtatgactgtaggtcactaattccagattaaatatggtcctgaaggaccattagtgctctaacaaacttcaacttgaaaaacccattctcaatcagtagatacaaaagataagattttctttttaactctgtagtacagtagatatagggtatagtttatattaccatcataaacatttttaggtttgtaactaactcagagaaaactaagaagaccaagaaccagggccaggcgcggtgcctcatgcctgtagtcccagcactttgggaggcgggtggatcacttgaggtcaggggttcgagaccagtctggccaacatggtgaaaccccatctctactaaaaatacaaaattagccgggtgtggtggcaggcacctgtaatcccagctactcaggaggctgaggcaggagaattgcttgaacccgggaggcagaggttgcattgagccgaggtggtgccactgcactccagcctgggtgacagagtaagactctgtctcaaaaaaaaaaagaagaagaccaagaaccaacctcttgacttaaaagcaatgaaatagttatcgtttgcaaatttttcaaatatctaaattgcctttatttctttttttttttttttgctctgcctcccaggttcatgccattctcctgcctcagcctcccaagtatctgggactacaggctcccaccaccacacccggctaatttttttttgtatttttaatagagacggggtttcactgtgttagccaggatggtctcggtctgaccttgtgatctgcccacctcggcctcccaaagtgctgggattacaggcgtgagccaccgcgcctggccccctttatttctttaataaaattttaggcaataaaatcttagattaaaagctaagttatatattactgaaaaagattctgtaagagatttgtaatggttattaaaggaatttttgctttcaaagaaaagataaaaatagaacctaacaagtaattataaaacgttttccttaaatatagtaatcctttacatgtaatttatctctttatacttttcatgggtgtatgtatacatatggattcattacagcatatccatggcatttgggatttagtatttgtgagtatttgcaagcagcccagtggttaggtaggcaggttttggagactgacctggctttgaatcccacctccactactttattagagtgggatgaccttattgcgtcagtttcacacctacaaaatgggtatttctgcttcgtacaattaaatgcaataatatatgtaaagcacttagcagagtgcttggtacctagtactacttaaaaatggtaaccaactcttatgaggcatgattagtagtattactaagttaagaatttgtgtgagccacattgctagagaatgaactctacatgtgcatctcatacagggtttatgctttgatgcctgtggtatagacagcttatatgagagaattgattggctaaaggggtcaagaatctgtgggtttcttggaggtattgagttgcatctcttgggagtgtcaaggatctactgttgtggtttttatatttcacaattcacacataaggaatacaactgttgatatctataactatatctgtctaacatactcagtatttccacttcttcagttttagtcgtatactttagcgttttctgtgtgcacataaccataggaaatattaagtgctctatatttcataaagatgcttatttttctcgattttatatctccagagggaatgtgtatatttgtggctataagggggcttgtaggaattgcttttgaagcatgcttatcttgctgtttctttaacaaggctcacagctggattcatgcccagtaaagggacacctgaatggaactgagtcacttttagacttaatatgggatgttatgacaattcttaagttaaaaaatgcaggtacagtaataattttcctttcaatggaatttttttttgttttgagacacagtcttgctctgtctgcccagaagtacagtggcgcaatcttggttcactgcaacctccgccacctgggttcaagtgattctcctgcctcagcctcctgagtagctgggattacaggcgcgcaccaccatgcctggctaatttttgaagttttagtggagacagagtttcaccatgttggtcaggctggtctcgaactcctgacctcatgatcctcccacctcagcctcccaaaatgctgggattacagtcatgagccactgtgcccggctcaacaggattttgagcacaatgactgcacaaatctactactcagtgctaatggaatgaaagagtgaaagaacaaataaactatgaataaacctagttaatcagaaaacattcagaagttatggttactactgttgctcttaacaataaattaaaccactatagtcagtaaaatttggtgtgattctgkttttttttgttgtcgttgttgtttttcgagacggggtcttgctctgttgcccaggctggattgcagtggcgcaatctcggctcactgcagcttccacctcccaggttcaagcgattctcttgcctcagcctcccaagtagctgggattacaggggcacaccaccatgcctcgctaattttttgcatttttagtagagatggggtttcaccatgttggccaggctggtctcgaactcctgaccttgtgatccgcccgcctcggcctcccaaagtgctgggattacaggtgtgagccaccacgcctggccctgaagagtcacttttatctagctcttcatatctgaaatttttgtctcattgtgttttcagtcatttcaatgtatttgttccccaggtggttctttataaaaagggtcattgagtttagcattttccccccaaaaagcatttaaattaacatgtcaactttatttatcttctatacagatctcagaaaaaatgaagataaattgaaccatcatcagcraattgggctgaagtaagatggcagattttcttttgacacttgagatataaaastaaattttttatagacattctttyatacaccagaaggactcttcaaacttagctaaaccacaaccattttcctattcagaagtgctaagatttgtggactcttacagagtatctgcctgtgttcacacartgctttcacttttgctttctagtttacttgttttgaggatttcccttattcttttgactttagcagggaacttcctcttaaaatacctaggactgagtgtatcaggcagtcagcgggtgtttatttcatgctcacattgtacaaagcactacactaggtctagggtaaagatacagagaggttgagtgtagcttttaagaagtttatagtctacccgagaaggtaggacatgaatatgaaaaactaaatttaaaaaaaggacaaacctcatacctaaataaccatataggaataactactaggcatgtttctatatcagcatcaataattattttgtgtgccagatatagtctgggaaccccttttctaattatttacagttatagtgcataagcactatatgtatctcttctggcattatatagtgttgtgagtgattcagtcctaattaccttttgaattttcctgttgatgctttaccataatattttaaacttatactcccattccaaaatcttgagccagtgagagacctggatggtatggttcttgctctcctggcatttctgtagtaaatggaggtgttctgaagaactggtttgctgagaattggctgtgaataggtgcttcatcatgctgaagcatatgcttagttgctgtttcacactgaatttcctaacagccttattgagatgtaattcatatgtcctgtaattcatccatttaaaatatacaattcagtgacttttagtatattcacagagttgtgcacagtgtaggaaccatcactacagtcagttttaggacatttttgttatctcagaaagaaccctgtacctattactagtcattcccccattgcctccccttacccccacctcagacctaggcagctgctcatctactttctgtctctacggatttgcctattctggacacttaatgtaaatgaagtcatacagtatgtggtcttttgtgactgacttcttccacttagcatattgttgtctgagtttatgttgcaggatagtatttgaaaatataattttgcaggatataagagcggtaaactgtaaccccttgccttgtcagtagacagcagtttactttgaaaataatgccctaacttaaatatatttatttactcttgttacatgaacacatagtttatttacaaataagtttagatggagcctttgaaatattacaaagaatgacacttaaggatttttatccagtttaggaataaacctccccccattcactccacccccaattttgctgttgtcatctcagtgaattcattctagccttgatttgtgagaatgatctgctggtatggcacggacaattgttataaaaggcaatttaatttttaaggagatttaaattttacgaaaatcttttgtctacttattctgtctttatagatattttggggactttgaaaaaagaattcctcgtgaagagatgttacaaatgcaagtaagatgtgtcaaattatattctttgattagaattgagagtgtcacttggtgaaaagccattttgggaatactgacttaatttttcttctattaggatattgtactaaatgaagttaaaaaagtggattctgaatacattgctacagtctgtggcagtttcagaagaggtaacatacttcctaatcttgggttatttttgccctgatgttaaaattgcctaatatatgggaagaatttggattaaaaagatgtaatttgtggtacttcatagactcactaagacctagtagtattagttaagggtatttgtttatagatgggaatatgtaactaggggaaattcatcctgattttattataggatgatattttaatgactagttttaacgacgtttattaaatgactttaagtatattgaaatgctagtaatggttgtctttggccttttggctggatgatagtgaagttgtgggtagttttgttaatttacctttctttttcctttttttttttttttttgagacagagtctcactctctcgccacgctggagtgcagtggcaccatctcggctcactgcaacctccgcctcccgggttcaagtgattctcctgcctcagcctcctgagtagctgggactacaggcgtgtgccaccatgcccagctaatttttgtatttttagtagaaacggggtttcaccatgtttgccaggatggtctcaatctcttggcctcgtgatccacccacctcgacctcccaaagtgctgggattacaggcgtgagccactgtgcccaactgcccaagttttctataagagagctaagaataatgtcttagaagtaccagttcaaaaccaattcttacaacaaccgggttcatcagaagagttctgcttagtgtgtgaatgtgagcaaagtaagaaccatataatcctggtgtcttactggtttaaaatattgaaaagctcatacatgcttaaaaatattaacttttggccaggcgcggtggctcacgcctataatcccagcactttgggaggccgagccgggcggatcacaaggtcaggagatcgagactatcctggctaacacggtgaaaccccatctctactaaaaatacaaaaaattagccaagcgtagtggtgggcacctgtagtcccagctcctcgggcggctgaggcaggagaatggcatgaacctgggaggcggagcttgcagtgagccgagatcaagccgttgcactccagcctgggcgacagagcgagactccatctccaaaaaaaaaagaaattaacttttaaaattggaatagaaaaaccttatttaaaacattttagagtatgttagagtagatagagtagatacctgaactgaatctctggccacctgtggagttttgtctaggaagtaggtgatggcctatcaggaatactctgggtagctgctgtaagaatctagagttggagagagaaaactaaatccatactcactgatcagtagaaagaacattggactggggtcaaaagacctggggtctgaggccaaatctaccactattatgtctctcctgatcttagattccatactcgcaaaatgagagaactgaagttaaccagattttcaagtatgtctgcatcagaaatacctaggacttaaaaaaaaatacatattgttgtacccttctgcaaataagaatctccttaggtgggaactgggattctgtattttcaaaatgtagatttggaagcacagcaagccaaatgcatgctatgttggctatgacagccttcctggatttatttatttctattttaattttacttttttggggtatgttgtatggttatatgctttcacataaaaaggtatactctaagacatctcacttccacagtccctatgcactctttcctactccttctaagtcccattaagaaccacttccctatggattcttgtaacgtttcttcatgaaaatacaactaaatactagtataccatctttatttctttcttctctccctttctttcataaagttacataatatatatacaatactataccttgcttttttcacttacaaataacatcctagagatttttccatatcaatatatagaaaacttccttatttatttattttttgagatagggtccctctctgtcacccaggctggagtgtagtggcgtgatctcggctcactgcaacctccgcctcccgggctgaagtgatcctcccacttcagcctccagagtagctgggaccacaggcacgtgccaccacacccggctaatttttttttttttttttttttttggtagggacatggttttactatgttgcctgggctggtctcaaactcttggctcaagtgatccacccaccttagcctcccacagtgctgatattacaggcatgaaccaccatgcccggccccttattcttttttgtagctgtgtaacattcagttgcatgcatgtatcatacttcatttgtttatccagtccgctattaatggacccttgggttgtttctctttctttgctcatacactttgtttttgttttttttttaataaagtgaaacatttttgttggtaggcggacagtgaaagacatccagcttttaggaggaggaaatgagaacaagagaaggcaatagaattttcttgattaaaatagtttccatggatgtccagtacacattcagtctagtcttctttttttcttttttttttgaggcagagtctcgctttgtcgcccaggctggagtgcagtggtgtgatctcagctcactgcaacttccacttcccaggttcaagcaattctcctgcctcaacctcctgagtagctgaggttacaggcaaacaccaccatgcccggctaatttttgtatttttttttttttttagtagaaaaggggtttcaccatgttggccaggctggtcttgacctcctgacctcaagtgatccgcccaccttggcctcccaaagtgctaggattacacgtgtgagccaccttgcccggcctggccttctttatatttaaatatttggttaaggcactgtggctcatgcttgtaatcccagcactttgggaggctgaagtgggaggatcgcaaagacactgcaagctctttagttaccaaaagggtgtttggcctctgttgtacttatcaaaatgaaagggaggagatagattggattcttttatgctgtataccaggcactatagtggatgcttttacatatgttcttatttacttacacaatagcatatgaagtagtttttagtagtttacatataagaaaactgaggtctagaggaatgaagagtcctcacttgcaacactgaaaaaaaagtaaaatgaaaaaattccatctcagtggagacagaatttcatagaatataggaaaagaaaggtttaaatagctgtatataacttgcctgaagctatgtggttgtagagtatagacctattaattgagttcaaccataagaattgaaatgagttttctttttaaaaaaaaaaaaaagagagtgcctggatctctctgtgttgactgggttggtctcaaactcctgggctcagcgatcctctggcctcagcctctcaaagtgctgggattacaggcatgagccaccgtgcccggctgaaatgagttttctgattaacctttatagagttagagtatattgtttaatttgagatttttacatatagagttgttcataggtgtattttaaagctattttaaaatattgtttttattcattattgagtagttacttaggtgcatttttaatacattaaattaactcgttgtatgcaatgtatatctaatgccaattactgttgtcatcacagattctgctgtctacatcaatacacctgaatagttggacagaaaattgaaatcttttaactaattctaactatgaagcacagtgaaatagaaagttaggctgtaagaagtaaggctyttctgtgtgtcatcagcttggttccatttgcccaattgatacatttacatggacaatctcatatgtgtcttctgtcatcacaggtgcagagtccagtggtgacatggatgttctcctgacccatcccagcttcacttcagaatcaaccaaacaggtgcctcagagtttataatcaatggtgatcagtcttacacaacagtgaatttcactttttaagtgatagttgggtattttcagaataagttttgttttcgccttcctgaaaagtctgaagagctttgtactgattgaattctgcgaaaggcaaatttctcgaaarggatacctattattcttccatgagttgctgggaggacagtctaacatttgaaagagaaaacattgaatacaatagttttagaacgatttactgtctgtgataaatactttagaaatactataatcagattttcattaaattttatcttaaaaaatgaaatattgagaaaccttctattagaaaacctgtgaaggcaaaacattttttattttagaatatatgcctttggaaggtgaaacagctgactctttgattgcttttttttcccatgagccatttcaagaacaggaaaactctttgatttaaggaaacagataaatacaactgatcattgtttttacaatcgtaataccttaaacagtggtttctaaaaatatgtttcatttgataagatgaattttctattagagggaaaaagtacttgctcagaacattagaaaacatagagatggccgggcacggtggctcatgcctgtaatcacaacactttgggaggccaaggcaggtggatcacgaggtcaggagatcaagaccatcctgcccaacatggtgaaaccccgtctccactaaaaatacaaaattaaccaggcgtggtggtgcgcgcctgtagtcccagctactcgggaggctgaggcaggagaatcgcttgaacccaggaggcaaaggttgcagtgagccgagatcgtgccactgcactccagcctggcaacagaacgagactccatctaaaaataaaataaaataaaataaaataaaataaaataaaatagagatttctccataaataattagaaaactcatgttaaaaatgttttcttcccgggctcgattccctgccaaaaaaaaaaaaagttttcttattcaggcatgatgttgttcctggtactctggatgctgaggtgggaggatcacttgagtccaggagttcaaggctatagtttgccatgattgtacctgtgaatagcacagtctccagcctgtgcaatatagcaagactgtgtctctaaaaatattgttaaatattttcttgccattacaaagtaattactctttttcttattccctaattatgattctacagccaaaactgttacatcaggttgtggagcagttacaaaaggttcattttatcacagataccctgtcaaagggtgagacaaagttcatggtaagtacttgttagagttagcacatctaaaaaaaaacttggagactgttcagtagccattctgagtgtgtgacttcatggtagctttgaattacagtcaccaaatagagtatccatgagactttaaagaaaaataatagcaggggccgggcgcggtggctcacgcctgtgatcccagccctttgggaggccgaggcgggtggatcrcctgaggtcgggagctcaagaccatgctgaccaacatggagaaaccccgtctctgctaaaaacacaaaattggccgggcgtggtggcgcatgcctgtaatcctagctactcaggaggatgaggcgggaaaatcacttgaacccaggagacggaggtgcggtgagcrtagatcgtgccactgcacttcagcctgggccacaagagagaaactccgccaaaaaaaaaaaaagaaagaaaaataatcagcaggatgcctgattctcatagctactctcagaatattttaggaaagaattttcttttaattctccacttgtaaataacacgtgtcatcagaatagttaattaggcctgggcatggtggtgtagtcccagctctttgggaggccgaggtcagcggattacaaggtcaggtgatcaagaccatcctggccaacacggtgaaactccgtctctactaaaaatacaaaaaattagctgggcgtggtggtgtgcgcctgtagtcccagcttttcgggaggctgaggcgggagaatcacttgaacccgggaggcagaggttgcactgagccgagatcgcaccactgcactccagcctgggtgacagaccgagactctgtctcaaaaaaaaaaaaaaaaaaaaaaaaaaaaagaatgggttaattaggcataatctgctttttgaaaataccagtaatgactttgacacacagtaagtttttccctaaaatagcaaatggttctcatcttctctgattcagaattcttcaataagtaacgtagttagaattgattgaaaaatattaatctatttcaacaccaaagaaagaaaagtcatcagggtctgtgatagaacactcaggggaagaaacgttacatggaatgataatgaggaaagttgattgggggggaattaagacttaataattcaagatgaatggctagtggattaaaagcagattaataaatgattctgtataaacaccaacaggaaggcagatagaaatctagaattacgattctttttttttttttttttgaaaaggagtttcactcttgtcacccgggctggagtgcaggagggcgatctcggctcactgtaacctccacctcccgggttcaagcagttctcctgcctcaccctcccgagtagctggaatttcaggtgcctgccaccacgcccagctaatttttgtatttttagtagagaccaggtttcaccatgttggctgggctggtctcaaactcctgacctcaggtgatccgcctgcctcagcctcccaaagtactgggattgcaggcatgaaccaccgtgcccagcctagaattaagattcttagttcctttttttttgaaacagggtcttgctctgtcacccaggctgtagtgcagtggcgaaacatggctcactgcagcctcaccttccagggttcaagcaatcctcccacctagtagctgggactgcaggtgcgcaccaccatacctggctaatttttgtattttttgtagaggtggggtttcaccatgttgctcagactggtctcgaactcctcagctcaagtgatccaccctccttggcctcccaaagtactgggattacatgtatgagccactgtgcccgggcctcttctttcttaaggtgacatttagtgttctgtcacttatatacatcattcgagtccattttctcmacaccccacttttcccgggtgatatgactgaaaggaaagagactgtgcttttggagagtggatgtgctaaaattagtaagagtctcagtgcatagatttgacaagagttttagccaaaactagaagatagttgagaaagataattaaattgtcatgtcattcagaaagtagagtggtgtttgccagggcctggaaggagggggtaatagggagttcctgtttaaatggcacagagtttcagttggggaagatgaaaacattctggagatggatggcggtgatggttgcacaacagtgtgaatgtacttaatgccacagaatggtacacttaaaaatggttaaaatagtaggcacagtggctcatgtctataatcccagtgacttgggargctaaggtgggagaatggcttgagcccaggagttcgagggtatagtgagccatgatcgcactactgcactccagcctgggtgacagagcaagaccccatctcaaaaaagaaaaaaaaaatagatggccaatagatggtaaattgtatgttgtgtatatttaacccacacacatacaaaaaatcatgtcattaagttcagcatggtgatattagtgggctgtgaaagtgtattttctaaggtggtcacactttaacaatgcttccaaacgaactttggaaagataaaagtaaaggttctagtcagtcttggaaattaaatctctgatttgttctcttgactctgtcaagttttgaagtcttactctgttcccaaaagtatatacatacatgagatggtattaaaaatagggcttgtgtatgccccatgaacagccttttcaaatttaggtggattttaattcactcaaaatgaatgtgcatgaatcttacatttaagaatattcagtcagataaaatcctaaaaacagtatctgctagacaagttggatgttgtgcacagtagaaaagtatcttgctacgtctgggcatattttggggacctctctggcctaaatcttcctcaagtatcatccctgtgaaagtcactagaaatccttactgggaagtgtgccaactgttttcagagttaatgaccaggaaggtagttccacactaccatggcagaagctgtttttttataatcttaatggtgttctgctgtgctcgaagagagatccagaggaaaaaccaacagaagctataggaatccagctagcaagaatacaaggtaaaagggccaggcatggtggctcacgcctgtaatcccagcactttgggaggctgaggcaggtgaatcacctgaggtcaggagttcaagaccagcctggccaacatggtgaaaccccatctctactaaaaatacaaaaattagctgggcgtggtggcgggcgcctgtagtcccagctactggggaggctgaggtggaaggatcgcttgaaccaggaaggcagtggttgcagtgagctgagattgtgccagtgcattccagccctggcgacagagcaagactccctcccaaaggaaaaaaaaaaaaggaaaaagtataatctagtgggctggatgtaacctgaaaaggaaaggtgggtagccaagtctttgtgatcttgttgatagtgttggacttgggttatcccagtacatgtgccacaggaaagaatactaaggccactcacccatcctaggatagaccctatcttgacttccctgtctttcaatcatacatctggcagcacatctactggtattgccaggaaaggcatcccccagacatatttccagaagaaaacaggctaaaaaacaagaagactgggtctgtttatttgtttttaaagtatagaagattcaggtgacaataagaacaagaaactaaggcctttatgttgcgacataggaatccatctcagtgggtggtttttgacaaagtttggatgttatacctgtggttcatagtccctggaacttaaaaaaataccgtagttgagcatgctgttttgacatttgtaatcattgttaggaagagaagcactcgaggtcaactttcaaatcaattttagagacaggtaagaggtggtttgtatctttcattatagaagaataaatttggatacagaagatagagggtcttattctggctccattactaatactctgtatggcattgggaaggtggatttacttctaaaaggcctgagttttatctttaaaattgatatttgccctacgtcagaagaccgttatgcagatcaaaattaaatagtatatgtggaaactttgaagagtttgtacaaatatttgatgtacaaataagaatttgcacaacttcaaagataatggatcttccaagagttgtacaaagagagctgcacaaatataagatgtcatctgtgtggaaatgggtcagtagaggcaggtgacctggtaagggttagattggggaacaaaagaagggatagaaagagagaggatggtgccatgaaaggagaacagaatgaggagagtgagcacccccagggcagcagttgtattcagtcagttcagcaaatacatacaagcatgtcctccattccaggcactgttctcgaagcttgggatgtatccatgaatttaagtaaaactcatatttgaggactgtgggaagggactgatagttaacaatgaacataataaatatgtgaattatataataggttgggtagtaagtgttattttttaaaaaggaagaacagggtctaggggagaggagagtgcaggaggcagtattaaatagtgtggttggaggcagcctcattgagaacatgagacttagggaatgacatagggagttagctaagccggtatctgagggaagagatagccaggcaggagtccgagcaccaagcctatgggaatgagcatgagcaagatatctaatgaagatgagagctctaggcttctaaaaggaaattggctgcaaaatgaattcaacttaggtagtgaaataaaccattctcattccatatcccctttttttgcaaaacctcttcttgctatcaccacttactagtcttaaaggtatgcctcttcatgtgtttttcaagttatattcaagacacaaattcctttaagctaatagtaatcaaaccttaggaaagccatggttattccagatcatcttgtgcaatcatagtctttagataattgagctatactatattcctgtgaatatagtaacactcagaagaaaaaaagtttcctctgcattcaactattggttttatatacggtgagtgccattcagatttcagtattttgtgcaagtttggccttgggtgattttctgtgaaatatctgcagtaagaattcaagggacaataggagataccatggctaccccgaggaaatgaaagaggttttatttccgacactcagtatgaagctacccaaatgaaatgccaaacaaagctaatccactcaatctaatacagaatttacagtaaaacagagaaattctttaatattagcacttcagaaaaagtgcaggaaataaaattagccttgaggaaaggaacaaagccatgagataaaatcctattactgatgtgacaaacaggaacatcattccctgtggtatctagacatccgcatccgcaaggtaatacctcctggtaattccaggtggaaatgacttctgatccacttgaaggtggaagttgagttggaacttgttagtgcctaagaaggtaggtttcatattttgaaggtaaacatatttcattaatctttcttccataggaacagctaaagaattagtttagattttaatttttctattttgctgagtgaaaaagtatggcttttagtggcatgtgttaacttgaccactcttgaggaccagaagcttgtcacttgtgtatttttcttagaatgtagcatttgatacttttaattggaaatttggtggtgcttatatcttgttttacatatgtatgggttgctgaccagtccagattttttgtccatttttcaggaaagggaaaagataaaacagacttggataacttttgtttggaaattgtagaagtataatgaaaaattacctgtgaaggaagaaagtgatcccctcattttctgatctcatatttttcttattttccgtgtctttctcccttctagtgtctgagagatttcttcaatttcaaactcttttacttctgctacctatcattttaaattttgatttaaacctttccctgagggttttctatagtattctgttcttacttcatggatagagtatcttctgttattactggaagcttttttgtttgagactatactggtagcttttttgtttgttttcttcttcctgcataatcatcgtttcttccacgttgctctcttctgtttattttgatgtctgtgtttcgtgttcagggttttctttgattagtttcttgcttagaatcacacaaagrccaaatcctcataatgagaatccttatttgcagttttgtgtagttctctaattatcgtgaartgtaatagaaaggtagggatagtgtattgctcacagaagctgctaagttaaaagtgctcagaattctagagctgctaacattaaaaacaaaaatggccttgtgttttacttgattaaaattaagccttaagtttagaacatctttaaacttggtttaaaatgttcattttagggtgtttgccagcttcccagtaaaaatgatgaaaaagaatatccacacagaagaattgatatcaggtattgttcagactttgttgctgacctgttaacttytccaaacttgtctcgttttctccctccctgtttgtatcttggagttcacattcatatctagagcctttttttactcccaagagccatatgttcttgccaaatgcaatgtttagctccaaagtatgtaaagaataatgactgtctacagactccaatttattttctctagatttgcacctcaccatgatgccttccacagctcaaaagtcatttcctgcctgggctaagttagttgtaataggtgataatgcaatttcatttctccacatctctttcagaacaaagttcacagaaacctaaacaaattacaaggttggggtgatttgagcagtctacctcatgatagtcttctcttcaaattattagaccacttaggcttatctttggtattttgttccttattgattttaggagtcctatatttgctaaacttgaaatgcatggtaaaaaaatgtatctactgtccattttttttaggttgatacccaaagatcagtattactgtggtgttctctatttcactgggagtgatattttcaataagaatatgagggctcatgccctagaaaagggtttcacaatcaatgagtacaccatccgtcccttgggagtcactggtgagtgtccatgtgtgtattagagatcatctcscatctggagagaaggttattttcaaagatactttggtttagcaaaccttctaataactatgccagttagtgtagtttctttgtatttttagtccttcaggcaacgagagaggatttaatgcataacatgctcctaggccctcagttgaaggccatcaaggcaagcgttagttccagctttgttaaaatggattaaatccttgcatgctcagtaaaatatcttattcatctaaaagggtttttttttttttttttttttttttgctgttgtttaatgtacctctaggacccctgaaaaactcaagtatcattgttttcagtgccacatactttgcttttagtgccatggtatctttggccccatgcttttaaagtttaaagaataaggattgctgaatctatgcttaatgggttctgttaacatttcacagtatactatgtggtttactgttctctactaggagaatgaatttttgtcattttgtcctcaaagtataaaatactttgtcctcaaagtataaaatacctcatccctggtagactagggcagtgcttctcacaattcagtgtgcataccagcaacatgggggcctcactaaattcagattctaattcctttggcttgcagtggggctcaggattctgcatttctagtaagcttctagatcagaggttaccaatcttttagcttccctgggtcacattggaagaagaataattgtcttgggctacacataaaatacactaacactcacgatagctgatgagctttaaagaaaaaaatcataaaaacatctcatcgtgttttaagacagtttacgaatttgtgttgggccacattcaaagtggagctgggccgcatgcagctggcgggccatggttggataagcttgttctagataatgccagtgctgctagtccaagaaccgagttgcaaaggaactcactagagtatataatacatagtggctccagcagaaaggacaatcatgagtgaggatgacttgagtggccctagctgggatccccaggttccctttgtggcactgatgactcacgagatgaagctccagcacagsctcctgggagaggatagaggtagtcagtgtctttttttttgaaatggagtttcgctcttgttgcccaggctggagtgcaatggcacattctcggctcactgcaacctctgcctcccaggttcaagcgattctcctgcctcaacctcccgagtagctgggattacaggcatgagctaccacgcctggctaattttgtatttttagtagagatggggtttctccatgttggtcaggctggtctcaaactcctgacctcaggtgatctacctgcctcggcctcccaaattgctgggattacaggcgtgagctaccacatccgccggtctttttttttttagtgacttggttaccattttcttttttcttctgaaagcaagtcccacacagctcttaatcttgaaccctctataactaaactataaaactggttcttacaataagtttttctctctgtacttgcaggagttgcaggagaacccctgccagtggatagtgaaaaagacatctttgattacatccagtggaaataccgggaacccaaggaccggagcgaatgaggcctgtatcctccctggcagacacaacccaataggagtcttaatttatttcttaacctttgctatgtaagggtctttggtgtttttaaatgattgtttcttcttcatgcttttgcttgcaatgtagtcaataaaacctcatgtactattattggatgatgatgatcttattttcttagcaagtatgtttagtttaaattttcatattgtgttcatgatcatactttactatgggttttgtagagagaaatatgagatgatagcagatctttaatgggaatttttattttctcatattctgctctatgctataaaccacattacccctacttactgatcaaaaattgttaattaaggtacacccagagactagcctctggaagactgttcaatattttctagaaactgggggggggcggggcacggtggttcatgtctgtaatcccagtactttgggaggctggggcaggtgggtcgcctgaggtcagcggttggagaccagcctggccaacatggtgaaaccctgtctctaccaaaaatacaaaaattagctgagggtggtggcatatgcctgtaatcccagctacttaggaggctgaggtgggaaaattgcttgaacccgggaggcggaggttgcagtgaggcaagatcacaccagtgtactctagtctgggcgacagagtgagactccatctcaaaaaaataaactagggaccttcataaatttagttttttgttgggcccatatttgattgtgtcagtccattcttgcattgctctaaaagaatactggagactgggtagtttatgaaggaaaaaggtttaattggctcatggttctgctgactgtataggaagcatggcactggcatctgctaagcttcttgggaggcctcaggaaggttttactcatgctgggagatgaagtgggagcaggcacttcacatggtgaaagcaggagcgagagagagagaggaggtgccacacttttaaacaaccagatcttgtgtcaactaacagaactcactcatcaccaaggggatggtgctgagccattcaggaggaatccgcccccatggtccagtcacctcccaccaggccccacctccaatactggaggtcacatttcaagcatgagatacggaggggataaacgtccaaaccatatcattgaatcttgtaatataaacttataacctgaatagaaaaacaggtgtatgatttatctcttaaatctgtagcacttgcttgaaatccactagaaagagctcccctaagcacaaccacttctatgcacaaaatacagcccttttaaacttcaaacaaacaaaaatttcacttttttgcccgagttctcctctgggcttttaagcacaagtggtcaaaatgtgtaagtaaaaacactccttgaaagccctgcctttcaaatattaaaattatataaatataaaatatacaaagttatcaaatggtaagtaaagctactgaaaacgtgaaaatgctttataacttgcaaaggactatacaaacataagatatcttgaaacttctttattaaccaaattattttgtagtgaaatgccatttcccttctaagaaatgaatggaaataaacaatagagttattaaggaaaaatatagtatttgctgtgataattttcctggtaagatgtaagaattaatttacttttaacttcagatgctatcattttttaccccctaggatactgtcaggcaccaacccttcaccagaaattgtttaaagatttatttggagagagagatgtggctcggttatagtatatgtatttcaaaactcacacagtacactttaaatatatacaatttcaattctttgttgttgttgttgttgttgttgttgttgttgttttgagaccgagtctcgtactgtcacccgggctggagtgcaatggtgcgatcttggctcattgcaacctccgcctcccgggttcaagcaattcttctgcctcagcctcccgagtagctgggattacagacatctgccaccatgcccagctaattttttgtattttttagtagagacagggttttacagtgttggccagtctggtctcaaactcttgacctcgtgatccacccacctctgcctcccaaagtgmtgggattacaggcgtgagccaccatgcctggcttcaattcttaaagatttgaattaattgagtccctagattagaaataatttttttggttacagagtcccatcagttttctggaaaaacggacaaaaggctaaagctagtttcattcatcacaaggtcgccatctcttagttctctagtttcaggctatttcacttgctacaagatttgattttaagagagatctgtatggaagcattttaaagttaatgtccaagattgagctcaaatgcaatgtggattcttctttattttgaaatatttatagcttttctattttttggcatactcttaatcgagcatgctgccgattgctggtcaattggcttcgacacagtagtccagggccacagtcgcaacgctggaagatttctggagcttgagcagtgtctttatgccctcttctggagcagacctgtccctccaaaagractggcttacaaattttcgtccaaaaatgacgagcacagcaaagtccagggccacagtmaaaagttctcagacaactttctccctcttgtcctgtaacaaggttaatgtgggctttagtgataaataaggaaagtggcctgctgggggtttgctactgggataagggaatgggacctatgactgacagccacaaagtaaaaacagacacagcacgcaggtctcacagagctaggtgttacgctaaaagcagtaatgccatggcgactccacccctacccatcagaattgatcgttgttactggctgcagactaccttaggctactctctacgtgacccccacagcttcttacagaaagagataacaaacagcacatgcttcctaagtgtttctgggatggagaagaataaaatcagtctcaccctatccttaagaggctgggaggagaaaatgcatttctgaaataaaatatgctgcgaatgctgttcttacccttcctgccttgtgatttcttaatacttggcttccttttgggttggttttcctggactgggtgcccagttgttccttctgcatgtgtgccatcttgctcatcaagctgcctttctaatattggggttgcatcttccatcgtagtacaaacatctgagggacaaccaggtgtaactagaattattaacttcaagggggagaaccacagacacactaattatcctactgttgcatagtttggcagcacctctgccttcagtttatatataactttctagatttctggaacatgtgctaaatatttacatgctcgcatgtggcagagaaagtagctaagtggaaattgcattccattaaaggtagttaatggtatccaagtggaaatggaagtatttgaatgattacaacttgagtctttcctttaaaatcattatctccaagtcattggcaagagctgttgccaggaaataaattattttgtttcattaagaaaaggcaagccgggtccggtggcttacgcttgtaatcccagcactttgggaggccgaggtaggtggatcacctgaggtcagaagttcgagactagcctgaccaacatggtgaaaccctatctctactaaaaataacaaaaattagccgggcatggtggtacatgcctgtagtcctagttactccagaggctgaggcaggagaaccacctgaacccggaggccgaggctgcagtgagctgtggacaacaagggcgaaactccgcctcagaaaaaaaaaaaaaaggaaaagaaaaggcagctgcatacatttacttcaagcatgaatctaggaagcaccattagagagtgcctaccctggaatattctagtctatggggcttagacactaccttcggtttaaaaaccactgttggcgttatgtcgctcaccgttcacacagagtgtcccagggcagcacatggcatctcgctggcacctcctccgcaacccacgacatgtagcacagaacggcttctcatcgcggggctggaggcagaactttctggtattgcagtccgtgtcagacaggcactgtgagccctgtggagggaatctgttatcacaaggctaggaaacccccaacacgatggaagatgacttattattgaaggcaggaggcggagggagccaaaggacagtggcgctgtgacaaaccctgggcagcatcttactctccagtggaaatggttttctcccacaaagggaagctcatgtcacccggggagacctaggcgctgcaaaggctatttgagtttgaaaaattgacttaactcagaatttagttttcctgtgctctttgtgaaaatgggaaaaaatgttttcctatgtgtgtcttaacaggtgagtatgagattttcaatatatcttaactctagaagctggctacagtttcattaaacatactattgatgtttgtggcattcctatttgattttttactctagtgaatcacatttagcttagagacccttccctaagtgaactgtcctttgattttcaatgatgcctcattgacatagagaaagagataccgaagatcaattgttctcatacacagttgatgcttctacatagacatacaacgtaggtgtagcatatatgatatatgtaataatctatacgatatataataacatatacacatacataaagcgattcctaaaacaactctctctgtgaagttagatggtgacaaggcaatgcatcatggccctctgtttaaattctcattcccatgtttgcttgctggctgtgtgagcttgggtaagctcttcaacatctctgagtcttatttcctcatctggaattagggaatgtttcacctatctcaaattgtgaggaagagtacatgacgtattacatgtaaaagagctggcacatagtagagcttccaaagtgttcgtttatttcgtgatttatagacaaacgtatggccgaatgatgtgaaaagccactgtgtttatttcatacattcacactaaggccactgatcctaccaggatgccctcccaaatccgaaaccaattcaatttacctgctaggtaagacatttcatacatgaatcagaatgacttactaaagcctaaacaaaacaccccagctgtcagcagtcccgtacctcgcccccctccctagcagccttaccttccgggccccatgcaggtcagcagagctcctgatgttgttgaagtccaggaccagagctcccaggggagagcagagccagctcagccccagcaggacggccgccaccatccttcaatcccggggctcctggagggtcccagcactgtgcgtcaccaaagcgaggctgctctccacccagagcagagcttccactaagctggcagctcagcacgtcgtctgtttgtcactgctttttctgaaagaagtaaaccttagtctgagtaaggtgcgtgaaatcggctgagcaaagtctgaccagcaggttcctcctgaaactatttataaccagatgtgcctcctccccgctccgttccttcctcctgccccacacaggcttcaacaaatcccttcaaatctgtttgatcaatagttcaaaacaaggactcaatagaaggagagaagaggcagggccatgcggcttctcctccaggggttcaatccctcttaattattgcatatcaaagttagttcaaagggccacggcagagcaggatgtctgtatcaaaggcaaactctgataatcacctgcatttcctaccttcagtaatcctttgggggtagggagggagtctgccctaagatctgttttcacagctaattgtgctcaaagaaaggatgaatcatactggccaatatgctatagaggatgccaaaaactaatgaggtacaaaatacactgagaagctgtaaactgggcttcagatagtgaggacagatagaaaaagagaaaacgccccctgattagctctggcatccagatgtcaaaatcccaaccgcttaaaagttgtgaacgtaacagcacctgttctgactaaatgccatttgggaaattactttcctttaaat

SEQ ID NO: 93711 - DNA, 25443 bp, Homo sapiens
ttagaagggtaggcagaggccacatcactttgtctaatgataggccatggtttgtaatttgtttgagatgcactgggacatttgacaaagatagcttggagttctgtgaggacagtggagatgggtatatataaagttggaagagcagagaccactcaaaagggtgcccttgtccaaatgagatgtgggggccacccgtactactagggtggcagtggaattgcaagaattacattgtagactttatgcatttatttttgagacagagtttcgctgtgtctcaaaccatgcctggctgattttttgtatttttagtagagatgggatttcaccatgttggccaggctggtctcgaacctgacctcaagtgatccaccctcctcagcctcccaaagtactgggattacaggcgtgagccaccacgcccagatgtagatattatttagatatttaattgacaagagatggtgttggatcaaatgtgggggtaagcaaaagaaggacatcaaggatggtgcctgattagttttggggttttttggtttgttttgttttgcttaagtggagattttaggggctcacctgttaataggaaagggttatgaggtttgggagacagatgaagtgctgttttaagtttgaaaggactacaaaactttcaaatgggagatgttgagcagacagtttaatgtataattaaccctttaacgacaaggggtttggggcactggcccctgcacagtcaaatctgtgtataatttttgactcccccaaaatggaactactgatagtctactactgactggaaggcttactgataaacaacatattttgtatgttgtatgtattatatatactgcattctttttttctttcttttttttttttttaatgaaaatagacacggggtctccttacgttgcccagggctggtctcaaactcaagggttcaaacaacccacccatttcagcctcctaaagtgctgggattacaggcgtgagccactgtgcccagcctatactgtatattcttacaataaagtaagttagagaaaagaaaatgttaagtcataagcaagagaagatacatttactcttcattaagtggttgtggctcatcataaagggtccttattctcatcttgttgagtaggctgaagagggaggaggaagggaggggttgtttttgctgtctcagggttggcagaggtggaagaaaacttgcctatcagtggccctgcgctgttcaaagctgtgttgttcaagagtctgctctacttctctcatggcactgagggaagcgcagtggcatgatttcagctcactgcatcctccacttcccgggttcaagagattctcttgtctcagcctctcgagtagctgggattacgggcgtgcaccaccacacctggctcattttttttgctatgtgttgtgtgtctgcctgtctctgattcacattatttgggacactgggcaacaccagttttgtctttgtatctcttctagtatccttgcatgtggacaccaataaatttttattgaatgtgttggtgggaacagaaccccctgcagaacatctgccaagcctggactctgcttcccagggtggggtaacacagtggagggagagtggttttaagccctttgctttgcactgtctggcttagaggtggatctccatgctgatagaagtgatcaatggctcactgggtcctacccaggatacattagaatcagctggattgctggtttaaaatgcacattggtaaaccaaggaaatgtgggttttgggggttttgggttttttttttttttttttttggagacagggtttggctctgtcatctaggctggggtgcggtggtgcgatcttggctcactgcagcctccacctcctggctcaagcgatcctcccacttcagcctaccaagtagctgggactacaggtgtgtgccaccacgcccagttattatttgtatttttgtagagatggggttttgccatgttgcccaggctggtctcaaactcctgagctcaagcgaactgcctgcctcagcctcccagagtactaggattacaggcatgagtcactgcacctggtcagaaatgtgtattttttaacacattccctcggttatactaacgcatgctaaaattgagaacagcgagctttttcagcccagagcctgtgttcgcatttctttggaggctttatggattttcatgccctcacatgttctatgttcttacctctttaacttctctttaaacagagaatccttttttttttcttttaagaaaaaaacagtggtatctaagacttgagcccacatctttcctttgctcctttagaagaaaattaggctttgtatttgaagggctcttttttggttctgcttcatttaataaaattttttttttctgttttgcagtcccatgagcgtgtaagcaagcgtctacatcagagattccaggcctgggtagataaatggaccaaggagcatgtgccccgtgaaatggcagcagagaccagcaagtggctcatgggtgaggggctggagggcctggtgccctgtaccaccacctgtgatacagagaccctgcattttgtgagcattaacaagtatcgtgtcaaatacggcacagtattcaaagccccttaactgcaaagccagagcagataacttggggtgtgtgtggggatgtgtgtgtgggcctatgcactcacacactgaagaaacaaggaagatgcctttcaagcctcactgggcctctctgggacatggccacctgacctgtgtgtggctggtgcagcctggcaccaagtgggctacctgttaggaacatgaataccttacaaagctgaagctggaacttttcccaaagggttttgggtatagcctgccctggaggggaaggaagtccatgcaagcaaagacatgcagtttgcttgcacacaccagcagagctaagactggagtctcctgtggcctaactttcaatgagggaaccggatgctgttcacactttgactggatggagatgcatttacaaaacagactggagaaggacttaatactcagatggattggaactatcatggtcactgctcctctcccctccccacaaaaggaaaaaaaagctggatttgattttttttttctggtcactcgagcacatctaagatcacccattaggttttatctgggacctgcagtttggctttgggattgatcatcttgtggattttattcctgacgattcccttgctgcctacccttttctctcctctggttctcaacctcaacgagttcaaatcagttgtcctttttagctcccgtggaactgttttgtatctgcctctttactagtctaccttagtgccatccaccagctttactctctgacacacacacgcacacacacacacaattttaacttgtttttttgtacataatgtacatactgtcaattttttattaaaagaaatatgctttgatgtgctagcataactgctctagcttcttgtgtaccatagtactgtggcttcagatttagtacctatgaacagatgtacaagacatttattacactttttaccaaagggagttaccattgtagtacttttgtgtaaaacttgtcttcccctttgcccccaactttttttttttttttttgtaaataaataaagcttggttcttacttaaggaataaactctcaacccacgtcccttgtcctcaccagaaaatactgtgaagcagggattttgacttcagttccttatccagggtagaaacaggattttgcttaaaatacttgttacttgtcccaaatcaaaatattccaaaatcttagaatacttaagtcttttagtacgtgtttttttcccttgttcaaataatctgaaaatattttatatttgggtaagttgtcaagctatgtagtttgtatttctatatattttttcttattcacattggtgatggatgggggtgagcaacttaaataccaaaccagtgtttgaaaaaaaagtgtgcataaggcatgtggtataccttataaatggagttgggagggagagaatttgaaatgggatacctatttttttaattacataaatttaaactagcagacatttaaacatgaatgattaggatttttctatgtggttaacctggactttctgaacaaagaccaactgagcccctcccagtactctggtggatttttcttcagcaaccattacgcaagtcttagttgtaaccagcaatgttctgtgtgttttatgtttgctttttagttaaaaatcaccaccaccaccaaaaagaaaaacaaaattttttggctcctggattttcaaaacacatggtagacctctctgattttaggcttttattgtttaaagacagtgtctcgctttatgacccacactggagtgcagtgccacgatcatagctcactgcaggcttgacctcccaggctcaagcagtcctcccacctcggcctcctgagtagctgcatgccaccacgcccagctaattttttaactttttgtagagacagggtcttgctatgctgcccaggttggtctcaaactcctggcctcaagctgtcctcccacctcggcctcgcaaagtgctgagattacaggtgtgagccaccctggcctgattttaggctttttttgtactggggagaagagactgtgagccaaagtgtagggtgccaaaaagagctttgtgggatgagattttagggcaaagctggggcagtgtctgacttggcggtggtcatgtgtactgatttaggggaaagatcttgaggttttctcaaataattcacctatccccgtgttccctcaagaaaggtcatgttgacctggaaccataggggaaattggtggggtgtgatcagggtcagccccagctgttgctgcccctgcagtgttttgtccagagcacttgcctgcaggtcaggataggatttcaaggccagttcaggagaaagtcccaacccaccagtgcaaccaacaaaagagtaagttttacctacagcctgggttttcacaagtagcatttttattcctcctgctgtctgacatctgagctccaagctctaaacccaacctgtattatatgcagcagcaggttatctttgttttaaatcacatttgttattctgtacttagtcacctttccgtgtgatctgcatttgaaatgttgtaaacttggtcagtatttccattaaaatatcagggctaatcttgtgtattttttttttgttcctaatgattttatagacaaagactcttggcaaccccaggagaaaaaaaataaagctgtcagtggagtactagggatgagaatgaaactggaggtctgtttctggtattatggcttcccgggactctacagtcctgtatggtgaaatacatttttccattgggatcgtcaatgccatgactgttctgccacctcaaactccagagtttctggtgatgtgcaagagttagcaatatacattcagtaaagcgtgtaatcgagtaagtcgtagtaacttgggcgtaaagctctaccaccctgctcactaacaccctgatctccgtccggtatgaaaacacctattccgggtagtctggctccacgttaagcaaacaccactttccgtgttcaccgacagctagagccagaggtctcccggttgctgcttctgaggctgggtctgcagcagctgaggctcccgcctgtcttgccgaatggcctaagtctctgtcttgagactttcgagagttctaatcgtcaaatttcccattttattttgagattttccctgcggcccactatttcggacaacataggagagcctcaaaaacagtttctagcttccaactcggctcaaagttcagacagcagctgggcttccgagagccgccggtgttccaagaaaagctgcccgggactgggaggcgccctctggacgccggaacctttggtttcctgccgtggagcggaacggtagcgccaggggccttccggaaagaggagcgagagcccggcgatggcggctgcgccggccttgaagcactggcgcaccacgctggagcgggtggagaagttcgtgtcgccgctctactttaccgactgtaacctccgcggcaggtgtggcccctggtcccccgcagccggccgaccgcaaccgtgcgcctcaagctttccttccggggagaaacctaagctgcagccacccgggccgcgggacaaagtgcccgccgcgggcagggcaggggccggggaggagggggtagggaatggactgtgccgcggagcggccaggcagccctcttggcggaggatccagggaaagtgcggccccaccggccagctggcccccaggcggaaacggggcggcctccagcatgtgcccaccggcccgtcccacgcaggctttttggggccagctgccctgtggctgtgctctccagcttcctgacgccggagagacttccctaccaggaggcagtccagcgggacttccgccccgcgcaggtcggcgacagcttcggacccacgtaggtaacgcccagcgggtgggcggggccacaggcctaggggaagtcccaacccagctcccagccacaccttcgttgtctgccctctgccgtagacaactacgtgggatcgagcagcaccctctgctgggagcagcaccctctgctgggaacagctctctggtccctgggtcttcaggggatggttttcattcccacgtggccgcctctggacatcccttaggaagggcaccytagggatcacgaacctttgacgcctctgcctgtttccctcatcttgcttctcaccttgttgctcctttcttgtgactcaaagctgagtaccttgtgacactgcagatgcttggagagtttcaagcccctgccgacactttatccaaggaaggatatcaggataggacttctacctctaggcctatcacaacagctctcttgcagatggtggacctgctggttccgggtggagctgaccatcccagaggcatgggtgggccaggaagttcacctttgctgggaaagtgatggagaaggtctggtgtggcgtgatggagaacctgtccaggtgaggaaccctgtcctagggccaggtatggccacatttcagccctgaaatgactacagcccttcttctgtggactctggagaagccacagctgagttgctctgcccacagggtggtatcaggatttcaggactagggaagttgccacttgggcatctgtgcaattggtccttagtttttattgtgtataatacaaacttataggaaaacatttcaaacagttctagataaagtaatggatctctccttatcacccatcccattccccagctataaccactgttaagtgtcttattcatgctccacccttatcaggtttagtccttatactcctatctagtaggtctttatacccatttacaaattaagaaacagatgtgtagttgactcactcaggttcacacagcttctatttcaaattggactgactctcaatctggggttaagactgttcttcctggctacaagaaggcagagaccatcccttcctcccttcactggctcagcaaatatctcctggtgtccattctgggccatacccttaagcactagggtgtagcagggaatgaggcaaacctgcccctgacttcacggagtttctttcccggtatttatttaggggtgcagaggccaccagaatccacactcaggctgcctaaccccttcccagggcccttcccataagaccatgggtttgccactggtaaacaggggctatttgacggtcatggtgctggctgccatgggagttggggcatctactgccaagggtccctgatttgccaatcttggccctgcttgggagagaggacccagagctgggaaccagatggaggggcctgactccccatggcttacactttacctgaactgtccaaaagcctcaagccttgtctctctcactcccctccctactagggtttaaccaaagagggtgagaagaccagctatgtcctgactgacaggctgggggaaagagacccccgaaggtgagtccctgtgccctggttgaccagtgctgtcagggagggagtaccagtgagcaaggaggagctgaggcccagagtgatctcataagcccgcctctgctctagcacaatcatcctcacatctcattgtttgcttttaaaagcatgattttttcctaaccataaaaataatgggctgggtgcagtgacccacactaccctgggaggctgagtgggaggatcacctgagcccaggaggatgaggctgcagtgagccatgatcacaccgctgcactgcagcctgggcaacagagtgagaccttgtctcaaaaataatagcaatgtttgcctgtggtaaatacaggaaagcacaaagaagtaaataactaccgttattccactccctagaatagagatgaacattattaacatctcagcattcatgttcttttttttgagacgaagtctccctctgtcgccgatgctggagtacagtagcacgatcgcagctcactgtaccttctgcctcccaggttcaagcgattctcatgcctcagcttcccgagtagcagggattacaggtgtgtgccaccacgtccagctattttttttttatttttggtagagaaagggtttcaccgtgttggccaggctactctcaaattcttgacctcaggttatccgcccctctcagcttcccaaaatgctggaattacaggcgtgagccaccgcacctggcccagtattcatgttcttggtgtatctttccggcatagttttttttgttttttcgggggggtttttttggatttttttgagacggagtttcgcttttgttacccaggctggagtgcaatggcacgatctcggctcactgcgaccgccgcctcccaggttcaagcaattctcctgcctcagcctccctactagctgagattacaggtgcccaccaccatgcccagctaattttttgtatttttagtagagacggggtttgactctgttggccaggctggtctcaaactgctgacctcaggctatccacttgcctgagtctcccaaagtgctgggattacaggaatgagccaccgtgcccggctcatcccggtatagtttttactagttaagattgtatcctgacttcttacattccatgttataacatggacattttatgacaccattaaaaacacttcttagacattatgaatgtattttatatagattgaacactgtttcagatgctttcagacactgggagtatggtggtgaataaaatagcccttgccaacaaagggagacagattcactcatataattacaaaactgagggctctggaaggaaatcctgggtactccactgaggaatttgctctagacttagcagcgaagtggagtcaggaaggcctccctaaggaagtcgtgtttgctctctgaagcctaagtatggcatcaccacagcccagcctgttctccaatgaatggcccgcccatgttggccgtgttggttttagatcttgggtctaaaagtttgagcctgggagatccgaacatgattttaatatgcaaagagggttccaagaccaaggcagtgctttgcaaagacaactttggaaatataagactaaacagcagcgtactttacatggttccaaactttgctacttattctctctgacagcaagacatgggatccatctggtgtttgtaccacaaccctcccacatgcactcttgtcacactgtgggatcctctgggtagtggatcctggaagcagacaggttgggctcagctggatgcctcctgggtgcccyttccccaagtccccggagtactgtgccagtcccttagcctgaggctgtctccccatctttgtagcctcactctctatgtggaagtagcctgcaatgggctcctgggggccgggaagggaagcatgattgcagcccctgaccctgagaagatgttccagctgagccgggctgagctagctgtgttccaccgggatgtccacatgctcctggtggatctggagctgctgctgggcatagccaaggtacttgacaccccctgtaccccctgctaccctctagagccctgctccaagaaggttgttctttgggtcagataaatgggactctgggaatccagagtaggacgagggtttccacctgcttgagggttgagagaattttcctatgtgaaggggaggagggagacggtgctgagcagggggaccagcagggaaaaagggttgggggtcaggggagctctgctgagagccctgagatcagtggagcctaggtctggaagctgtgcttgaaaaagggattaaggggcagaaccctgctgcagggcctcgggaaggacaaccagcgcagcttccaggccctgtacacagccaatcagatggtgaacgtgtgtgaccctgcccagcccgagaccttcccagtggcccaggccctggcctccaggttctttggccaacatgggggtgaaagccaacacaccattcatgccacagggcactgccacattgatacaggtaggacagcagctggttgggctggctggggaagcaggagtgcccttgaagacctggatgtgccctagaagcactgtgtgatgctcagcaagttcttgctcctcttggacctgcgttttccccgtctgtaaaacggggccggggggctggactgtgggctctgcttgctttggattcactttttttttttttgagacggagtctcactcttgtcacccagggtggagtgcaatggtgtgatctcggctcactgcaacctctgcctcccgggttcaggcgattctcttgcctcagcctccttagtagctgggattacaggcacccaccacaatgcctggttaatttttgtatttttagtagagacggggtttcaccacgttggccaggctggtctcaaactcctgacctcaggtgatccgcctgccttggcctcccaaagtgctgggattacaggcatgacccaccgtgcccagcctcatttattctttcaacaaaatctgatgcctcatggggcccatgctagatattgagggtaggattacagagacagattcagcaggcagagttggtgtcacaatggtggggagtctgaggcactggagagcacaggagaggtacttactccagctgggttgggggattccagagaggcttcctggacaagtttgcagtgtctgagttttacgggaaatccacatttttaacaagctcctgaaggtattgattctgatgcagccgaagttttgggatcacagaacaagggctttctctgctgtgccaagatgtagggtaaggtgtgagaggttctgggctggtaagggaggaactgcagcctgggagtcaggagaggctgtagcacctctggtaggacagctggctccatcctgggagccatgcctctgttcccaggtatacatcaagtttgtgcaggggcagggtagtccctgctacttctcgtaggatcctctaggggatgtctaattccccaagaggactgaggctattctggggcctggagcctccatttcctgacctgtataattggcctcatagcactgccgcctcctttccccagcccctcctcccacctcgctggagtgaagtgaagtgaccacttaggagggacaccacagggctttccagggtgaagggcctgggatgggaggggggctaggtgaccctctggagtcccagcccaggcctggtcagccttgctgctccctctgtcctccacctcactccccgtatagcctggctttggcccttcaaagagactgtgaggaaatgtgcccggagctgggtgaccgccctgcagctcatggagcggaaccctgagttcatctttgcctgctcccaggtcagagggacagctgtgagggaggagggaagcacgtggccctccctggagctccacaggccctgaaggcttcccaggcctggggtcagggctgctcctcaccctcagccacacactgagtcccatatgctcagtcctgggtggggcccttgtcactctggtcccagctcccttcaacctgcccacaggcgcagcagctggaatgggtgaagagccgctaccctggcctgtactcccgcatccaggagtttgcgtgccgtgggcagtttgtgcctgtggggggcacctgggtggagatggtaagtgcactgggcactcctcagccttgaactgtatgacaacagccttccctcaggtagccccgccctcccggctttgctggtgagtttccacgggccactcatccccgctgtgtggcagggctggctcattagtccctgggatctcaaggcctgggacttcaagggggagragagcctccagcgctgtgacaagttgcatggcctagtcctgggcaccccctcaggcagatggacagtcaggcctgaaggacaggggcccttcctgagttctggctgtaactcccatgtttgagcagccctggcttctcctgcagsgattgggttggcctgagcgcctgcctgctccccgtccagcgctgacctgggctgcctcccacttccttcactgccaggatgggaacctgcccagtggagaggccatggtgaggcagtttttgcagggccagaacttctttctgcaggagtttgggaagatgtgctctgaggtaggctgagagctgctacaccaggctgtgggcgagtggggctggcgctcgacttggagtgctgaggggctgaggctggggtgagtccgcctggagctctggttcctgcactccaggatcctctttctccacagttctggctgccggacacctttggctactcagcacagctcccccagatcatgcacggctgtggcatcaggcgctttctcacccagaaattgagctggaatttggtgaactccttcccagtaagcaggcccccggggggtcagggtcagagtgggcctcagtcccgcctggcccatttgcctctcccccttattgtggggtcctagacagaccaccaaaccctcactctgcctctgccagggtcacatagcaggcaggggcaggaccaagtctggaaggcctggctctgcctcagccctgactctggcctctctgccctgcttctgtttccctgctggtagcaccatacatttttctgggagggcctggatggctcccgtgtactggtccacttcccacctggcgactcctatgggatgcagggcagcgtggaggaggtgaggggtcacctagggtggtggggtaggggcaggctggagagggctggcttgttccaggctgatccatgctggcctgccctcacctgtctaggtgctgaagaccgtggccaacaaccgggacaaggggcgggccaaccacagtgccttcctctttggctttggggatgggggtggtggccccacccagaccatgctggaccgcctgaagcgcctgagcaatacggatgggctgcccaggtcaggccgggccttggctctcctttagccccaccctgggcccttgccatgagccctgccttccctcagacattgggcccaacccctcctctggaccttgtcctgtcccaatcctagaccacgggttcctccaaacttccaccctgggggtgggtgggggagaagctgaagctggtaagggctccagcccatcagagagagaggctctcctagggcgtccagggctggccatctgtgaacggggagctttctggagtggctcctctctgtaggagctggatcctttgctttggtgtggaagaagggtgagccatgtggtctccaaggctgggagacctaggcttgtggtctcctcagggtgcagctatcttctccaagacagctcttctcagcactggagagtgactcagagcagctgtgcacgtgggttggggagctcttcttggagctgcacaatggcacatacaccacccatgcccaggtcagggggaggttgcagggctgtgcagggagggtgtgcccttgatctgcagagggtcagagaaggcagcaggggacagagcccaggccagatctaggggaagagaagtttggaggagagaagttcaagacctgggttggtcaagaaagcttgaaggaggcagaaacccctgaagaaagaagggtttgggctgcggggagaagagggaaggcatttaaggcaggtcacccgccagaggccttctccacgaggcccttggtgagtcctcagggattctgagcaagggagggctttggaaggtgtcctgggacagctaagcaggctccagactaatcttcccatcctgggctcagatcaagaaggggaaccgggaatgtgagcggatcctgcacgacgtggagctgctcagtagcctggccctggcccgcagtgcccagttcctatacccagcagcccagctgcagcacctctggaggtcagcccagttctgtccctgccatccacctgactgctcactgcagttacctctgtgcctgcccctcccagccttcccatccctgcccttggcccctgcaggctccttcttctgaaccagttccatgatgtggtgactggaagctgcatccagatggtggcagaggaagccatgtgccattatgaaggttaggctcacaatagtcctgcctgctctctccaaccccagggctgagcccagagtgtcccctgtgggatacccatgggcacattccagacctgttgcccacctatgaccagccagtctttcctcagacatccgttcccatggcaatacactgctcagcgctgcagccgcagccctgtgtgctggggagccaggtcctgagggcctcctcatcgtcaacacactgccctggaagcggatcgaagtgatggccctgcccaaaccgggcggggcccacagcctaggtacgagctgaggggaagggttgctactgcagcaggaaggatggaggccagacagatcaggcctgggataccccgagggatctgggtgcccctgactggagagtagtagcacatcttccaccaacccatccccacctgcgcaagcttcctgaaaggtcaggaaggctgcactgatgcccaggcctcacccccagccctggtgacagtgcccagcatgggctatgctcctgttcctccccccacctcactgcagcccctgctgccccagcagcctgtgttcgtagtgcaagaggtgagtcctgcatgccctggggggcaggaactgtgctgggatactttcttacaactgagggtcctgagctcccctgtctggagcaagtggtgaggcggggctggggttggggtgggaagacttttggtgtgggaagcccctacagactcagcctcaaggcctcctcccacaaagactgatggctccgtgactctggacaatggcatcatccgagtgaagctggacccaactggtcgcctgacgtccttggtcctggtggcctctggcaggtgccaaatcctcattgccctttcccagtgcctggcaagtagaccccaggccatttcctctctccccttgccacaacactgcccacagcagcccaccagtggctctgggctggaacccacacatggagcagggcaggctgggcagtagtcccctgtccactgggtctactcactccaccctaccccaccaagagcagctggagacagcgaggtcagttggttgtacagcaccaatcccatgtccttccagggaggccattgctgagggcgccgtggggaaccagtttgtgctatttgatgatgtccccttgtactgggatgcatgggacgtcatggactaccacctggagacacggtataggctgggcagcatgtggggatggtggargtggtgggaacacaggctgctctggatcagtatgtccacycctgtcccataggaagcctgtgctgggccaggcagggaccctggcagtgggcaccgagggcggcctgcggggcagcgcctggttcttgctacagatcagccccaacagtcggcttagccaggaggttgtgctggaygttggctgcccctatgtccgcttccacaccgaggtagtcggggggtagggggtggctgttttccccaagtgtgcttggtaaggaggggccagccccaggccttggtgtgtctcttscttccctgactcccaccctccttcccactcccaggtacactggcatgaggcccacaagttcctgaaggtggagttccctgctcrcgtgcggagttcccaggccacctatgagatccagtttgggcacctgcagcgacctacccactacaatacctcttgggactgggctcgatttgaggtctgacatggcagggtgggagtggccttggactcctccctggctggggagactgcttgtgtggaacaggctggggaggaagaggataatcaacatttgctgcttcctaacgtgtgtgccaggcattgcactaaatgctttacattggcaaggcacagtggctcacgcctgtaattccagcactttgggaggccgaggtgggtggatcacctgaggtcaggagttcaagaccagcctggccaacatggtgaaacgccatctctactaaaaatacaaaaattgggccgggcgtggtgactcacgcctgtaatcccagcagtttgggaggctgaggtgggtggatcacgaggtcaagagatcgagaccatcctggctaacacgatgaaaccctgtctctactaaaaatacaaaaatttagccgggtgtggtggtgggcgcctgtagtcccagctacttgggaggctgaggcaggagaatggcgtgaatctgggaggcagagcttgcagtgagccaagatcgtgccactgcactccagcctgggcgacagagcgagactctgtctcaaaaaaaaaaaaaaaaaaaatacaaaaattggccaggcgcagtgttctcaggcctataatcccagcactttggaaggccgaggtgggcggatcacgaggtcaagagatcgagaccatcatagacaacatggtgaacccccatctctactaaaaatacagaaaaattagccaggcgtggtggcacatgtcctgttatcccagctactcgggaggctgaggcaggagaatcgcttgaaccctttaggcggaggttgcagtgagctgagattgtgccactgcactccagcctggcaacagagtgagactccatctcaaaaaaaaaaaaaaagccgggcgtggtggcacatgtcctgttatcccagctacttgggaggctgaggcaggagaatcacttgaatcctggagggcggaggttgcagtgagccgagatcaagccactgcactccagcctgggtgacagactgagatcctgtgtgaaaaaaacaaagttttacatttaatttgatactcatgatcattcgatggggtgagtactattatttattcccgtttcacagataaggaaactgaggcttakgcaggttgggtggcatgcccagggccccgtacagtgggagctggagttcagttgtgtggttctagagcttgtgctcggcctagtgacaggagctctggagtctgggagcacaaagaggggcacagggccaccaagtgggtcttggatctgccctccaggtgtgggcccatcgctggatggatctgtcagaacacggctttgggctggccctgctcaacgactgcaagtatggcgcgtcagtgcgaggcagcatcctcagcctctcgctgtaagtggggtacccaccaggcctgggagctggcatggagaaatgggtcttcccgaccacaactccaacagcttcagcgtggcccctacgcgccctcctcaccccagcttgcgggcgcctaaagccccggacgctactgctgacacggggcgccacgagttcacctatgcactgatgccgcacaagggtgagtgctggggacggtggggccttcctgcagccctagacacctctctgcccttccctgagcccaaaccccagcaacctggcttcctgccccttctagggacaggggagggtagcccccattctccaccagcattgtttcctggtcgtaccccaggctctttccaggatgctggcgttatccaagctgcctacagcctaaacttccccctgttggctctgccagcccccagcccagcgcccgccacctcctggagtgcgttttccrtgtcttcacccgcggtcgtattggagaccrtcaagcaggcaaggggtgggacgtgctggggayggggttccgaactgggcctgccctcggcccctcccaccagacgtgttcctctgcaggcggagagcagcccccagcgccgctcgctggtcctgaggctgtatgaggcccacggcagccacgtggactgctggctgcacttgtcgctgccggttcaggaggccatcctgtgagtggcggtgtgggattggggcgggggtcgagtctcgccctcgcagagccttcatggcccctcctgttctccagctgcgatctcttggagcgaccagaccctgctggccacttgacccttcgggacaaccgcctgaagctcaccttttytcccttccaagtgctgtccctgttgctcgtgcttcagcctccgccacactgagtccctggggctggggttttgtttgtaraaggctytggggactcctaatttytgcttccccagcctaaagcagggatcagtcttttcttgtggaataaatccttggatcgggaaccctgctgctcagtccccttagggcccatcctcacgcttggggtgggggtgggaagtctggggtgggatggcttcccaggtatttggtgggtaggggcaagatcctaaggtacctgtgcgtgcagggtctgggttgcagcccccacaggagagactggggacctcgagscaccaaaagccagtgaagagaccatgagttgagaagcccctcccctgtgccagcaggtaaagggcctgggcctggggctggggaggggccgaagggtgggttttgcctggctcctgccaggatgagggggcagccctggaccctggagaatctggactggaggagctctggctcctgggctgcctggggccagggtctttgtaccacctctgaggggctgtccttgcagaggcaaactgtcctctgatagagtcagagccttgaggactgggatgggggctcagtttgccttgtgaggagctgggccttctgtcaccaggaccggacagcaggcccttcctacctggccatctcagaccaagaggtgccaagaagttcaaatgtatcagtttattaaaaatgcagcatttttcacatgagctttaaagatgtggaagatggggtacaattaaaaccatgagagttgtgcagggaacagccgtagggcctgtttgcaccttcagatattgcctgctcccaaaaattcagacccccagatgcagggcaagacaataagaaagggtgagtgcaagcaaggagagcctcctgctaagaggctgaggtcccctctggttccaaggatgggatgtcagccttgaccttccggggtctgcagtggcctgggggaagaacaggcaagatggtcagctaagactccaggggctgccatggcagcctttctcccacctttgtacacgcgctcctaggccaccatcccatcctctcctgtagagccagtttctgggagtgatgaggaaagcccaccagaggctgcctgtcgccccttcctcctccccttcttgggcactgtgggagcttctgggtcctgctggaggctggtcccctcaggccgctgggttgcagtcctcttaggaaggtctctctttgcccttcgtgtcctggaaggggccttgcttggaggcaaagcgtcctggatggaggagacacgggtccctgaggggctcagaaagcagttcagaggttggttagggcccaccactccccccgccctcttagggtaaggcagctgcctgggaggggcagccagggctgcagagtgcaggggaggaggcgggagcaggcagccatacctccactctgtcctcaggactcagctgtgtggccttggatttctttttgcgggacttgcgccctgcaggacactggtgttggagttggagggtcctatcctgcccaggggtgactcccagggttgcagggggatagggtggagaagggtgctgtagcccttgcaggcgtgaagtcctttctgctctcttagcctattacattaggagtagcttacctttgggtgccaacggtccaggatccccctaaaatgggatggggataattcaggaatcagcctgggttggcacaggggcggtattccttggagaggcaggactcacacacacccatccagatcagtgtagcttctcccttaggaagcctctaggacatcccccatgttagagtccacatcagcaaagctgctctgcccttggctactttcacttgggctacctgccttgggctacttccactagctgcaaccctgggacgcatgggaggggaggggtgtgaccctcaggaacagtgtggtccttggagggtctagacagaccctgagcatcaccaccccagttattgtgaccccacgtttccacccatcagcctcctggggtctctgcctgtgtgaacagtagggcccaacctggaaccagatggtacggccatgccggtcctgcagggagctcatgcctggcatgccatagcagcgcagccaggctcgaaaggcagcaaagtcctcctccccgctctctgacccgtagcctttgccccctgtgggacagaggaacaggcagagatcagagggcaggctcaggttgggaggagtggggagcctggttagacctggcccagacctcagctacacaagctgatggactgagtcaggggccacactctccctcctctggtgatgtgacctcagctggtttcttcccactcggccatgggtttcccatcctggagtgggattaagaatccttgtcctggccctgtgcagtggccacacctgtaatcccgacactttgggaagcttagatgggagaatccctaggggccaggagttcaataccagcctgggcaacatagggagaccctgtctctacaaaaaaaatttttaacaattagcccggtgtggtggtgtgagcctgtagtcctagctacttagaggcagatgtgggaggatcacttgagcccagtttgaggctagtccaggcaacatggcaagatcctatctctaccaaaaatatatataaacgtgctgtgtgtgtgtgtgtgtgtgtgtgtgtataaatatataaaagaatccttgtcctgcctgtctcatgggcagcttggaggaaacactgtttttttgttttttttttttttgagatggagttttgctcttgttgcccaggctggagtgcaatggcacgatctcagctcaactgcaacctccacctcctgggtttaagcgattttcctgcctcatcctcccgagtagctgagattacaggtgcccaccaccacacctggctaattttttgcatttttagtagagatggggtttcaccatgttggccaggatggtctcgaactcctgacctcaggtgagccaccccactcggcctcccgaagtgctgggattacaggcatgagccactgcgcccagcctggaaacactattgacaagtgaggaggcctagtccattgagtatcagctagggctacaaacttccaaatcggtgaatcaggtccagagagggacaagtgccccagggttacacaatcatttgctgaagcagaggttgctgccatctttggcctcacccaactggaccacttccttgggcactgagtgacatagctccagcaggtctggattctgcagcttggtccttatcttctggctcagggtcagctccgggctctgaggaaggggcaggggcaggacctgtctgtcagcagggccatgtaaaggcagctgaccttctctctgagcttggtcagactttgggcagttcatcccctccccacccctgttgttgagctaagctggggacacctgaccccacccatctccttgccggcccatgtggacaccagtgtgccagcacgtgtgctccatccctctctgggcttaccggcctgtgctgctgcagggcctccaggaccgagcgggccttctcaaagggggggatcttcagcctgtagtgggggcaaggcaagccatgctaggcagtggggaatgtgggcacacctggcccaccgcagtccccatgcccatgcctgcttgctgaccggtacaggatctctgcccgcagatagttgccaatgccattgaagaacctctggtccaggagggcctcgcagatgggccggtcaaaggccttatccgctaggtttcgtagcacattctccctggaggaacacggtctgggtgcgtaagacccatccccaccctccatgggatggggagaggggctcagagaacctgtttctgggtgcaaggggaaggaaactgggagttacagttcctcttctccctgcccccgttttcctatctgttaaatgggaacatcaagggatttaaattcattgtgaaaggacggccaggtgcagtggctcatgcctgtaatctcagcactttgggaggccgaggcgggcagatcacttgaggtcaggaggtcgagaccagcctggccaacatggtgaaaccctgtctctactaaaaattcaaaattagccaggcatgatggtgggtgcctgtaatcccagctacttgggaggcctgaagcagcagaatctctggaacctgggaggtggaggttgcagtgagctgagatcgcagcattgcactccagcctgggccacagagcgagactccatctcaaaaaataaaaacaaaattaaaaataaattcattgtgaaaggtgaaaaatactgatctaaagtaacttgaggctggtgtggtggctcacacctgtaatcccagcattctgggaagctgaagcaggaggatcacttcagcccaggagaccagcctgggcaacaaggaagaccccatctctaccaaaaatttaagaagtagccaggggcttagtgatgcactcctgtggttccagttaatcaggaggttgaggtgagagaatcacctgagccctggaggttaaggctgcaatgagctgtgatggcgccactgtactctagcctaggcaacagagcgagaccctgtctcaaaaaaaaaaaaaaaaaaagcaacatgaggttgtatatgaggttgtgtgtttatcacctcagactcctcaggacatgagaacagtgtggccacaggacctcaagtgtgtttgcagtctggagctccctgtatagcatttgtggtgggttagagaccatatgtgggtttgccattggtagggtccattcttctcaagatcctggacattgtctggctctgtgcaggagatatgtggagtaccagtgagggccctagcagcccccaccccacctccaagggtcatgggtctcccctcctcaccgtgaagaggatgtgcatcttgtttctttgcggaaaagggtcatggcaagactgactaatgggtgtgatgagtgggtcagaagacagagttctggggtgaaggtacaagggtagcctgggaggtgccctgatccctgaggtaagccaattgccacacgccccagctgggggactaagaaaacagcccaaatgctcgtggtttgagagaaacttcagagccagctggcagagttaacttgtggcgtgactccccaggaaggctgaggtgggaggaatccaggaccaaagacagatgtttccctggggatgtgcttggagttcacacaggggaaggccaggagtcaactttcttctaaggcaccagagacatctccaacccatcccacaggtatccaagtctcctaagggtcaacggacgcacagcatcccccagaaagggagaacttgccaaccctactccaggcctctgcatttgtgactcttgccagttccaatgccttcctctggctggctccttctcatcagtcaggcctcagctcaaacctccctagagtggccattgctaatgtacccccaccctcggccaagtcatcctctacctccttcacctgttgggttttcctaaggcatgggtccatttctcattcccctatcctatgtgaacatcagttctgtgggagcagggaccacattcatcttgttcactgctgtaccccgagcccctagaacaaggcctggcatgaagcagagactcatacacgtttcctcttcagaggaaaggaagtggccaacactgtgccatgtgaggtgacctgcatcacatcccaggtggggctgttacaccctactgcaggcagggaagtggcgcagaggagaccacaggacacagaatactgggcaggccggatgtgggagaccacaaagcccaaggcggaagccatgtcatgagatagtcccctccccatccccttgaaacaattccgctcagcctcacttaccatattaaagcccctccaccttcttagcctcctgggagccctgagaggtggtgtgggattgtgggtgggagccccagcttctctgacactaactggccacatgtcctcagggcagtacctacccatcctcctcttggctctcctctctcctcccccatcagttattattatcattattttttgagacagagtcgtgctctgttgcccagactggagtggaatggtgctgtctcagctcactgcaaccccggcctcaccggctcaagcgcttttcctgcctcagcctcccaagtagctggggttacaggcatgtgccaccatgcccggctaatttttgtattttcagtagagacagggtttcaccatactggccaggctggtctcgaactcctgacctcgtgatctgcccgcctcggcttcccaaagtgctgggatttacagacttgagccaccacacccggcccccaattagttttgagtttccatgcccactggctcagggagctgacccaggacaggtatactgtcttgatctgcagatgagagaactgaggcccagaaggggcagggactcgccccttgttggccaagaaggcactaagagagtcaggtgtggagcccgcgactatgttcatcacacctggtgctggccctacctgaactgctggtactcctgcaagacacagggcccgcggcccggctgccactttcccccaaggtcccagcggccgaaccggcggatgtccacgaaacatagggcgagccgggggccaggcggggccgtgtaaaagc

SEQ ID NO: 93712 - DNA, 21146 bp, Homo sapiens
cttgcccaggtttcactgccatcttgttatttatttattttgagatggtacagtggcgtgatcttggctcaccacaacctctgcctcctgggttcaagcaattcttctgcctcagctgcccgagtaggtgggattacaggcatgccccactactcccggctaattttgtttttttttttttttttcagtagagatgaggtttctccatgttggtcaggctggtctcgaactcctgacctcaggtgatccacccaccttgccctcccaaagtgctgggattacaggcgtaagccactgcgcccagccactgccatcatctttaggaagagagaagtgaccatgcctgaaccagtcattggcaagaggaacggtgttatggactgaatgttcatgttcctccagaattcatatgctgaagcctctgtccacacatgcacaccagatgagggccatgtgcgcacacgaggtggctgtctacaaggccagaaagagggctgtcaacaggaactgcgtctgctggcaccttgatcttgaacttcccagcctccagaactgtgagaaagaaatctctatggtgtaagccactagtctgtggcattgttatagcagctcgagaagactaaggcagatgggcttccaggactggcccagaccagccagggctccttgtagaaaaggctgatgccagggttggcacatggagggtacaaggaggactcgcctggagtatcttaaggaacctatcgaagaataatggcttgttccactggccaaagatgggacaatttgaacatcaaaagagatacttactgactccactcctgacttctgcttctgaaaaaatgaagtaggtgttttccctattcctcccactaagtacagttaacaaccctggatgttacatataaaacaaacaaaaagactccgagcgatggagagaaggcaccctagcctggctgggatcctcaggacctgaggctccacagagagaaattcctggaatctggaccccatggcccagtcaggttacacaaaactgatcatcacagatctgtagaactatacaaaagtgctaacattcatgattagggtctcagaaggtaaggaggaagagagtggaatggaaaaagtattcaaaaaaataatcactaaaggccaggtgcagtggcccatgcctgtaatcccagcactttgggaggtgggacaattgctttagaccttgcaactggcctgagcaacacagggagactcagtttctccaaaaaaataaaaaattagccgatcatggtggtgcgtgcttatagtctcagctactcagaaggctgaggcaggaggatcaatcgcttgagcccaggggtttgaggctgcagtgagctgtgatcatacctctgcactccagcctggataacagagctgagaccctgtctcaaaaaaaaaaaaaaaaaaaaaaaaaaaatgtatatatacacacattggaatatttttcagcccttaaaaagcagaaggttctgtcatttgtgacttggatgaacctagacgacatgatgctaagtgaaataagccaggcacagagagacaaatacctcgtcacctcacttatgcctggagttgaaaaaaaggcctggggcagtggctcacgcctgtaatcccagcactttgggaagccaaggtgggaggatcacttaagcccaggagttcgagaccaggctgggcaacatggcaaacctgtctctacaaaaagtaaaaaaattagccgggtgcagtggcacatgcctgtagttccagcacttgggaggttgaggtgggaggattgcttgagccagggcggtcaaggctgcagtgaaccatgatagtgcccctgcactccagcctgggtgacagtgagaccctgtctcaaaaaaaaaaagttaaattcatagaagtcgacagtagaatggtggttagcagaggctggaggagagagagggtgggttgtggggaaaaggggagacaccggtcaaaaggtacaaagttccagttaggaggagtacattctggtgatttattgcccagcgtggtgaccagttaataatgatgtatacttcaaaatagctaaaagagggttttaaatgttctcatcacaaagaaataaatatttgaggtaatggatatcctaattagcctgatttgatctttttttgtgttttttgttttcttgagacagagtctcactctgttgcctaggctggagtgcagtggcgtgatcttggctcactgcaacctccgcctcccgagttcaagtgattctcctgcctcagcctctgtagtagctgggactacaggcatgcaccaccacccctggctaattttttgtattttttgtagagactgggtttcactatgttggccaggctggttttaaacttctgacctcaggtgatccgtctgcctcggcctcccacagtgctgggattacaggcatgagccaccgtgcccagccgatttgatcattccacaatatatgcatgtaacaaaacatcacactgtactccataaatttatacaattattatttgtcaattaaaaataaaactatagataagtcaaactggtattctaaaaaatgctccaccagccacagttgggcaagaagaagcaaaaatgaaaactgggaataaacaaagtgataaaaaaatcacaaggagactatccttggcaacatggcaaaaccccatctctacaaaaaaatacaaaaattaggtgtggtggtatgcaccattgtcccagctactcaggaggctgacgttggaggatcacctgagctcaggagttcgaggttgcagtgaaccatgatcataccactgcactccagccttgagtgacagagtgagatcctgtctcaaaaaaaataaaaaagaggttatcctgtctttttagtcaggataaccaaatagccctggtcaatgaggtaaagctatacttgacagatggattctatcaaatatattaagaatgacaattagaaaatcactttgaggctggacacggtggctcacgcctgtaatcccaatactctgggaggccaaggcaggtggatcgcttgaggtcaggagtttgagactagtcttggcaacgtggtaaaaccctgtctctactaaaaatacaaaaaattaggcgtggtggcccccacctgtaatcccagctactgggaggtcgaggctgcagtgagccgagattgcaccatcgttctctagcctgggcaacagagtgagacctgtctcaaaaacaacaataaaaacctaaaactttattttcttttgagacaggatctcaaagcgaactttcgtatttttagtaaagacggggtttcaccatgttggccaggctggtcttgaactcctggcctcaagtgattcactcccccctcggcctcccatagtgttgggatttcaggcatcagccactgcgcctggccaaaaacccaaaactttatattcattgaatagcaactacccatttcctccttcccggcagctcctggcaaccaccattctacttgctgcttctgtgtgtttaactgtttaggtacctgatataagtggaaccatgaagtatttgtctttctggggtttttttgcttgtttgttttatgagacagagtctcgctctgttgccaggctggagtgcagtggcacgatctcagctcactgcaacctctgcctcctgggtgcaagcaattctcctgcctcagcctcccaagtagctgggactacaggtgcccgccaccacacctggataatttttgtatttttattagagacggggtttcaccatgttggccaggatgatctcgatctcctgacctcgtgatccacccgccttggcctcccaaagtgtcgggattataagcgtgagccactgtgtccagcctaagtatttgtccttctgtgaccaacttatttagtgcaatgtcttcgaggttacccatgttgttgcatgtggcagtatttcctttttttaaaggctgaataatattccatcatataccacattttttttaggggggcagggatggggataaggtttcactctgtcatccaggctagagtgcagcagcatgatcacagttcactgtagcctctgactcccaggctcaagcagtcctccaaccacagcctctggagtagctgggactacagatgcataccactatgctaattcttttcttatatagagatggaatctccctatgttgaccaggctggtcttgaactcgtgggctcaagcagtcctcctgtcttggcctcccaaagggctgagattacatgcatgagccaccatgcccagcctattatatatcacattttaaaaaatccatgtatcggttggttgtttccacatcttgggaataatgcttcaatgtgtgttatctcttcattggggtggcagttacatgactatgtgtttgtcaaatattgcagtctgaaaggggtaaattttactatatgtaaattatacctttatttaaacaagagaacaacaaagaaattactccatagattatttggtgttcacaaggtatgaaccatatgttttctaatgcagaggtctggctgccacagcccctgtcttgatcagtttcagctcccaataaagtgggacaatgagatattgggtgcctcctgatatgatgcaattcaaagtacagagcagtggccaggcgtagtggcttatccctgtaatcccagcactttgggaggccgaggcaggcagatcacctgaggtcaggagtttgagaccagcctggccaacatggtgaaaccccgtctctactaaaaatacaaaaatcagctgggagtggtggcatatgcctgtagtctcagctactcaggaggctgaggcaagagaatcacttgaacctgggaggcagaggttgcagtgagccaagatcgtgccactgcactccagtctgggtgacagagcaagactccatctcaaataaaacaaaacaaaacaaaaaacaacgaagtacagagcagcacctaggaagtatccctgaatatttatataatcaagcctttagatctaattcccagcatgcaggatgaaccacagatagaggaccaatctctgtgacaatatcagtgacaccctgaggatacattcagacaaattgagaatgtgatgcagcatctatctcaaacaacaactggctgagactcttcagaaaggtatcatgaagataaaagaaggggatgaagtgggtgggagagggaaggtggtttcatctagatttaaaattattaaaaagatataatccagccaggcgcggtggctcacgcctgtaatcccaacactttgggaccccgaggtcgggggatggcttgagcccaggagtttgaggctggcccaggcaacatagtgagaccacatccttacaaaacatgaattagccaggcgtggtggtgtgtgcctgtagtcccagctacttgggaggctgaggctgaggatcacttgagcccgggaggtcggaggctgcaatgacccatgattgtagcctgggggacagagtgagaccctgtctatatgtgtatatatatatatatttgggacaattggggaaatctggatgtggactagctattagatgatattaagaagttactgttggctgggcatggtggctcacttctgtaatcccagcactttgggaggccgaggcgggcagattacttgaggtcaggagttcaagaccagcctggccaacaaggcgaaacctcatctctactaaaaatatgaaaattagccaggcatgtggcacacgcctgtaatcccagttactcgggaggctgaggcaggagaatcacttgaacccgggaagtggaggctgcagtgagccgagatttcaccaccgcactccagcctgggtgacacagtgagaccctgtctcaaaaaaagaagttactgttaactaatttctaataacttagatattattagatattgtcaactaatatcaagttgttaattctattcatttattatggcagaagtattttaaagtaaattagacaaatcatgacatttcatacccaatactttaacatgcatctctaaaaaccaatttcttacaaagccacataattttattacgcctaataaggagacgtagcagggtagtgtgaaggaggggaaatcgtggcgatgggttaggtatacacttagaatgaagtgcagactccacacggaggccctcccgaggcccaaccggacctgacctgggtttgcttctctgtcttcacctgccagcactaacccgcagctatactccagccacacaggacttctttgagttctttcagtgaccaatctctttctcgcctcagggcctttgtactggcggttccttccgccggacacgtcgggtttcctcgtttttgcggactggcgctttctgatttcagagactctccgcaacagaaccatctcaagtgggtctacctcctcgcctttttttgttgttgttgttgcttggctgcgcttctgacagggcaggccgtgatgatgtttgtttatgagttaggtctgactgttcgttggtgcttaagatccccaccgggtccctagggcctgtgcgtaccgcgcacctgtgcacgtcctgcgcgcagctgcaggcgactccgctctggctcgtcgctgctgtttcctgctgggggtgccgaccctgtcccacgctagctgggtgacttcccccaaccgcagagacagcggcgacccggggcctcagacctgcccccgcatctcgccggcgccaggcagtgggaagtcaggttcttccgccacctcccagccaggtaactgccccgaagcctgccccaaagcctggaaccccccaagctcggggaccccaccccgaagaatcgcgaccgcttccctgagggactacacctcccagcggctcccagcgcgctcccgggcaccgcccgttctggcgttaaccctttagtggctgcagtggcgacgagcggaacggagtgcgggttcccggggagggggcgtgcaggatcgggttgtggggggtgcgctgtagggctaaggagaagatgagctttggggggccctgaggaggaggggagtcaggattaaccgaggacagggtcgcagcgggggcatggggaggacgggcccgagagcgccgctcctccccaaaactaggatttggagcctcacgttctcccgcaaaacgagccctgtgggtgccaggccaggggcggctcccaggtgtggagggggcaaggtacgggcgtctgccgtcgctaagtgcccccttccacttaaggcacaccttcgcctccgattccgaaccgcccggggacagaggcaagtggcaaagcagggagggcggaggtgaggagtcgataccccccaccccagggaccaggcgctgccgcgggccctttccctcccccaggcccggggcaggagctcggggagcccttcctggtgcccgccgtcctcctgcggagccatggggagcggctccagcgcatggcggcagcccgcccgcctcgtcctggcccctgccctgacccgggggcggccgcggggatgtccggtccgtggggcaggcccggttctcgctgcggccaagcggccgattcggccgctcccgccgctcccccgcgccaggccgagcttcgctctttccctcggtggtgagcggccagatccaggcgggtcctaagtgtggggggaggggggcgcagggaggggcggccacgcgatcctaagaccctttcagatggtgggagagcctggagaaagagacagcgtgtgcggagggggtgctccctcagatggggggtcaggaagtctccctcaagtgtctgggacagagggacagcaggggccaaggcggagatgagatccgtgagtgaggggagccgggaagaagtaaggctgcagccgcggccccgcaaggattgggactttcgtctaaacgcggtggaagcccatggaaggaagcggttagcagcaaggcagagtcctgctccctctgcagccccagctcccagcgccctgggctttccaggcacctgtccgggtaggggattgagggccgtggccaggcccgcactttcctgccagccgcagctggccacatgcccatctgaccctccgagttctcctctaaaaatggggctgacagccgctacctcacaaagtccacaccgggctcaacccgctgccttcctccccaacaggactctgccaccctccctcaggatgcctgagggccccgagctgcacctggccagccagtttgtgaatgaggcctgcagggcgctggtgttcggcggctgcgtggagaagtcctctgtcagccgcaaccctgaggtgccctttgagagcagtgcctaccgcatctcagcttcagcccgcggcaaggagctgcgcctgatactgagccctctgcctggggcccagccccaacaggagccactggccctggtcttccgcttcggcatgtccggctcttttcagctggtgccccgcgaggagctgccacgccatgcccacctgcgcttttacacggccccgcctggcccccggctcgccctatgtttcgtggacatccgccggttcggccgctgggaccttgggggaaagtggcagccgggccgcgggccctgtgtcttgcaggagtaccagcagttcaggtagggccagcaccaggtgtgatgaacatagtcgcgggctccacacctgactctcttagtgccttcttggccaacaaggggcgagtccctgccccttctgggcctcagttctctcatctgcagatcaagacagtatacctgtcctgggtcagctccctgagccagtgggcatggaaactcaaaactaattgggggccgggtgtggtggctcaagtctgtaaatcccagcactttgggaagccgaggcgggcagatcacgaggtcaggagttcgagaccagcctggccagtatggtgaaaccctgtctctactgaaaatacaaaaattagccgggcatggtggcacatgcctgtaaccccagctacttgggaggctgaggcaggaaaagcgcttgagccggtgaggccggggttgcagtgagctgagacagcaccattccactccagtctgggcaacagagcacgactctgtctcaaaaaataatgataataataactgatgggggaggagagaggagagccaagaggaggatgggtaggtactgccctgaggacatgtggccagttagtgtcagagaagctggggctcccacccacaatcccacaccacctctcagggctcccaggaggctaagaaggtggaggggctttaatatggtaagtgaggctgagcggaattgtttcaaggggatggggaggggactatctcatgacatggcttccgccttgggctttgtggtctcccacatccggcctgcccagtattctgtgtcctgtggtctcctctgcgccacttccctgcctgcagtagggtgtaacagccccacctgggatgtgatgcaggtcacctcacatggcacagtgttggccacttcctttcctctgaagaggaaacgtgtatgagtctctgcttcatgccaggccttgttctaggggctcggggtacagcagtgaacaagatgaatgtggtccctgctcccacagaactgatgttcacataggataggggaatgagaaatggacccatgccttaggaaaacccaacaggtgaaggaggtagaggatgacttggccgagggtgggggtacattagcaatggccactctagggaggtttgagctgaggcctgactgatgagaaggagccagccagaggaaggcattggaactggcaagagtcacaaatgcagaggcctggagtagggttggcaagttctccctttctgggggatgctgtgcgtccgttgacccttaggagacttggatacctgtgggatgggttggagatgtctctggtgccttagaagaaagttgactcctggccttcccctgtgtgaactccaagcacatccccagggaaacatctgtctttggtcctggattcctcccacctcagccttcctggggagtcacgccacaagttaactctgccagctggctctgaagtttctctcaaaccacgagcatttgggctgttttcttagtcccccagctggggcgtgtggcaattggcttacctcagggatcagggcacctcccaggctacccttgtaccttcaccccagaactctgtcttctgacccactcatcacacccattagtcagtcttgccatgacccttttccgcaaagaaacaagatgcacatcctcttcacggtgaggaggggagacccatgacccttggaggtggggtgggggctgctagggccctcactggtactccacatatctcctgcacagagccagacaatgtccaggatcttgagaagaatggaccctaccaatggcaaacccacatatggtctctaacccaccacaaatgctatacagggagctccagactgcaaacacacttgaggtcctgtggccacactgttctcatgtcctgaggagtctgaggtgataaacacacaacctcatatacaacctcatgttgctttttttttttttttttttgagacagggtctcgctctgttgcctaggctagagtacagtggcgccatcacagctcattgcagccttaacctccagggctcaggtgattctctcacctcaacctcctgattaactggaaccacakgagtgcatcactaagcccctggctacttcttaaatttttggtagagatggggtcttccttgttgcccaggctggtctcctgggctgaagtgatcctcctgcttcagcttcccagaatgctgggattacaggtgtgagccaccacaccagcctcaagttactttagatcagtatttttcacctttcacaatgaatttatttttaattttgtttttattttttgagatggagtctcgctctgtggcccaggctggagtgcaatgctgcgatctcagctcactgcaacctccacctcccaggttccagagattctgctgcttcaggcctcccaagtagctgggattacaggcacccaccatcatgcctggctaattttgaatttttagtagagacagggtttcaccatgttggccaggctggtctcgacctcctgacctcaagtgatctgcccgcctcggcctcccaaagtgctgagattacaggcatgagccactgcacctggccgtcctttcacaatgaatttaaatcccttgatgttcccatttaacagataggaaaacgggggcagggagaagaggaactgtaactcccagtttccttccccttgcacccagaaacaggttctctgagcccctctccccatcccatggagggtggggatgggtcttacgcacccagaccgtgttcctccagggagaatgtgctacgaaacctagcggataaggcctttgaccggcccatctgcgaggccctcctggaccagaggttcttcaatggcattggcaactatctgcgggcagagatcctgtaccggtcagcaagcaggcatgggcatggggactgcggtgggccaggtgtgcccacattccccactgcctagcatggcttgccttgcccccactacaggctgaagatccccccctttgagaaggcccgctcggtcctggaggccctgcagcagcacaggccggtaagcccagagagggatggagcacacgtgctggcacactggtgtccacatgggccggcaaggagatgggtggggtcaggtgtccccagcttagctcaacaacaggggtggggaggggatgaactgcccaaagtctgaccaagctcagagagaaggtcagctgcctttacatggccctgctgacagacaggtcctgcccctgccccttcctcagagcccggagctgaccctgagccagaagataaggaccaagctgcagaatccagacctgctggagctatgtcactcagtgcccaaggaagtggtccagttgggtgaggccaaagatggcagcaacctctgcttcagcaaatgattgtgtaaccctggggcacttgtccctctctggacctgattcaccgatttggaagtttgtagccctagctgatactcaatggactaggcctcctcacttgtcaatagtgtttccaggctgggcgcagtggctcatgcctgtaatcccagcacttcgggaggccgagtggggtggctcacctgaggtcaggagttcgagaccatcctggccaacatggtgaaaccccatctctactaaaaatgcaaaaaattagccaggtgtggtggygggcacctgtaatctcagctactcgggaggatgaggcaggaaaatcgcttaaacccaggaggtggaggttgcagttgagctgagatcgtgccattgcactccagcctgggcaacaagagcaaaactccatctcaaaaaaaaaaaaaacaaaaaaacagtgtttcctccaagctgcccatgagacaggyaggacaaggattcttttatatatttatacacacacacacacacacacacacammgcacgtttatatatatttttggtagagataggatcttgccatgttgcctggactagcctcaaactgggctcaagtgatcctcccacatctgcctctaagtagctaggactacaggctcacaccaccacaccgggctaattgttaaaaattttttttgtagagacagggtctccctatgttgcccaggctggtattgaactcctggcccctagggattctcccatctaagcttcccaaagtgtcgggattacaggtgtggccmctgcacagggccaggacaaggattcttaatcccactccaggatgggaaacccatggccgagtgggaagaaaccagctgaggtcacatcaccagaggagggagagtgtggcccctgactcagtccatcagcttgtgtagctgaggtctgggccaggtctaaccaggctccccactcctcccaacctgagcctgccctctgatctctgcctgttcctctgtcccacagggggcaaaggctacgggtcagagagcggggaggaggactttgctgcctttcgagcctggctgcgctgctatggcatgccaggcatgagctccctgcaggaccggcatggccgtaccatctggttccaggttgggccctactgttcacacaggcagagaccccaggaggctgatgggtggaaacgtggggtcacaataactggggtggtgatgctcagggtctgtctagaccctccaaggaccacactgttcctgagggtcacacccctcccctcccatgcgtcccagggttgcagctagtggaagtagcccaaggcaggtagcccaagtgaaagtagccaagggcagagcagctttgctgatgtggactctaacatgggggatgtcctagaggcttcctaagggagaagctacactgatctggatgggtgtgtgtgagtcctgcctctccaaggaataccgcccctgtgccaacccaggctgattcctgaattatccccatcccattttagggggatcctggaccgttggcacccaaaggtaagctactcctaatgtaataggctaagagagcagaaaggacttcacgcctgcaagggctacagcacccttctccaccctatccccctgcaaccctgggagtcacccctgggcaggataggaccctccaactccaacaccagtgtcctgcagggcgcaagtcccgcaaaaagaaatccaaggccacacagctgagtcctgaggacagagtggaggtatggctgcctgctcccgcctcctcccctgcactctgcagccctggctgcccctcccaggcagctgccttaccctaagagggcggggggagtggtgggccctaaccaacctctgaactgctttctgagcccctcagggacccgtgtctcctccatccaggacgctttgcctccaagcaaggccccttccaggacacgaagggcaaagagagaccttcctaagaggactgcaacccagcggcctgaggggaccagcctccagcaggacccagaagctcccacagtgcccaagaaggggaggaggaaggggcgacaggcagcctctggtgggctttcctcatcactcccagaaactggctctacaggagaggatgggatggtggcctaggagcgcgtgtacaaaggtgggagaaaggctgccatggcagcccctggagtcttagctgaccatcttgcctgttcttcccccaggccactgcagaccccggaaggtcaaggctgacatcccatccttggaaccagaggggacctcagcctcttagcaggaggctctccttgcttgcactcaccctttcttaktgtcttgccctgcatctgggggtctgaatttttgggagcaggcaatatctgaaggtgcaaacaggccctacggctgttccctgcacaactctcatggttttaattgtaccccatcttccacatctttaaagctcatgtgaaaaatgctgcatttttaataaactgatacatttgaacttcttggcacctcttggtctgagatggccaggtaggaagggcctgctgtccggtcctggtgacagaaggcccagctcctcacaaggcaaactgagcccccatcccagtcctcaaggctctgactctatcagaggacagtttgcctctgcaaggacagcccctcagaggtggtacaaagaccctggccccaggcagcccaggagccagagctcctccagtccagattctccagggtccagggctgccccctcatcctggcaggagccaggcaaaacccacccttcggcccctccccagccccaggcccaggccctttacctgctggcacaggggaggggcttctcaactcatggtctcttcactggcttttggtgsctcgaggtccccagtctctcctgtgggggctgcaacccagaccctgcacgcacaggtaccttaggatcttgcccctacccaccaaatacctgggaagccatcccaccccagacttcccacccccaccccaagcgtgaggatgggccctaaggggactgagcagcagggttcccgatccaaggatttattccacaagaaaagactgatccctgctttaggctggggaagcagaaattaggagtccccagagccttctacaaacaaaaccccagccccagggactcagtgtggcggaggctgaagcacgagcaacagggacagcacttggaagggaraaaaggtgagcttcaggcggttgtcccgaagggtcaagtggccagcagggtctggtcgctccaagagatcgcagctggagaacaggaggggccatgaaggctctgcgagggcgagactcgacccccgccccaatcccacaccgccactcacaggatggcctcctgaaccggcagcgacaagtgcagccagcagtccacgtggctgccgtgggcctcatacagcctcaggaccagcgagcggcgctgggggctgctctccgcctgcagaggaacacgtctggtgggaggggccgagggcaggcccagttcggaaccccgtccccagcacgtcccaccccttgcctgcttgayggtctccaatacgaccgcgggtgaagacayggaaaacgcactccaggaggtggcgggcgctgggctgggggctggcagagccaacagggggaagtttaggctgtaggcagcttggataacgccagcatcctggaaagagcctggggtacgaccaggaaacaatgctggtggagaatgggggctaccctcccctgtccctagaaggggcaggaagccaggttgctggggtttgggctcagggaagggcagagaggtgtctagggctgcaggaaggccccaccgtccccagcactcacccttgtgcggcatcagtgcataggtgaactcgtggcgccccgtgtcagcagtagcgtccggggctttaggcgcccgcaagctggggtgaggagggcgcgtaggggccacgctgaagctgttggagttgtggtcgggaagacccatttctccatgccagctcccaggcctggtgggtaccccacttacagcgagaggctgaggatgctgcctcgcactgacgcgccatacttgcagtcgttgagcagggccagcccaaagccgtgttctgacagatccatccagcgatgggcccacacctggagggcagatccaagacccacttggtggccctgtgcccctctttgtgctcccagactccagagctcctgtcactaggccgagcacaagctctagaaccacacaactgaactccagctcccactgtacggggccctgggcatgccacccaacctgcctaagcctcagtttccttatctgtgaaacgggaataaataatagtactcaccccatcgaatgatcatgagtatcaaattaaatgtaaaactttgtttttttcacacaggatctcagtctgtcacccaggctggagtgcagtggcttgatctcggctcactgcaacctccgccctccaggattcaagtgattctcctgcctcagcctcccaagtagctgggataacaggacatgtgccaccacgcccggctttttttttttttttgagatggagtctcactctgttgccaggctggagtgcagtggcacaatctcagctcactgcaacctccgcctaaagggttcaagcgattctcctgcctcagcctcccgagtagctgggataacaggacatgtgccaccacgcctggctaatttttctgtatttttagtagagatgggggttcaccatgttgtctatgatggtctcgatctcttgacctcgtgatccgcccacctcggccttccaaagtgctgggattataggcctgagaacactgcgcctggccaatttttgtattttttttttttttttttttgagacagagtctcgctctgtcgcccaggctggagtgcagtggcacgatcttggctcactgcaagctctgcctcccagattcacgccattctcctgcctcagcctcccaagtagctgggactacaggcgcccaccaccacacccggctaaatttttgtatttttagtagagacagggtttcatcgtgttagccaggatggtctcgatctcttgacctcgtgatccacccacctcagcctcccaaactgctgggattacaggcgtgagtcaccacgcccggcccaatttttgtatttttagtagagatggcgtttcaccatgttggccaggctggtcttgaactcctgacctcaggtgatccacccacctcggcctcccaaagtgctggaattacaggcgtgagccactgtgccttgccaatgtaaagcatttagtgcaatgcctggcacacacgttaggaagcagcaaatgttgattatcctcttcctccccagcctgttccacacaagcagtctccccagccagggaggagtccaaggccactcccaccctgccatgtcagacctcaaatcgagcccagtcccaagaggtattgtagtgggtaggtcgctgcaggtgcccaaactggatctcataggtggcctgggaactccgcacgygagcagggaactccaccttcaggaacttgtgggcctcatgccagtgtacctgggagtgggaaggagggtgggagtcagggaaggaagagacacaccaaggcctggggctggcccctccttaccaagcacacttggggaaaacagccaccccctaccccccgactacctcggtgtggaagcggacataggggcagccaacrtccagcacaacctcctggctaagccgactgttggggctgatctgtagcaagaaccaggcgctgccccgcaggccgccctcggtgcccactgccagggtccctgcctggcccagcacaggcttcctatgggacaggggtggacatactgatccagagcagcctgtgttcccaccacctccaccatccccacatgctgcccagcctataccgtgtctccaggtggtagtccatgacgtcccatgcatcccagtacaaggggacatcatcaaatagcacaaactggttccccacggcgccctcagcaatggcctccctggaaggacatgggattggtgctgtacaaccaactgacctcgctgtctccagctgctcttggtggggtagggtggagtgagtagacccagtggacaggggactactgcccagcctgccctgctccatgtgtgggttccagcccagagccactggtgggctgctgtgggcagtgttgtggcaaggggagagaggaaatggcctggggtctacttgccaggcactgggaaagggcaatgaggatttggcacctgccagaggccaccaggaccaaggacgtcaggcgaccagttgggtccagcttcactcggatgatgccattgtccagagtcacggagccatcagtctttgtgggaggaggccttgaggctgagtctgtaggggcttcccacaccaaaagtcttcccaccccaaccccagccccgcctcaccacttgctccagacaggggagctcaggaccctcagttgtaagaaagtatcccagcacagttcctgccccccagggcatgcaggactcacctcttgcactacgaacacaggctgctggggcagcaggggctgcagtgaggtggggggaggaacaggagcatagcccatgctgggcactgtcaccagggctgggggtgaggcctgggcatcagtgcagccttcctgacctttcaggaagcttgcgcaggtggggatgggttggtggaagatgtgctactactctccagtcaggggcacccagatccctcggggtatcccaggcctgatctgtctggcctccatccttcctgctgcagtagcaacccttcccctcagctcgtacctaggctgtgggccccgcccggtttgggcagggccatcacttcgatccgcttccagggcagtgtgttgacgatgaggaggccctcaggacctggctccccagcacacagggctgcggctgcagcgctgagcagtgtattgccatgggaacggatgtctgaggaaagactggctggtcataggtgggcaacaggtctggaatgtgcccatgggtatcccacaggggacactctgggctcagccctggggttggagagagcaggcaggactattgtgagcctaaccttcataatggcacatggcttcctctgccaccatctggatgcagcttccagtcaccacatcatggaactggttcagaagaaggagcctgcaggggccaagggcagggatgggaaggctgggaggggcaggcacagaggtaactgcagtgagcagtcaggtggatggcagggacagaactgggctgacctccagaggtgctgcagctgggctgctgggtataggaactgggcactgcgggccagggccaggctactgagcagctccacgtcgtgcaggatccgctcacattcccggttccccttcttgatctgagcccaggatgggaagattagtctggagcctgcttagctgtcccaggacaccttccaaagccctcccttgctcagaatccctgaggactcaccaagggcctcgtggagaaggcctctggcgggtgacctgccttaaatgccttccctcttctccccgcagcccaaacccttctttcttcaggggtttctgcctccttcaagctttcttgaccaacccaggtcttgaacttctctcctccaaacttctcttcccctagatctggcctgggctctgtcccctgctgccttctctgaccctctgcagatcaagggcacaccctccctgcacagccctgcaacctccccctgacctgggcatgggtggtgtatgtgccattgtgcagctccaagaagagctccccaacccacgtgcacagctgctctgagtcactctccagtgctgagaagagctgtcttggagaagatagctgcaccctgaggagaccacaagcctaggtctcccagccttggagaccacatggctcacccttcttccacaccaaagcaaaggatccagctcctacagagaggagccactccagaaagctccccgttcacagatggccagccctggacgccctaggagagcctctctctctgatgggctggagcccttaccagcttcagcttctcccccacccacccccagggtggaagtttggaggaacccgtggtctaggattgggacaggacaaggtccagaggaggggttgggcccaatgtctgagggaaggcagggctcatggcaagggcccagggtggggctaaaggagagccaaggcccggcctgacctgggcagcccatccgtattgctcaggcgcttcaggcggtccagcatggtctgggtggggccaccacccccatccccaaagccaaagaggaaggcactgtggttggcccgccccttgtcccggttgttggccacggtcttcagcacctagacaggtgagggcaggccagcatggatcagcctggaacaagccagccctctccagcctgcccctaccccaccaccctaggtgacccctcacctcctccacgctgccctgcatcccataggagtcgccaggtgggaagtggaccagtacacgggagccatccaggccctcccagaaaaatgtatggtgctaccagcagggaaacagaagcagggcagagaggccagagtcagggctgaggcagagccaggccttccagacttggtcctgcccctgcctgctatgtgaccctggcagaggcagagtgagggtttggtggtctgtctaggaccccacaataagggggagaggcaaatgggccaggcgggactgaggcccactctgaccctgaccccccgggggcctgcttactgggaaggagttcaccaaattccagctcaatttctgggtgagaaagcgcctgatgccacagccgtgcatgatctgggggagctgtgctgagtagccaaaggtgtccggcagccagaactgtggagaaagaggatcctggagtgcaggaaccagagctccaggcggactcaccccagcctcag

SEQ ID NO: 93713 - DNA, 45012 bp, Homo sapiens
cctactggtattgatttaaaatatgctttatttccaatgaaatagcttttcttgaatttttgttagacacgcggtgcctcatattttctcaaacatcattaagaacagaaacatcctaaaaattgaagtcaagtacatgcagaagtcaagggtttttcagtcttaaggccctctgttgaccaggccactagaggcactgatgacctttgctggctgttcagagttttctgttgactctgaggctctggtgttggcttaaggtcagccattagaaaacagtgaatttacgctttggtcacactgtgggagtcaggctcgtgataagaaaggccaccagaaaagccagggaagttgtaagtaaagttcttttcatttggatgttgccagaaaaaacaggctgagaacaaagaccattattaaaaaataataaaatagtgggccaggtgtggtggctcacgcctgtaatcccagcactttgggaggccaaggcaggcggattacctgaggtcaggagttcgagaccagcctggccaacatggtgaaaccccgtctctactaaaaatacaaaaattagctgggcatggtggcacaggcctgtaatcccagctactcaggaggctgaggcaggagaattgcttgagcctgggaagcggaggttgcggtgaactgagattgcaccactgcactccagcctagctgacagagcaagactctgtctcaaaaataaataaataaataaatataataaacaataagtggccatcaataggagaatggataaattgctgtaatgtcatataacagatcactatatggtaatctgatgaattagacctatgcctaacaataatttgatatcattgcatatataatattaaatttttgaaaacaaagttgtaaaggaaggtagagtgggatagtattaaggtaaaatttttaagcagaagaaccaaaactatttttttatcatctatacttcaacttataaaacacttgaaccagaagtatacttcccaaatttagggttatgtttacttatctggggagaaagggaaggaaatgagattggataaatcttcaactgtacatggattaattttaatgttttcaaattaatattaagtctggtagaaaagaacatgttaaatttttctgaatactttgtaatatatattaaatattttatagttttaaaaacatgataaaaaatatgaaccagaaaaaaataaaataaagtaagtcattactcatcttcgagcattaacaaacttagcacatagtaggtgcttaataatcacttactgcatgataagtatgacacttcttatgtggcgtttccatttacctggagacagaccctttctggaatggctgacaatagtcaagtcctccttactcaaacccctacaaaagcctataaataaatgttcacgcaatttgaaacttgttattttcttaactttaatcattgtccaaagagaaattcctggtttctctctctatatatatatatatagagagagtgtgtatataattctggtaaaaaataaatttcgtcaatcaagaaattttcctcaggcaaatttcaactttataaagattccagatgtcaatgccttgtgggtcctggaaaatatgtcattgttttgtatttctaaatctcatacacaattattaaaacttttacaacataaccacatctcctgagactggaaacaggagcttgcagtcctttgcaaggattaggggatgctgcaatcctccccagggcctcagcatgggtcagcctccactacaccaaccctcgggggaaggtatctgtgcaaacattcagctgccacccctctgcctggccctgcctagaacagcagtgcattttgacagaattgtggagggaaacaccctccaaaaaagagcaaaacaaacaccgtagggttgtagcatttgtcctagggatatcattcttgcttataattataatatagtactttgaaacctaatactaatctctttttttcttttctgtatacatggcctttttcatagtgcacactcccgtctatctgctggggaatgggagttagagtaggaaattagaattctttcaatagcaattatgagtccctaataaggcaatgtgaggaaaaataaagattttagatatgtttatactgtcattaacacaaaaaaacctaggtctggacttgaacacggagattgctagaaaccagagagaactcaggataggatataagggaaattcacataagacagagagaaaaagtacaaagagggtctcctcttttaattatgagagtaagagggcaggagaaatggtgcaagaggcaggccaaggtctgcggtgaccacccacccttgggggtgaaaataaaggaggagggtgctatccctatccaactaggcataggccagcctgagaacactgcagccagaggcctgcatccttcgaggcagcctaagaaaggttgtgattctctaggagaatttccatattcagcttaggcctgcatccaagatggtgagggggagggccagcataatgctcccttagggccagatggggccagctgcatctcagtgagcgcattcaaggacccatagactacacctaagtagccacaggtcccttatgagaaaacagcggacaatgcctgagctgcatcatcacatagagccaagggataatacaaggaaatgagcacatggatccaggagcccttctcttgctccttgctcatccccaccattccattttgtacgtgtcacctcagatgggagcagtgggcacaaggaagaaattggatgaacgcgtatctaaaagaaaataaatcatctaaatgagactatttaaaccaaagacagagatgctgttaattggcaagtttaaaaacactgtcctctgctctatcttccaggagggtgcgtatactgagaaagactggatagctaatagaaaatactgtacattttctttgcacgtatatgtaataatgttaaactataacacatctataccataaaaaattgtacactcttaatagctccccttttatacaaaggttttgaggcacctataacctatgtattggaaaataaacactcaaggaaagatcaaaagatctttaattagttttagttatttgtcacgaaggagagaatgctgaatttacacttagtatatgtgttttaacatacagaaggttagtatgaggagtgtggtaacttgcgttttctttattcatggaatgtcaatatttttgtggaagaaaagaagcaagaactgtctttttcatgcctttatcttcagcacttcctagacttcctggagcatggtgtatgctcagttaatatttattgaatgaataaatgaaaatataaactgcttagcctcagaatggatagcttaggacatttttggagctctctcaagccattgctggtgctatgggctgaatggaagagccagggaatctgatgtggcaggaggaaagggctcttggttaccccatccccactctgagacccgccaaagaaggaggagatgtgaggactttgctgtgcgttgacacccctactcccataggctgtgaggctagtgtgtgtgtgcatgtgtaaggggcagtgtcttctgggaaggggtgcctgctgcagcctcaggtgaaccaatacaacctttgctgataccccatggagagacatctaagaattgagactctggtcccagggctagtctagcaggcagggaaagagcacaaaagcatggtctcagggaggcctaaatgctatccagttgtacatcaagactgtgctttctttttctaatattagaggttcagggacaaaattaagccagatagaaaactgtaatggaattgagaatgtaatagtgccagcatcataaaggaagacggtaggaagtgaagtgttttgtctcaggcaagacaccatggagcatggatttggcagatctgatgcaagaccctcctgatcacaaggctggactgagtcatgggctgtgcctggcacacagcctttgtttgcaaattacccagtggccaggtctgagtttgccttgtgcactcctgtgtgcataatttttaaaaacgaaaccttttcccctgctcttcaggtgactggccttttgcaatacagtcaatcaaaaagcattgctgagaaacaacctaccataagagcaggatcgagtcttgagaagattgaaaggtggggagaataatttaagactgcccagaaggcattaactagtattctactttcatcaacttttatagattccacaagattattctgaacttcatccaaatgacaattacttgcctaaatgtctgaccgagttgttacatggggtccataaatcttagatggcattacctggcactgttagtgatcaagatcactggttgactgaatctgcaccggaaacagacatgttaatcaacctagttaattcactgtggtaattaattactgaacacttatctaattagctaacatttttacctctcaaagccagaggtaaatgccagattgaaattggtggttctcctcattataccttaaaaataaaattgagagatatggcatggaatatcaaataaaggtgtgctggtgccagcagtagtgagtgagtatgttgagtctcaaaattgccagtggttcctgggaaggagcagcaggtagaccagcctgagatgagtcaggaggtaagagacagatgtatacaagctatcaacaagaactactgttctaagttacaaaggcaacacacatgttaaagactattttgcctcatagtcatcattaccttttccaggataagtgtcctcaggaattttttgctatctgggcacagttgcaaacgtctagttggtggtaacagtggcaagatttaggctacatggattccccaatatagagtcccctattctttttccttcctattctgtaaactttgctgtctgaccaagatggaccaaaggaggccagtggggcattcaaagaatttgccaagaatgactgtcaccaggaagaggagcatcttctaacatggagaactcagttaggatatgagcacttgattcttgactgtgatgcacattcttggaaagaaatccaagcatattaggaggtgtcttgtatttgctgctgtttggcatttatagacattttaggttctgatttgcctgaaagccatgagactacgttcttgaagctctcaccagcatagaacttcagctgattgctatgggagtgaagagaaaaaagatcaggatgaagttgtctagttttctagatttttctgtcccaaaagtgaaaagtgagaagcattagtgaaagtagtgaattcatgcctttcttggcagagactccgttttctgaaaatactatgctgtattattattccatgtggattaacccctggttcaataaattttaccaatggcctacagtttaactaaagaaagaggccctgggaaataagttttgtttaattatcagttcttctgtgtgaactggaatgagcaaagttcagataaagggacattctgaggtccagactttggatgcttycctaacttgtgatgacaaagaatgaaaacaagttggcgaggggctggatggagatggggaactgaaatgtttgagaactgaaagttctcrtatgtactggacacagttttgagaagacctggtaggtgtgttatagaaaccaaaagaggactcgtatccatatacagttgtctcaaagcaaataagcctgtttgcaacatcaaacctgtgttgggatcaaggacagatgtaagggaaagttctcaccaatagttaacaasctaaccaacctggtcaaagagctaggatgccacaccttcaaagggggcctatcttcttgaggaagtgctgctctgagagctgggctgtggtataaaagtcatgtcagggaggacatcttttatttgataggaaaatttaaaatgctaaaggaaaaattttcttagcaatttcasaggaaaacctaagttttaagagaggttatcattctractgggaactgaactattatgactaggtctataatttaataacaagtcacaatatctctctttcttgacatcaatttaaggtgacttttcacatagtagagagaatggcttcagttatacctgcctccaatagktccatgagatctgacaggaatacatatgttgggtgagtaattttgattttgtaaatttgttttgatcagatggwtgctccttggattttgtattaaatgattagatartgggcctctacagttaagcaaatttcttaaatgtagagattatatcactggatrcagctcataaagcaataaaaacagtggaaaatgtattttcaatgacatttttactccttggttttgggggttagggtttggctcatctaagaawatggggcaaaataaattataaaaaacatgcaaaagyttagccaaccttcagtagtaaacaaattcaaggttcagcctgggactcactatagagttcagcccttaattctaagaccatgggctgcaaatgagaaataattaaaagggcctcccagtgcctgagggaggtttaattgtattgcaggatattgtggagtgatttcatatgcttcrtgatggaccttacatagaatttacttctgaaataccgtctatgtgattcatctcatgggtagatataaaattgctgaagctgtctacaaatttagctccagttcctgccccaggttaacagaacacaacagagcattaatcatcatgaggcataaggagattttgctggttccctctgatttcctgagagttgtgtgaaatgtcttgcttagagcctccattatgtcagcatttcagaaaacactccatttgcccatcccaracagaggtagcctcctgcatgttcccttcttcagggaagcccaggagaaaragaaaaggaaaaattatgaagatgaaggtaatggcaaatggaaagacttctgctcagccagcactttcttttggttaccaatatttaatactcatcatgtagtgtaatttgtcacgatttactaaaaagactattctatgtgttaggaaaaggaagaagagtttgaagattcaacaacacatataaacctatttagtaaaaattatatattttggaaaaatcaaatattccaaaaactacattcatattgggtagaaatttggcatgaaatcccaaacaagttttttctttggtactgataaagtgatcatcttagaagtgcttctggatgagcccaatgaaacaagaaacttctatagacagtcccccaaattttctgacggagaaatcattagacrttgggacagggcatcaaggaaaactaatcctaatgaattaatagtattataattaatataagtgaaaataattaatggctctgctggttggagaatttctccttgaagataggaagtgtgtgtatagatgagtgattttaaaaacaccaaagcccaggtctccttgaccaagtcaatccaaatttctagagatagggtctagggataagtactctttaaagtgcccctggtggttctgatatgtagctggagtttggaatcactagggtagagcaatgagactcttttatagagtaatgattcatagattcagttaggaatccaaaggaatatttccaggtcgtgaaagtagtcttggcagagtgaaacagaaagtgtaatagaatttggaagaaaaagttkatggcagtgttygtcaaactttaatgtgcaygtgaatcacacagagtttgttraaatgcagattttgattcagcaggtatggggtagaatctaagactttgcattcctaatgagctccccagatgttcctgatgctgctggttcactgaccacacrctgtataacaagggactagggataaattcttgcctcacaagagaagaaaggaaatgtccctttgctttgagattttgaagcttgttctgtagtagtaatgtgtactaacaccacggaatactttatttttgaaactaggtacgtatgacccagtaactaattaaaaatctatwactctagatgtttttgagaaggaaattaatagtattttgttccamtttctgaacagttaaatttaattcaacaatagaatttgttaaaacttagggattcaagaaggatatttgagatagcttgcatcaggggattcgmagtctttctagagggatggaaacttaactatattgcaatgtgaaatgctatctaccagcattagcatgaaacaaatgctttgggaacacagtgagaaaaaaattaatactgatcaaggagagaagatgcttggaaaagccttcacggaagaggtaatatttgaattggaccataaaggaaaaytggaatttgataggtgaaaagtggaagaaagggggaaggatgtttgaaggacaaaggcctgaagcaggggttctcaactttggcttcaccaaagatcatttgagattttaaaaatacttaaaatctttagatttaaaatacagagtgtctaaattaattagtgcctggtcaccagtgtttttttgtttttgtttttgtttttaaagctccctggtaattttaatgcaaacccaagtgagaatcgataaagatatagaaagacacaaggcctggtaaaatgttttgaggtgtatggaatgaaagccatgtggaaaggctaggcatgatggctcacacctgtaatcccagcactttgggaggctaaggtgggtggatcgcttgaggtcagaggtttgagaccatcctggccaacatggtgaaaccccatctctactaaaaatacaaacattagctgggtatggtggcaggcacctgtaatcctggatactcagcaggctgaggcaggagaatcgcttgaaccaggaggcggaggttgcagtgagctgagattgggccactgcactccagcctgggtgacagagcgaaactctgaaagggaagggaagggaagggaagggaagggaagggaagggaagggaagggaagggaagggaagagaagggaagggaagggaggggaggggaggggaggggaggggaggggaggggaggggaggggagggggcaggcatgtggagagaaatggaggaacaaagaacaaagaagtctcagacagttcttggcaaagacgtcttgacccactgtggtgtgggggtagataacttttatcactaacaactctagtggcatatgattactatccaaataaccgaaagctacaaatgatatgcttcataaatatgaactagattgaattaaggtcattcttatagccgtcatcagctcactgtcttgaatttcgtggtatttcacaaagaaaagggaggaaggattggtgttctagctagcactgccgtgatgggggtttgagccagggscatggccagtggggtagaaagaaagtggtgtgttcagcatggttggtggagtcctcaatggcagcgctattcaaagtgttgtccatagaccatcaacatcaggaccaatgaggagcttgctagaaatgcaaattcggacacacatcagcaactcactgaatcagaatttccagaagaagagtccatgaagtgtccggctgattgttatgcatgctacactttgagaagataaaataaaatacaaataacttactcaaggttgcacaattaggatatatatggttgaacttgtactggaacccaggcaatctgaatccagagcccagtagtttatattccacagcctcccatgcaargaaattagatgaccgttacagtcagaactgaatagaaatggctgttttgtaatttactggttgttaatcttgcacaagtttctcaacttctgtaagccttggcttctttgtaaactaaattattaatcttacccagctaagagggcagttatgggacaaatgagttaatgcatttgttatatgcrgttttcttgccattttcatgctcagtgctatgcttggcacatagtgtgggcaaatattagccataattactgttatactacattgcttctcaacaaataatttaaccctaaaggaaggtttatgttcagactttctttcttgtgagctttctctcaaaattcttttatatcttctttgtataatttttttttccagaaaaaggtttgttcacgttaaaaatccttacttggatttgatggatgaagacattctctatcacttggatttgggaacaaaaacacacaacctaccagcaatgtttggagatgtaaaggtaaaaacatttctaatttcaggaaaaatgattgagttttctctactaatttttcttcttaccttgccaaaataatctatacacctttggctagcacagtcccaataggaactgaagtcacactcattctctgaaacaatttggaatgtgtatatcatgaacaatcatttccacctcaacaagacataaaggttcccaaactaaatctaatgcaaacatgttatttggctactctggcccctggagataaatataattttattgacaatactgctgggtgttgagaattcattatgttttaacagattcagctcactatttagcatctacatttatagcttaatctcactagttctcgttttattaactcataaaaataacccaacaaaactaacaatataatattatttcacttctgggaaataaccattatctaatatttcatattaagaattttgtttcataagaaatatttcatacaaattatttattaaatactaccataaaattgtacttctgcattatttattttatctgacatattttaattatataagcaatttgtgtacattatttaaaatagggaatacaaaaaagaatatgattgttaaaaaacacccaatagtcctgccacctaaacatagacatgatcaactcatttttttctttcaatcatttttaatgaatagactttaaaatagttgtaattatataactgcattctgcacttcatcatttaggtttacatcattaacatttctccatattattacattcttttgaaacatatcatttatgggtgtcaagtggtgtaccacacattacagagactattactgagttttatgttaaaatattttccattataaacaggaatcaaatgaatattttgtaactaaagattttctacatttaggccaatttgcttagggtgattcacagaaatggtcaaagagactgaatttttaaagaacttttgttttccaaaagactgtatctatttacagttgcactaatgragaatcgcgctgttttcatctgactttttcgtttctttagcaattacgagaacaaaaataaaagcgtcacatctactatctcactaacatctgcagatttagctcttttggatgggtttagcagatattaactctctccataaaacaaggaaattaagttcagagaggtggaggaaggttacagttacaccatagagtggtagtgctgagacctggattaagttcttccaagtccaatctctagggttcttgctcattgcactaggaggaccctttgagtcacagtaactcaggatagtccataattatttaatcctagctctttcacttacccagtgggtcaagaggcaggtgagaaaaggggaggaggaagaggttggaggcagaggaaaaggaagggaacaagaaagtaaggaaggagggaaggaaagaaaaaaagatgggaaaatgagaagaaatagatctattatgcctatgattagtaggtgctgagtggccttctcctgctccctctctcctaggaaggaaggtgtgagggcatgggtgggtgtcctggcagtgaggtgacccaccctttcttcactcctctccaggctgtgctccttgcctttgtgtggcctgcctctattttgcgctttgtcttctcaatgtaacctcttcccctgctgctgttttggtttacttatgctccaagagtcattgatcaaggcggtctttaatactcaataaccagattgtaccagaattcaaatgttagatttgaggttcatgcctctcaataatatcccaggacccttgtctagggatgactctgattaattgaaagacttttcacaattaatgaactaaggcacacagctggttaatacatttaaaagacttgagatatatatttgagacagaaagtgatttgctatctacatatcttgggtgtctgtgtctcctctaccatttatggtgcgctttctatatatcagactctgtgtggcacatgcaaatggtacattcagtccccacagcaactatagttattatctccactttacagatgagaaaacacaggctcaaatatatacatagtgttataacacatatatgtttgtctgtaataggcacaacacagctggtaagtcaaatagctgagattaaaccttaggtttctccgataaaaaaataatggctctttctctgttcaaacaaaacaaaataacacaaaaacaaaaacaaaaaaacaaaagcactatgttttagtactttttagtactccaagtattagtttctgggaaattattgggatggaaagctttgttttagagataaaaataaggggactcacatgtatgtatctctctcacacacgcacacacacagacacacacacacatacgcacacacacatagttgtctcatctcggttataatcccaggaaacagaccttcacgtctgcctgtccagattttgttcagcacttattctcacacactgtctgtcataaccactatccaaccttatacattcaccacccacctggttgtgaaccttcagtaaattatcttttggataaaaagacatgctctgtttcaaacatgttttatcccatcaaacagcaactctactgattgagccattttgatgaataggaggcaaaagcgtgtgtgtgtgtgtgtgtgtgtgtgtgtgtgtgtgtgtgtgtgtgkttgtaaattgaggagcaggtaacctagctccaaatgttcagaactggccatttaatctgaagtagaattttttcaaggcagcgtgtaaagtctgatttattctcatagatggtttcctcagaaacttgccttcctccagccatgttctcctctttgaatgagaacattctacattcaatttcttgagttccttaaatcccagggcagcagtcctggctaagaaaagaggacataatccatcagtacctgaaaactcaggcttgtcttcacagagatgataatcattattaataccattatcttccaagaaaggagaactctgggtgtataaagctgaaacttcagactccagcaatcactcctatttccttcatattcttaccatatttaaaaatttttgctacttgctactgcaaaatctcagtagcttaatacaatttaagtttacttctcactcacattaggtacaaggtgggagttcttagttgatggatggtttccctacatctggtgattcgaggacccaggctccttccataattgttactgtttccttcaaggcataaattgctgtttcccagtgtgtcaacacctgtccagcagatgacagcgacaatatgtagggtcaccaatacatcctccttgtaggatgggagatttctatgggctaggactggaaatggtacccattacttctgctcaaattctagtcactggaacccagacaaatgaccttgtctmactggaaaggaggctgagatgttaagtttagctgggtgcccagaaagaagagcaaactgtttaggtgaacagctaatcaatctctgccatactcactagaaagattcagacaattaatacatacggtggaagatccttagaagttatctattcaaatttaatggacatttataaaattctccactcaaacaaagcaggatatacatttccggggaaggcaggaaatagtttgaactgaggaaaaatgaaaatacaacatattatatctacagaatgtgggtagagtgctgagaggaaatttatagaattaaaggctaatgttggaaaagaagaaatattttttattatactttaagttctagggtacatgtgcacaacctgcaggtttgttacatatgtatacatgtgccatgttggtgtgctgcacccattaactcgtcatttacattatgtatatctcctaatgcaatccctccccactgcccccaccccatgacaggcccgagtgtgtgatgttccccttcctgtgtccaagtgttctcattgttcaatttccacctatgagtgagaacatgcggtgtttagttttttgtccttgtgatagtttgctgagaatgatggtttccagcttcatccctgtcccttacaaaggacatgaactcatcctttttatggctgcatagtattccatggtgtatttgcttaatccagtctgtcattgatgaacatttgggttggttccaggtctttgctattgtgagtagtgccgcagtgaacatacatgtacatgtgtctttataacagcatgatttataatcctttgagtatatagccagtaatgggatggctgggtcaaatgatatttctagttctagatccttgaggactagttctagatccttgaggactcgccacactgtcttccacaatggttgaactagtttacagtcccaccaacagtgtaaaagtgttcctatttctccacatcctctccagcatctgttgtttcctgactttttaatgattgccattctaactggtgtgagatggtatctcattgtggttttgatttgcatttctctgatggccagtgatgatgagcattttttcatgtgttttttggctgcataaatgtcttcttttgagaagtgtctgttcatatccttcgcccacttgatggggttgtttttttcttgtaaatttgctggagttctttgcagattctggatattagccctttgtcagataagtagattgcaaaaattttctcccattctgaggttgcctgttcactctgatggtagtttcttttgctgtgcagaagctctttagtttaattagatcgcatttgtcaattttggcttttgttgccattgcttttagtgttttagacatgaagtccttgcccatgcctatgtcctaaatggtattgcctaggttttcttctagggtttttatggttttaggtctaacatttaagtcttgccgattccctttccataagttctatgcattactgagagaggtgaagtctcaaactatgcttgtgagtttattaatactttatttctgacagtttttgctttattttttaagctctgtttttagtttttatacactttgaatgttatgtcttcttggtaaactgactcttatggttatggaatatccctctgtctctggtaattttctttgctctgaagcctattttgatattaatatagtcattccagcattagattaaagcttgcatggtctatatttctccattcttttacttttaatctgcctgtatcattatcattatagacagcatataattggatcatatgtttgtttattcattctgaaaatctctgtgtcttaactgggtgcttagacactttgcatttaatgtaattattgatatgtttggatttaggtttaccattttatatttgatttctgtgtattaagctctgctttccatttctttattcctctttccagctttcttttgggatagttgaacattttttaaatattccatttttatttatctgttatattttgactatatctctttgttttgtttcagttttgtttctctgcttatttgttttagtggttgctctaaggattacagtaaacatatttaatgtttaaaaatctacttttaatcaatgttgtacgacttgaagtgggacatatagaccttacaggaatatacaggaatcaaataaacaaaagaagtgcaaacttatactctgaaaacaacaagcattattgaaagaaattttgaaagctctaagtaaatgggaagacatcctatgcttatggattgcaagatttaatattgttaagataactatactaccaaaaatattctacagattcaatgcartccccattaaaattccagttgcctattttgcagaacttgacaagcttctaataaaatccacgtcaaaatgcctggaatgcaggatagccaaaatagtttttacaaaggagaaaaaagttggaggactcgcacttcccaacttcaaaacttattacaaagttataatgataaagacagtgtggtactaacatatggatagacataaagatcactagaacagaaccaagagaccagaaataaactctcacctttatgtacaactgattttcaacaagcatgctaagacaatttattgtgaaaagaatcatctcttcaaatggtgctgggacaactagatatccacatgctaaagaataaagttagatccctatctcacaccatattcaaaaattaactcaaaatggatgaaagacctaaatgtaaggcttaattctataaaatsttagaagaaaacatagacataaatctttgtgaccttggattaggaaatgatttcttatgtaagataccaaaacacaagcaataaaataaaaataaataaattgaactctaaaaaaaaaaggaagttatctattcaaaatcaacatctaaatatgtcttttataaaatcactaactggtatcctctaatctctcactagaaattttagtaatatgcaatgcattttgaatgtatttatattcccttgttaacacagaaaatgcataaaatgcaatagaccagattaatacaacatggcatagttaagccttttaagatgctagggatatctaaagctgagtttttttctggcaatcattaggcaaaatccttaacatatttttgtaatgcctctgactccttcccagtgtgtttctaacttctttgataaaaccaggacaattgatcattttgtttgagacataaacacagtaagtgtcacttaaggtcaatgttggttggtggtcttcagccatattttacttctcattaaagcagccagaccgaaaattgtgtccagaggtggtgtttagtgagtctggtttaggagtaaggaaggctttaagaaccaagctgcttctgtctgtgcatatgatctttatgtctccagaaatattcagaaattcctgtcgattatagcaatatctacagttcaaaggagaattcaaaccacaagctattctaacatctgttttggttttatggtcaatctgaatagttgtaatttacattcactggcaccacacaatgaggttattttcaaactaccgtactgtgttaaaaaatttccttggacttagatcgtgagccaagtcttaactatccataccaacaaagaagaaaattctaagaattatcaataactagtttaaaactcacctgaaaccatggtcttaacctctttgctaccagtctttatggcagacttctattgcagttcattactagcttaaggcttcatcagagaaactcataagaaggcagagaaaagacaatattaagggtagaagagaagcagagggcgtggatacagggttaattacacccctaattgagaaagagaatagctcaggaattattgctaaatggaaacaagatgcatcatgtactcagaccacccaatagttagagtaaatcatttgtgaatggggccgcctattctataacctcagttaggtatttcgttagacagatattctttatccctgtgatggaccttgtcagccctcccagtcctctgtccaatgctgcctacatcagccagataccaccaactgccttttcctcactagaggactcaaaccagcttcctgtgtactaaattctgcaatacaggaaaagtaacaagctcagaagcaggaatagaaaattgctacatgatataaaaaataatggttaccatttgcacatcactgagaacgtgtctggacttgtgcaatgtcctttgccatatgcaatctcacgttcttctttcaaaactctctgagaggtactgtgtttttcctattttggagatgttctgaggcacatcgattatttgtgtgacactgagcaagtttcttactcactgatggggttggagttcaaagccaggtttacctaacctcaaagggcagaccctccactatgttgtcttctctctctctgcattttcctcaccacttacttcagaatccgggaggacttgactcttgccaccttgctgtggcctgtgcttcctcctgggtgtgagagtctgctactgctcaccctcttgttgctgacccgtagtgcttctctgctcctctccctggcgtccacctctcccactcctggtacctggggctagggtacccctaaacagactgttgtatgagtaactgccagacaattgtattaccatcttctattagacaccgttgactgcaacacctatcctaatttcagagaaggtaaaatgtgaataaaacaaaaacaaaaataaatcactggaattgatgaaatgccacagggagatcccacatttacaataataaggcttgttccatgagaatttcttctgaataagaaatttaaaagtcttgacatgattcctttaaaattttaagttcacatactccatttcacaatacaaatttatgatgggggatggggaatcagaaaacatacctaaaactggtggttctccttttgctcttacatcactcacgtgccgtggcctcagaacttacatcctaagcatatgtcatggtaatgctcaacaataggctgtctatgtcaatttaagatgctggttggtgttcactataaacaaaaacaccaggaaacacctccttgaataatatcaacatttattttgattttgtgattttctttacaaatttagtgcaaaaaactttgcatctgttgctttatttacaggttgatgatgcaaattagctaattcatggaacataaaccatgacatctacacgtgttcttaagtaaattaactaaaaagtaaaataaaaacattagagttgaaactracccgtggttcttatcccagttactatggcaggcccttgtttatttttattaacagtttgtctgtgtcggtgggagccccaacagaatgaaagcatttgcactgtttatgcacaaggagctcgggtttgaggaagctgaagaagacataaaagacatctgtgctgggacagacagatactgtatgtacaaaaccgggcctgtgctcgccatcagtgtaagtatccatggttgcatttcagctagtcattgcaggctagagaaaaaagtgggaacttttacatgtaggagtctttttccctccagcttcgcattcttacacaatcaaacaaggtgtccaggtatgagttcattattggaaaaagcccccagggcagaacacagcatgcagcatcatttttgtttattagttaccacttaggtattcaaattagggggaaaatactcaaagcacccctcctttctctttactttgtaactggttaacacccctcacccccgccacggcaattttccttcttctatcccttacccagctttgggaatgttgagcttttagtacacagaggctaattttcaggactgctaaagtgctgctgtttaacaccataataagctcgctgaaaagctgctaatgcatttctactgagctcttgtaaattactctcctgcatttagaacatgtgaacagttatggaagcacacagtgccctaagacaaaatgaaaggggaatgatttgcagttttagggaagatgcagaccatttcccccttggactcagctgggcacacactgatgagggcgtatgtgcataggcatcccatttgccttcccatgtttgtctctctgcacagggctgtattctgaagcaataactctgaagccatcacatttctgggcactgcaaccctcaaaagaggcacaggcaggcatgccaggggacaggggaagagtctcctgcacagggtggcaattctaaggaactaagctgtaagtggctcctaccatagggaataggcatcatccattgattgccctacagtgtggacaatcattgatgaaaacctgcggtaaagaagggaaaattatgcaacaccaataaggcagctaaattgctctcctctctgggccaagagcgcctgaaacctgctcaaatgggagagtccattcagttattcacttgtgcattcaataaaccattacagaatatctacattagaaggaagctgaatatccactgatcttggtaaattttttcttaccaacatttagtggacctttagactataactgttttttgtatagtaaatggagaaggacaaaaaagtaagtttcttaaaaatgtgacactaccataaataagcagtaaaacttcacagtaagaaatgaaaacagcaatagactgatcctgtcctgtctgggaaaaagacctgaaatatgtgtgatgccaaggttaccaattagaaatgggccttactaggcaggcaggggattgacaaatgtgattccttctttgaaaattcttcctctccagtagtggttgaatggggtgcgtgtgtgtgaaagagagcacaagtccatttgtcattttatcaatgcgtaacataataagtggcaatcattaacttactaaatgtctgaactagaaggaatctaatagatcaaataatagttcatcttcttattttgcaggtaagaaaaaataatacttagagcatttattcattagtcacagagccagttccaaagtcctaaacttgttaatcttggatatacaaatcaatacaagttcgatgcctggctccaggatgcttactaaacatttgaaagtcagggcatatgcaatgggaaccagaaaggggtaacgcagaggttcgaagtttccatagctcaacattcttgatagacggaggaagctcaggtgaaaacatcatggtcacggccaatggttttccaaagtctttgtgtccaaaagtaggacacattgaagagcacatttgactctctgctgttatgtcaggaattaagttactaccagttttgaaatcagttccagtttctgcaaattacagaatggaggatgtttctggagagttattaggacattgtgtagccaccaggagttgctaaatcctgtagcctgtgttgatcccttttctggtgacattgattccactgtcctgaatactgaaaaaaacagggctatggtcatcatctatagtaatttaaactcacttccatgttcagtttaagtttaaaattgttaagtggggaatctaacccacgtttctactctagtacctttcagagcacacaaaattaacagcaaatgaaatggattcactatttcatttagtatggttgaaaaagactgatgatttggcaaccaaaattatatttcctcaaaatcaagtcaatcgtgcaaaaagctctttttcaaaggctcatsatgaagagcccagtgggaagatgggaaatggcaccgccctgacacacctgtataccacaccatccccaccttctgctcttgctgatgagggctgaagtcaacagaactggcagtgagatgcctccctctgatcttcacagatggacacakctgtcagcatgtcatgtaggtgccaattagggaggacttacattttcctcagcattggcaaagtcttaatgattatgtaaatgtatctgaggcctgttaacttgtaatgatggaagaaattatgtcctgttcatgtatcactttgcaagatgtatgatgactttctctttctctcaatagcacggcatgggcatcccctccatttctattatgcttcatgaactcatcaaattactccaccatgcacggtgctgcgatgtcaccattattagaatcggtacatcagggggaataggtgagacggattgatgtctactattagaactgagtgatccttacatacatggtagctgccaaaatataacatcctattcagagcccagcaaaagcccagatgggctaaaaagtgtcagaaggctggacttgaggaaacttaaggaaatctgcccacattgcctttttcttttattccttttttctttatggaaacccacagggagagatctcactgcctattgcgggatagtcttaggtgtttataaagggaagagtagaaaaattgttagaagatatgttttgagggtaggggtaaatttcaagtcttaggagtttttttaaagtgacagaaataagtgtgttcaagtaaaaaaaaaaatcataaaaatgtcccagttttatcagctaagtgagcaaactgcaaagctcttagaaaaacattgctttttgctcacatcagttactacgtcacctctactggctgtatcttttcctcatcagtacactagaaagaaaccaggccaggctttcagggaaggcttaagtgatgcttcctatagttttcacagagcctcccaacctcccttcttcttaggcctgtcagtcagctgtatagaggccttggttttgcttccagaatgtgttatgatgaagttttgaggtttcctcaaaactttcagctttttcttaaggagcacatcttgtcagggtatgattttaccatgtcaccaaagtgcaaatacagactgcacatggcaaatggagaagtttggttgacagggcgatagaactgaatgggcattataaaaagggctgagatttgggaagagaaatggtggtagaattagacatttatggagcaaaaagggatgtcagaaatcctcacacaagtaggtggagaagtggtgtgttcaacatcacaaagccaccatggctgagccatgcttcactagaaatcagacatgttggaaaagatgatggctttccacagccgtggtccaggaataaagtccagccaaggcccttacatctgggagaaagtaggacctttgtggatgttcatccatagagagaagtagagtgctagcaataagtgtcagatcaggcatccttctagattgtagtttatccaacaataycccaaataatcagtagtagggaactrctcatttgggcatgaatttcagataacatagctattaaagttgctcataattcttgggttgtgggttacaaggatctgccttcatagccaacattcatgcattgtaaagtcctgactgctacagttaccacttgatattaacaaacaccagcatgggcaaggtgctccaatgatcatccagctcttgattagggtattttatttcatggcaacacgatacatatagcacacaatgaaggcccatggatggtggcaaattaacccactgtrctggtgtggacaccttcattttgaagttttatcctcattaagaactcttagcttaccaaaaagatgtatttgcttattttcttttaagcagtattgcgtttggagatgaaagatgtacacagtattgtcgctcacatgatcccttcctacatgagccaacacaccttaacaagcataaactactcagttaaatagtatgttgacctttgagaaaccttaaccatgacataatacactaacacatttaaatattaagatggcatataaataacatcatttttatgtatatattttcaacttccctctcaatcactttcttaggacattgtgaacaattcaaggagccacttacttggattgtttaaaaactatctggccaggcatggtggctcacatttataatcccagtactttgggaggccgaggcagtggatcacttgaggccaggagtttgagaccagcctggccaatgtggtgaaaccccatctctactaaaaatacaaaaaattagttaggtgtgggtgtatgtgcctgtagtcctagctattctggaggctgaggcaggagaattgcttgaaccctggaggcagagactgcagtgagctgagatcaccccactacattacagcctgggtgacagagcaagacctcatctcaaaaaaaaaaaataaaaataaaaataaattaaaaaaaaatatttcacccaacaaggctctattatcagtggccaccttgggtctctagttggatcttctaaagcattttgtaattaagtctactttgatcaatatcaaaatttatgccaccctgaaggataagtctatactctatagaaaggattgtcaagctttttctgtaaaggacaagayagtacatattttaggatttgctgactgtgtgatttctattgcaacttctcaactctgcctctagagcttgaaagcagctatagacaatatgtaaataaatgggtgtggctgtgtgactaataaaactttatttacaaagacaggatttggtttatgaaccataggcttgcggagctataatctatggcatctttgtgaaaacattcactcatttgacaaatttttattgagtacctataatgtggcaggcacagagctagaccaggagagagcagtgaacagacatagttcttgactttatagagtttatgttctatcagagaaaaagataaacaaatgggtaattataaaaagtgttaggacagagagagtctagggcatttatgaagatatatcttcttattcaggctytaaatagaaaccagactgggtcaaaagctgggtcaaaaatgggcctggggaaatttagtgtaacctatctgtgttgccttttaattttttcatttgtttgcttcccttctgtggattcagacctttttcaggaagtaaattaagctgacacctgaagagtgacttggtgtgtggtgaaaaggtggggggaggaggagatggcatggcaggcagggagactaacagttggcagaaaatagtttcttaagtaagcccaagtcccttgagcaactcagactttgtagccatggaaggtcagccaagagccctgatttacatgaagtcggcgagagaacaaatgtgaaaagaatcagaagaaaaagaggatagagatgcaaagaaattacagtaatcaagaagtcgcagagaagattaaatattaagaagtcacatcactttatgaaagctacttgctggcaggcttatttagttttttcctgacctaatttattcaaatttgagcccaaagtctggcactaatttgcatgtccaagagtcatgtttgtcttgaaatctaaaccccatcacattgtaaatgtgcatttgaaaagacaacaaatgtaaatgcctcttctgaatgttatttaattgcatttggaaaagaaaatrattttaaagttgaaaacagggagactcattagcagctagcattaatactagaataagttacatactatgtgtcaaaagtaaactctaaacgatattcttctgtaatcatttattcccacattgcagggattgcmccagggactgttgtaataacggatatagctgtagactccttctttaagccccggtttgaacaggtcattttggacaacattgtcacccgaagtactgaactggacaaagaactgtctgaagaactgttcaactgtagcaaagaaatccccaacttcccaaccctcgttggacatacaatgtgtacctatgatttttatgaaggtgagaacaatttataaactgtgaaggaaacagaaaaatgccagcaastctttgttattcaaacccataatttatattaacaactctacttaagaaaattaatatttgtgggttaaaaaggaaatgaaacagccttttttacttactaaagcatagaaacacaasgacataatgagcagcagaatgaatttataytgagggtggatttaatcctccaagaacacattgaacactaaaatgcaattagtgatgttcacagaatcttatctctgtttatgcctttaacttaaattagcagctctaagagaagggaagtatgctgattctatgtttctgccattcatctgtacctcaaaaatgatcctgtcccccggaaacagtggtccagaaaatggggagaaatgcttggggagggggtacaaatcccacgggatggcatgatctcagagcggggtttttatctctcagccatgagtaaggggtccccaaaccaagtttagagacaaattgaagatgactgctatgtagcagcacttgctactagggatgaagggccaaggggaagaaaccttcaaagacagacccccgattctttctcgtcccagaagaaagaatctacacagtattggtaccatgccttgaagggcattctgaaaatctggcagtagttttattcttttcaaaatccatactatttcattataaattacttttattttccctttagctcaaacttaagatatattgaattttaaaaaattatgtttggagataggtcatattatctatacattttacttccggttagtaaaggtggtttcaccacatatttgttgtaaaatagaagggctgttggggtccaatagggttgggaccctctgttcaaggccactgactcatagtccatctcgagggtcactcactgatatgttaaagcagaatttgcaaatggaagcttgttaaagtcaatgtttcctttggcctgcacagtatttttaaaaatgtgaattattttgccaacatttacaatatctggagattttatattaacacccacatttctggctttttgaaataactagcatttaaaaatgtacaccagtatatgcatgrcagccttgacaagccctgacccacatctggggctacatttgctgaaggtgaggtgaagctgctcccctcagaccagacactcgcatcgacattacctgcttggcttctgcgatgtctgtgtttgaatcagcttaaatagaggtggtggcacgcagctctaatgagaagagaaggaacaaggggaagcagactgccaggggtgaaagtagcgtgaaagagatagargaaagggagaaaaagagaggaaagagcaccaaaaaggggattgtgaaaataatggatggcaacagagtgctattagcccacttgcttgaatccaggtcttctcaggagtgaggaggcattaggaggtctatttctgggtgtgcacagggtacggaaggagtaatgacatcaaggtttcctttccttgcttctgtccgcactggtagatacagctgaaattcagygatgaatgaacactgggagcagcctggaaaggaaaatgtgatcacaaggggtggcgtgcagcctgagaagtgtgcggaaagsgggaaggtggacaatgtcgcaaaggcatatggagaggcgcaatgtccaaacactgtcctgatcctcaagtagcttagcatcatcgaaacctcttttttttttctcccagcacccatccctgggccattccccagtcattggagcaacctgagattttcctcaaagggcagctctcacagcaaccccccgcttcctgatttccctgggcacagtgctggctgctgcagccactcaacagttactgaccccagaactgaggtcctcggccatgaaggctccttcctacgtatgagactcctcagctagggacagcatcgctccacagtcctctggtaggaagagtcacacagctcagtttatcctacacggggagcacgctgtagagttagacagcggcagcgtgctccagccaacagcaagcctcctatgaggccactgtcagtggggtgggacatcaagtcactaaacgttctcccctccctttcaggccaaggcckactagatggagcactgtgctccttttccagagaaaaaaagttagactacttgaagagagcatttaaagctggtgtcaggaatattgaaatggaatctacagtgtttgcagctatgtgtggactctgtggtctaaaaggtaagcttttcgtgaatgcttagggtcaaattctcctctttcatgaagctacttttacaccttaggagaagaaaaagaggtccagctatatattaccttgggctgaaggcatgacttataattgtatataatatacattatctcataatatcttgtgagtggccaggacwttattcttattatgcaaataaggaaactaaacctcagggttcaacagctaattggtgacatgttcagggcttgacagcaagttcrgtttccttcatcctggtggtggctagtagtttctattacaattgaatttattgagacaagatacaaacaaaatattcctaaaatagtccatcaatcataattttaaagagcatggtcagggaaggatgggagaagaatgtgccacttggatatctgggggaagagcattctgttcaatgcaaatccaaggccacagacaggagcattcaaggagaattggaggaacagggaagagatcaggaggggagaggcagtggtggagaatgggaggagagagggaagatgtacagattgtgtaggacactgtgagaacaatgactttcactctgggtgaaatgagaagccactggagagctctgaatagagaggtggctggatctgacctgtgtgttaacagaatcacagtggcggctsagctgggaagacccgaatggggtcaagggcagaagcagggagaagaacgagaaggcgaacgcagtagtctagtgagagttgatggacaaagtgatagcagcgcaggtagtgagaagtagtcagattgtagaaacattttgaagacaaacccaacaacatttgctgacaacttgatgtaaatttggtgagaaaggcaggagttaaaaatgactcccatgtttatggtctaaactactggaagcatgaggttgccataactgggacagaggaaattggggtgaagacattagggtagtagacatcaaaatggaggccaagcaagcaggtgaatttatgaatctggagtttaggttggtcgtttgcactggagacataaaattctaagttgaaagcatatagatggcatttaaagctatgcaatgggtaagataacaaacaatgagtctaggcacagatgacaagaggtccttgcttaaacgttaaaagttaattgagatgggagagaccaaggaggagtggcccatgaagttggcagtacaccagggaagtgtggcatcctgatatgcaaagaggaaggcttcaaagaagtaaagaattacagcacaataaagcttcatttttataagtggaatttgacttgcaaaacttgtccttatagtcaatgaattttaatctacacattacaaacagaatatatgtggtcatatttctaagaatgcattttacaaaaaagctgtagttctaaggagattaattgttgaaccactatccttaactacttgcatctgtcagaatatatgtacgtgtaaattattggtaaaaacgtgggaagaacacgcaatgcatttttgtactctttttttttttttttgagacagagtctccctctgttgcccaggctgagtgtagtggcgcaatctcggctcactataatctttgctttgcctcctgggttcaagcaattctcttgcctcagcctcccacatagctggaattacaagcttgtgccaccatgcccggctaacttttgtattttcagtagagatggggtttcaatgttggccagactggtcttgaactcctgacatcaagtgatccacttgcctcggcctcccaaagtgctaggattacaggagtgagccaccacgcccagcccatctttgtattcttttgaaggtcattgctagtatcctcttttagagaacaagagcatctgcttttctctctacaagttagtgacggtgggaaagcagcaccccacacagcctgcagggacacctggattcagatggttctgctccaggaaatgcctcctcacatttctttattacataaacaagtgatcacttgagtcatgtctccacctaatgtgtaagtgtaacataatttgttaaccactttattaatagttaaacataaaatgccgagttatcaacatgttgccttcatgaaaaccgggtgatgaccagcagttctttcttaagaggcaccaactggcagccaagaagagttctaggcttgtggaccctggactctgagtctttctttctctgtttaggatgttgcagaaacctaagtgaagttattctaagagcctttctgtccttgctgcaaatctttgtaaccttgctctctctgctacctgcaggtttccctcctggatgctttcttctctacatttctgtagttactgccctccactgcattttctttcttatgctgctgctggacctgctggtagctgatttccgcctgcaaatagctctcccccaggccactgctgcagcctttcatggagtagaccccttctaggctgccaacattcacactaaaagttgcatctgcagctctgtagttcttgggagtatttctatctgaatgtcttcatggtgccagcggctctttatctccctcagatttactgttctaaaaggtggattcctggtatgctgtcccctggaagatcagccaccaagtatagagaccgaaaaccccatggatagggtgctatcatattctcttctttcattactacttcataacatcctgttcccgtaacactgaagcttggaagctggcatctggcaccttttgattttaacccatttataacgcactttgtgtgagccagaaaagcttgcttggggaagggctgagaatgcattcatggacagctgctgaaacagaggaagttagagaggacatctgatggtaagcaatatggaaaaaaagatttcacctggcaccaagagcccagggcccataggcatgtctccctaaccccctccctgccactgttagttatggcccaccctatcctatctctccagacagccttctgacacctcttctgttcctttagtacaccagatgactggataaccaatcagaattcatactaaggtgatggcttataaataccaaatacttacataaacaaaggtcttctagagaaccattgtactaacttagatgaattactcactgagtttggaccattgcagaaacagatctttctagatctacttagcacaaggaggccttgggtccacgtggwttaccacttattatctttgcagttagtattacacatctcaccctaaatctcacctcctcaaaaaagtcttgcatgactacctacactcactcactcacaatggtgtcattctatttcatttatctgcatcacatttaccactactgactatatttccagtctgtttatatgttaacttatatattatttcatgcatattagtgcataaagscatatattgattatttctctccattagtgccataagaacagggaccttgtttgtcattgctgtatccccagtacttagaataatgcctgccatatgggctttcaatatttactgaacgagtgagtgaatgaaaaaaaaaagggccactagactctttttgactatggaaaatggccattgcaaactttaacctttattccccagccatataagtggcttagaattgtctaaaggacttaggagtatctcctaactgtccacaaagggggaaataaagccttaaagtcaagcctccctttgctctaaggtctatacaaatatttattttgctagatctacaacctctgggtctgtcaacatttgataggtggacaaactacctataataaggccactgacacccagaagtcactgttgctatcctgatctcattattttagaaaagagagttgggaatccaatgctgttttaacaaagattcaggtgaagggaaatagtggaattcacccaattattccaaagctaaattttcagcataatgtaaacctgttcaatggaagcactgtgcaatgctcaataaatgcattctcctatcactttataatatgcacatatctgtgtctctcttaaagcaaaatctactttaattaagccccaaacattctgatgaaagatgataatcctcttgtactgtgaacttgtggtaagtatgtttaacttgtattcgtgttttaaagacagtgctgccttttgacacaggcttgcctgacaatatatgaagcctaatatttgtctacgcttaggttctgcttaaatcctcttctatgtctagttgtttgcagcactcacagtggcttttctttaaagaattcagtgttatttcctyggacagacactggtaacttagggaaatatttagtctttataatattaccttagtacagttcaatgagagggagcagaatcttgactttaattccatgtttatattcttctgctgttcccaacaatgaaggatattggactctgagaactgcatgaggatcattgataaaggtaaaaagataccacaaggattaaaggttataatcagtttggagctagagtatttcttaaccctaaaatggagataaatccagattttgaaaaatctttaggccagggtacaaggagaccaattgcagggctcttcacctttacaagagaaaaacttcattctgtatgtattctacatgactgtagctcagggaggttaaataactttcccaccttctcagagctgggaaacaggtgagctggactttgaacccagcttggctgactcaggcagctttgcaccctgcctgccatttcttgccagcagcctccgtgtggacacaacatgttcatagtctctggacggaagagccaaaatgtgcaccactaaaagtcaatgcagatttttccattttaagtgtggtgagcagatagttgcaccactgccacaagcaaaccctaagggctgagcacataccaattgacttagtgatgggatcaaataaaacattaagcagatacttattttatagtatgcagagccctcattttgccaagaaaatcagtcattgtagctggaaaatcaggtataaatggtatataattcacttattacttttacagggacaagatttttacaaaggtgtctttttgctttttcacatattttaatcaaggtcagtgtctatagttttgtttgattcattttaattccaccctcctagcctctattctactcttcccttcccactgccaacaactcacacattagggatcatttagcgccattgattccaccctgtctgtggttgtcattatttgtggccctcctctcccctgctatgaccccagggaggctatctggattcccctggtgagcctctcacccccacctccagtaagtacacaaggctccatcgtctacctatcctgtagcatctctggttaacggtcccacatctggcagaagctcaagtcctcgagattacatctggacctcctggagaagacagcaggtttttgaacgaaccaaatcatgtgaggcatgtaagctgaggatgtggacttgcaagaagcctttgagatctaacctgctccttgctcagaggatgaaatgaggtctagagagtgtaaytgacctgcctgaggaaacagactaaaacagagatgaattagaatagacatctcctgtctcctgatcaccactctctccactattccataaggtgcaaaaaagtaatatattcatctatcgaaagatgacctgtactgcctctatttaaaaaagcatttgtggcagctttcaatgaaagaggaatgcataataatataatttaaacagaggtaaaaaaaaaaataggaggcatttatttaaggaaatagataggaaggtttttttttgtttgtttkttttttgagacaaggtctctgtctgtaactcagattggaacacagtggtatgaccacagctcactgcagcctccacctcttgggctaaagccatcttcccacctcagcctccagagtagctgggaccacaggttcatacaaccacgaatttgtgtgtgtatgggtttttattgttgtggttgttgttgtttttgcaaagtcgaggtctcactttgttgctcaggctgtcttgaactcctagggttcaagcaatcctcgtgcctcaccctcccaaaatgctggaattacaggcatgagccactgtgtctggctagaagttctcagtattaaagaggccacccaggagtacaatacttaatttaaacacttagattgagctctgagtttcctggaagccaagctgtaaacaaaaacactgcatttgggaggccgagatgggcaaatcacgaagtcaggagatcgagaccatcctggctaacatggtgaaacctcgtctctactacaaatacgaaaaaaaccaaaaattagccggtcatggtggtgggcatctgtagtcccagctactcgggaggctgagggaggagaatggcgtgaacccaggaggcagagcttgcagtgagctgagattgcaccactgcactccagcctgggtgacagagcaagamtccgtctcaaaaaaaaaaaacaaacaaaaaaaaaccactgtgcattatacagccaccattagctagtaaaaacatttgcggtttgtcacaaaatcttgatccaaatgttaaacttaaatgaaattatcagctatattataatgggcagtgtcgttgatagcacctttataaaaggtatgggacaattcttcataggtataatgaattggttctaattcagcattgtttgggcacccaaagaactggggtccaggtatgtatatttgtggtaatgatgattcaaagatagagtttaaagtctttgaagcagtcattttcaaatattaatgtaaaaataatttaactgggaagatgttttcatgcagattcactgcgctttcccaacacccatccccaattgtgatttagtatgtctggaataaagcctaagtatctctgattctgatgcaagaggccagtggagcacattttgagaaacatgactctagaagaacaaattgtttctatgtctcttaccattgaccagcccctttgaatacaaattttccccaccttgtttttaataagcagccaatagcctgagattaatgtttcagcggagatacaggaagtgcaaagactctgggttgttgattaaaaaacatttcctgtgctttacataccaggcatatagggagcaaaggtagtgtttgcttaataaactcaaacccttgaggagcaatgggggagggtatgaacataaccaggaagaggtagaagaaaggccaggctgggaactccaaagctaatctttgctgcttttcctttttccaaagaccagccctgtttgacttctgctgtgcaatgggcatttgtgcccagccctgctatctttgcccacwgttcatgggaaaaccttgttgaaagttcattctgaatcagagaggtggggttaaagtggtggtccataggggtgcgtggattcctaaggattcatgagtgaattttcaggggccctgggacccctgaagttatacacaaatattttgtgtgtattggcagatgtgtatttttgtgtgaaaagaggttccaattaggactttcatcagattttcaaagcagccataaatgttcccaaagggttgacaattactgggcagtcctagttcagctcagggtgcatccaagctccatgttcaggtctgtgtgttcccagaacattctagcctcaggtcagttcactgacaatctccttggtggcagctgggtcactaagtatctcttcctccccagcagccaccctccctgcctaatctgaggattttgctagcaaagctgtcaggcttaatttcagcaaattgttttgggtaattagtcccttttaattgctcatggaaatagtaattttaagtgacaagattattatatgctgctcgctagtggattctccagggtcaagaaaacaccactgagattgctataacctgttcttttctatctttggcattccccttgaaatccagaaaagacatttagtaaagtcggttcccactctgtaaaaagtatagagcactggtttccttttatccttctgccaaagtgaaggattagagaaggactttcaacttttctgtgcgactgccagcccatgtcaggcttcacagatttgctgatcattaacttgaaaagctgtgggaagtttctagctcttccatttgcttgtttacctgtacagccaagttgctttacaactgactgagttttgaataaatagggtcctaggtgatgaaatatttgccgcagctcaagttgaatattttcattgcttttcacgtcactgaacaagagggtcagtctgaccgatgggtcagtataaccgatagggcaggattgcctaatggttcaccatgtgctagctcaggggaggagtggatggaaggtagagaactcttctctcatcagtttaggaagctaggagttgattggctctgaccagctgtgtaatactgggccatttggttgatcattctaagccctcatttaatcatctgtcgaaagaggacaaaaataatcctagctcaaggaatagctgtaaaggattaagtgatatcataaatgcttggcatgtagcaataactaagtcaaacaaaaaagatacatggattggagaaatgtggagaaacgcatggagaaaacayttctaaactgatacatctgataagaggtaayacacagaacatacaaggaactcaaacaactcaatagcaagaaaacaaattaagaaatgggcaaaggatctgaataggttctaaaagaagacatacaaaaggccaacagatatattaaaaaaaacactcaacctcactagtcatcagggaaatgcaaattaaaacaatggcgaggtgtcgcttcacacctgctagaatggccataatcaaaaaagacgaaagataaaaagtgttggcaggatgtggagaaaagagaacccttgaatactgttgatgggaatgtaaattagtacatcaattatgaaaaacagtatggtggttcttcaaaaaactaagaattcccatataagctagcaatcccacctctggtacatatctgaaggaactggtatcagtgtgctgtaaacagacatctgctctcccaagtttgttgcagcattattcacaacagccaagatatggaatcaaccaagtgtccatcaacagatgaatagacttttaaaatgtggtatatatacacaatgaaatactacttagcctttaaaaagaaggaaattctctcatttgcaacaacatggatgaatttggaggccattttgttaagtgaaataagccaggcacagatagacaaatactgtatgatttyacttatatgtggaatctagaaaaatcaaactcatggaagtagagagtagaatggtggttaccagagtataggggagcaggatggggaacggagagaaactggtcgaagggtgcaaaatttcagttacaaggaggattaagctcgagagatctattgcatagcatagtgatgagagtttgtaataacgtatagtgaaaaatctttaagagagtagattttaattgttttcaccataaaaatgcaagtataagagatgatagatatgtgaattaggctaatttaatcatttcacaatgtatacatatatcaaaacatcacattgtacctcataattatatataattactatttgtcatttaaaaataaagatagcatgtactattataattacagtatactacttcttcccaaatstagatcttacaaagaagtctggagtagcagagaggtcaaagaaataaacactaccctcatgcccaactctctccatgccttccaagtttgttaatacagacacatccaatccaatcacatatgtactgaaatccttttttaaatgatgcagattcagatggagattattacaccgttagcaattcaaagtggctaacactgatttcaatgtgggtaaccacattccttgaaatcaaagatttgatatgaaactgacaataaagaattcatatggaactcaatttttcttgctgatgaaaccaaagacattgcccttgtgacaacttttcaaaaataagagtttcattttttaaaaaagacttttgttttttttcctccagtttcctataagatttcattctcattctttagaaatcaaatgctaatacatttcctctttcatggtgctgcttcttacatttaagcatttcatatcatgttttttcctctcaaatttcatgagagccagtactcacgtttattggtatttcctgaggtcagcgttctatatctcttctgtatttacttttttcttcagcaagggctgcaatgcagcaggcaaactcaaccattgcaccaaggagaaaaatgtcaccttgggaattacggctagttctccagttatatcctcccgtaaaagaccctcctctaagaactggaaataggatagaaagcaggagatggcatatctcagattgcaaagctttctcctttatcttgaacatgatgctttcctgagccttaatctagtcaattgtggaggaaaagaggaaggaggagtgttcacaacaattttagttaacttatttaaatgaagtgtttggtgggattccacaaaaatattgaagaccagaaggttcagtaggttgcatctacattacaacaacaacaacaaaaatacacaaaagtacatgtgctagggatgctggtgtgtttggctaatgcttctatagaaaagatgaacccattcattccatcagttgtgctaattgctcttctagctgctgtggtctgtgtgacacttctcgacagactcgactgtgatcagatcaacttgcctcatgatgtcctggtggagtaccagcaacggcctcagctcctaatctccaacttcatcagacggcggcttggactttgtgactagacgtcctaactgggcagcccaaccctcccctgcaagtttgtagctcaagttgtaatgtgaaagtcatattttatttgtggcatttttatatagttctcatccacatgctaaatggaaagactttatgaaatccttctctcttaaaaaggaatttattgtaaaagaatactcacactaaattaaattcaaatttcattttagaataagttaactaaatcagtctaataattaaaattttaaaactcctggattatgacatttggagtttcatatgcagcattaattaagctcacatcaaaatagaccagccatttgcacatagttaccagtcactctgtttctgaaaccaatccagaaattcatgttagaacattgtcaggcacttctaggtattggacaagtgacagaaactgatcatccatattcaaaatatttacagaaaaaagtgtcagtgaaatgtaggtctatatggaaaagttaccattaggaaaatatggccatactgcttttttacccctgcactatttcagtgcaccacagaataggattcgagatttacatatgcctgtttgtgattttatctcagaatataacaactctggattacattttcctctcaactgaaaaccctcagtaatgcaaagaaaggccttcctttttcttcagaatcacaagtgactaaattgccttctagccattttttcttgtaaaaaaagtgttttgaggaggctgtattttttattccatttcaatattaaccaaataggctgagaaattcatagcaattgaattaagacttgagttcaagatgttaaaggaatccttttgtatgacttgtccagaccggcctattgccctacccgtttgattctctgggaggcatggtgctcctcctggctgcacatgctctctgtgaactgatcgcatcttgggttcttctcaatttgacatacttgggagtcggaatgactggatgggggatgggtagaggatgactggcacacttgtatagtatgtaatgttgtgtacatattatttatatggttgtggctcaaataaagtttaattccaacacagtacagattatttggatcccagagccattgtcacacatgaccgaatggaggcttggggcaggaaataggtcctaggccggttgagtctgaattggcctgctcctgggtggggaatgtctttctctttcaagcaatgacaataaacaagaggtatttatcatcaccaataaacaatcccccaagaggtacattggtttgtgaacttctttttggcactagagacactttaagtgccatttttagggtatctcaataattgaccatcaaattcaaagatcagagctaaaagcaagctagaatagcattgccgtcattttctgatgggatttttactttgtttcatatttttttagaccatgtagtgaaaaccacctcagagaggcttcagtttgaacttttatctgcctgctcctggacaatctttttttttttttttttacacggagaaggagaggctatgagagggagaagaatgaaataattacagttaatcttctcttcaactcctgcaaggagtgtgtgcgcacaggtgcatgcatgcatgcatttatgtctgtgtcttcctcactggtattttctatctcagtaaaccatatcacttgcacaagccagaaacctgggaaacccctgtgatgattctttctccttaatttccacagccagtcaatcactaagtcttattaattgatcctcctaaatatttccccagtctgttcatttccttccatctttttggcacccatcctagtccaggccaccatgatctctcctccaggtcactgaggaagcctcactcctgatcaccctgcctccattcttgaagtttgattgggttattttcctgcttcaaagccttcacattggtcttagaatgaagaccaaagccctctgtgcagcttaggcattcctgactgggcccagcttggtagcccagctcacctcacccacttcttccccttgtgtctgccctccaggcacatcacccttggtccttcagtcttacccaaggcacaaattcacaaaggcacaatcccttgggaaggactgccaacagatccatccaatgggggtgcttagctgcggggacaagtgggactgagatccaccctgtccagctagctgtgagacctggacagggtgaatctcagtccaccctgagccacartgactgagaggggccttttcctgatttatacaatggtgttatatgggatagtgggaactcttagtgccaatgtcccttcccatttcagagccttttgctgtctactctccctgaagggccctcgcttaactcatgctcatggtttaaatctcaactcagagatcccttcccttagaaagtctttctaatcctcaaaccagattccttccatgctcacctgtagtccccctccagagccccctcgactacttcttcaaagtatgcagcttgcaactatgtcatgattggggtcattatttaattaatgcctactgtctacactataaggttctggagaacaaagactgcacatattttatttgcttctatcgcttcaagcacctaaaacagtaccagacacatactaggcactcaataaatacttgtcaagtgaagaatgaatccttttcatagcatttcccttgtaaactctcactataatctcacaatctttgcaagactcatactttccttattcagtcctggtcagcacagctctccctggctgttcctcccactacatctcactctgtggggaggaaagtcctctgtaccatcagtgtatatctgtggcagtgtctagaacctcttgttttctcacatacacacagctttcccctctgtcaaaaccaagccccaaattcacctcctttggggaggtctccaacttcaattttccctcaagtcatcacttcttccctccttcctttagaactagatttgcactgggaagacaggaatttgttctcatgcagatgccgtattgagaacatttatcctttttcatgttcctgggctgtcttcatttgggaggctcacatttcctttgtactcttagcgtgtcatagagttttgttctctacaggtatcttctgactgcttacctatgcacactctaggtctgggcaccggctttttacctcacctgtaacaagcttctctactcattctttcttgccctctttgaacacccttcaagaagcagattggcctgcaaaaaccctcttcttgtcatttctatgtatatttgtgtacattttttgtatgtttcttcctttgttcattcattcattataaatatatattcctccttcttccccagtagaatctgagacagcttacaaggttgaataatagcacatcgagatagtataagatagaactaactgggcaagaaaaggaaaagcaaaggcaaggggcatcaactggtacaagcctgaagcttctgctactgtgcattccatagagtctgtgcatcagcagaacgtgggctctgaattggcttggggccagctagtggttgcctcgtaaagagaacaaatttacagcatctctaaaataaaaatgcaaactaatgatcaggagaagaacaactagtcctgattctaagaggccacagtgtgcagagatgagtgtggatctcagaccgcctgggtgtggagttggggggatgagccccagttgggcgtcagtgtgttcattccaggacaccgccctgaggttctcaacacaggtgcatactaggatcaccagggaagccttttgaaaacactgttcagaggtccatctcagaccaattcaacaagaatctctgggagtgggactgggaagctctattttttattttgcagcctaagttgagagttaccaatttagaagaatggacagtctgtgactctggcatgtgctcttccagctgaacttctaaaactctttaggccttgtctccgctggaatagttatataaagatcaagttcttttacttgactcactcctcgatgctagcaacagtatcttactcattttatattccagcaacttgcacagtgcctggcacatagtaagactgaaaggattttacatttttatattatatataaaatatatgaaacagtttataatttatataacatatgtgatatattaaaaattatatataattataatgatgtaattatatactatatattatctattaataaaataattcattcaatcttactatgtgtttatgtattcatacatatacacatgtacacacacatatttgctggtatgtataaaattatgtacaaaaacatacaaaaaactaaaataccccaatgaaagatgaaacaaaaatgaacaaaatcacaaaaataacaaaaaatagctgactatctctcagggtaattttatccaaatgttatcacctgaacaagtcttcaggtcgacatgtatatattagtcaatataatttgcttttgtattccattttcattcccaaacatcagcacaggaaacagttaagtttaatcattgcttagaaaaactcagtctgtaatccaaaatacacaaaataacatttttgacttatttttatcagctatagaatgttacctagtgtgttgcatcctgtagaggcttcatacgggaggtaaactatcaacttcaggaatataatagtttgaattttatttattccttttacaaacacagttttaacatttgggattcattttggagacccctgataaaatctatgaacccgatcttcaggaaaacacacattcatacatatgcccccaaatctgcatacaatttcctgggtttgtgcaccttccttaggtcaggttgtggcaggacacctgtgtcctctaccaaaggccatagctcctgtgggtggcccttgccacacttctgtcctccctgggttctggtaattgccctgcttcagccctctcggatcagggctggtaacagttgtttccagctgcatcatcccttgttgctccctaaatcctgcccaccccttgtaaacagtcccttcagtaagttctctcggttccctgtttaattatgccatctggttcctgctgagacccagtaatacagcctccaaaatacatctggggaccaaaaccattttgaaaatcactgacttaaggaactgaagtcattctatatgaagatctttcaattatgcattttttaaattgcaaaacagaagctaattctttaactggtaaaatacttttaaaaatataatcttctgtacaagaatgtattcttttatttagagattctcgtgaactctccagggcctgcagcttgagaaacatggtgctcaacttattttcctagctggctgctgggcatcacatgtatgatagaattgaaaacttgagtaaaagacagattaatggcctctactgtttgcctccaagctacaagtcctgtcatcctgtcatggaaggaaattaaaattgtctgatacatactgagtttcataaagccacactgttcctctccaggatcctgtgtgcctctagatgtctataccatagattttttttttttttttgaggatttgatcaacaacctccacctcagggttggagctgtgtaaactaatctttaattgttaagatctccctttgttccttttaaaaataaatgaattatacatgtttttttctttcgcaatcctccaggactttctctgtcttttaatgatcctaaaactatagccagtgactctgcaaaccactgtctcctaaaatgaataactggaaaaaaacttaccatttgcagcctgcttcgttattcacttctcaatgattttctcaatttctgatttgttttttcactcctcccaaacagaagtcattgaatctagaatcaatttaacattcgtttttctaaaaaactgagcatagcagttttcacttgagaacaa

SEQ ID NO: 93714 - DNA, 36478 bp, Homo sapiens
gtgggggcacagggtgtgttcagtgatgaggtcaggagtagccaggtgccaagtgccttgcaggctgtggttgcgagtttgggtttattcttggtgtgatgggaggcgaaggaagggttttaaggacattgtatttgggggtgggagtggcttatacttcatgaaagagcgctctgctgggaaaggtggtcaggagccgtagcccagaggccagatgaagccttctgcagtggttcggactagggatagtggctggcccgtgtttgaggatgcagggcagtgggtcagcagatagagttagtagccccagggtcatgagggttctgggaacctcacctccaccctcacccccagattgccaaggacatggaacgctgggcccgcagtctcaacaaacaaaaagaaaacttcaaaaatagcttccagcctatcagctccctgcgagatgacgagaggcgggagtcagccactgcagatgctggctatgccatcctcgagaagaaggtgtgttggggccacccccctgcaccctgccccacaatcttgtccttcctttgggccctctgtggagtccctgaatttctgtgtccctccaccccagggagcactagccgagagacagcacaccagcatggatctcccgaaattggccagtgacgaccgcccagtgagtgcccaaggcagagaggggcgggggctctgatctggccaggcctgaccgcccaccctcaccctctacagagccctccgcgaggactggtggcagcctacagcggggagagtgacagtgaggaggagcaggagcgtgggggccctgagcgggaggagaagctcaccgactggcagaagctggcctgtctgctctgccgacgccagttcccyagcaaagaggcgctcatccggcaccagcagctctcagggctccacaaggtaacagcggatggttggcagggcatgctggggcctggcccactgaggctcatcctcttcacttctcatcctgtccctcttgcagcaaaaccttgagattcaccggcgagcccacttgtcagaaaacgagctagaagcactagagaagaatgacatggaggtgaggtgtgacctgaccctgggctccctcccctgtgtcccttccaagtccccatcacctcaggcagctggagttcaatttctcacgtgttaaccccgtgagccttcttccccattttcctatcctggctgcttgtgcctgtgatggcctgaccctcaggacctgagcctcattagccagatggcatgccctgtgggaccccactccccatgcctgtgttgcctgagaaaagagaccagctccccaacattcacatacacatacaaactttcagcaaatgaagtaccgggaccgtgcagctgaacgcagagaaaagtatggcatccccgagccgccagagcccaagaggaggaagtacggcggcatatccacagcctctgtgtgagtggctgggccaggtgagggggtctggagcccggggccggggccggcaggccgaccactcatgctgtgcaccgcccctgcagagacttcgagcagcctactcgggacgggctgggcagtgacaacattggcagtcggatgctgcaggccatgggctggaaagagggcagcggcctgggccgcaagaagcagggcattgtaacgcctatcgaggtgagtctcaggcagtcctgtcccatcccccagcacccctcacagcatcccccaccagcctgacagagcctgcctccctcacacaggcccaaacacgggtgcggggctccggcctgggtgcacggggcagctcctacggggtcacctcaaccgagtcctacaaggagacactgcacaagacaatggtgacccgcttcaacgaggcccagtgagcagcttcaagagcaacttctccacatgttgggtgtccatcctggggcagggaaggacagagtgttggatggctgggacggggccttgctcttgtcggccagcccactccccagccagagagggcttgaccaaatcaaattgaggtggtgacttttgttggaaaattgggctgggatcacgtcctgttttgtaataaaagctgaaaagtctgcatgttggcctctcctctttctcgtgctctagcacagttgtatagcctatacagacacggggacccaagcagatggacaggggaccttatcaggccaaggtggatggcagtggtggcattcagtgtctggaacataatggctactagaacatggggttctgacctgtaccccgacccataatatcctggttatggcccctctcccttgttggttccagcaggttatgttgtaccaggaaatctagcaccaccaggcatgaagcgccccctgatcagagctaggactgggaacccccatcccctgtccttgctgccccctggctttacttagcctgcagtcccaaggctaaactgcattttgccatccctagatctggagacaatgccctcaggcatctccaagtagaatacaagaggtactcaggttccagttggcccagagccctcaacaggctgatgacagaggggtggaggtggagcttggcctgcaaatccaaggccaggtcccagggatgccctttgagaaccattcaggcctaccttctctgttgttaccacagtgccccacccctctagtcactgcaacccatgattcccaagtatgtgcttgtgctctcggcagaggttctgggtacagtggaccgtgacgctggggctgccctcttccaagcctcagagggccacagcgtgaaagggggatggtgctagaagaccagttggtgcaaagcccctcccccatttattaatatacattgtgacaccaccctgcaacagtcataggaggtggggttagaaggggacccctagaggtaggatggtgctgatctggggtggtgggtgttgcccaatgaaggaaggggatgggagaaaaaaagggtgaaggaaacaggattaaaaagaggcctcctgggcctgggcacagtgagttgcacctgtaagtaatcccagcaatttaggaggctgaggcaggcggatcacttgagctcaggagttcaagaccagcctggataacatagccaggccctgtctctacaaaaataaataaataaataaaattaggctgggcgcagtgattcgcgcctgtaatcccagcattctgggaggccgaggcagatggatcactggagctcaggagtttgaaaccagcctgggcaacaaggtgaaaccccgtctctacaaaaaaaaaagtacaaaaattagccagctgtagtggcacacacctgtaatcccagctactcaggaagctgtagtgggaggattgcttgagcccgggaggtggaggttgcagcgagccgagatcacgcccctgcacccaagtctgggggacaagagtgaaaccctttcttgaaaaaaagaggctgccctagtctcaggatgggtgtgtcttttagcagagacgcctccacattcccttccctcttcccaccccagagcactgctcccaaaatcccacaaggaaccctcaaagctcaactggcaggagtgcaaaatgatacagccactctggaaaactggctgcttcctataaagttaacatatgcttaacctatggcccagcaattctactcttagatatttagctccaaatacatgaaaacatgtcaacaaaagacttgcatacatatatttgtagcagctgtattcctaatagccaaaaactgggaacaacccaaatgtccaactagaggagaatggatacagtgtggtatattcaaaggatggactacagctcagcaatcaaaaggaacacaatgctgatacagatatcaaaggatgagtctcacatggtgagattgttcacatggtgaaagaagccagacacaaaaaacacataatgtttcattccatttatatgaagttctaaggcaggcagaacaattttatggtgatagtagaagagggttgaggtgaggagggtgtcactggaaagggttgcaaggtagctttctggaatcatgaaaagtttctatgtcttgattggggtgctggtcacatgggtgtatacctatttaaaagtccaacaagctgtataactaaaatctgagtgttttattgtatgtaaattatacaagaagttggaaaatcaccaccacagcaaacctcaataaataagaaggaaataatgaacagaaattgatgatatagagaacaaaaaatgacagattaatagaaaccaaaagcagaatctgaaaacaaaaattaagaggaaacacttttggcaagactggtcaattgaagaagatagaagatgcaaatgcaacagagcttttaaaaataaagaatgtatctgaaaatctagatgaaatgaatatattcctagagaaatatcaaatgccaaaactgttccatggagaaactgattactcaaatggagcaattagtaatatagaaattgaaatggttgtcaagatcttccctttccccacaaaaaaaaaaaaagggcccagatgatgtgtgtatgtgtgtgttcctttctttctttctttttttttttttagatggagtcttactctgtcacccaggctggagtgcagtggtgcgatctcagtttaccgcaacctccaccttctgggttcaagcaattctcttgcctcagcctcctgagtagctgggattacaggtgtgcaccaccacacccagggaatattttgtattcttagtagagatggggtttcgctatgttggccagctggtcttgaactcctgacctcaggtgatccaccctccttggcctcccaaagtgctgtgattacaggcatgagccacctcgcctggcccagatggtttttataagagcattctaccaaactcccaaggattcctttcttattaaagttaattcctttcttattaaagttgttctagatattagaaaaaagaaaagatgtctattttaacaggctagtgttagctgaagctgcgaaggaagaggcactctcatacatcgctggaggcaatgcaaaatagtacaaccctctcttccaccctccctctccctctcctttgtctattttcctgcctccacagggctcactgtgggaccacagatgcaccccactatgcccagctaattctttgattttttgtggagaccaggtggtggtggtggggtgtgtgtgtgtgtatgttggggcgtgggggggtctcactttgttgcccaggctggtcttgaactcctgggctcaagcaatcatcctgcctcagcctgccaaagtgatgggattataggcgtgagccgccgcgcccggccaagactccatttattaaaaggctaaagaattttgccaggcgcggcggctcgcgcctatagtcccagcactttgggaggccgagcgggcggtatcgcctgagctcaggagctctagtccagtctggctaacgtggcgaaatcccgtctccactatggtaacatgtaaacatagaaaagataacagtaaaattttttctgtgttataggaccgttgaccaaaatgttatgcagcacatgattgtatatccataatttatattactgtatatagtcacagatatctattataatacgggtttgtatgtgaaactataattttacttattgttatgtttatggtctgtgtatcttgctagaatgtcagctccatgagcccaaggaagaatttccagcacctggcccatgtcaaatgaacttttttggccacctgagtctcggtctccccatctgtaggatgggtgtgcctttccatgtggaggcacccacacgttccgtttcctcttcccaccctacagagcacggctccggcaattccacagctcaggcttacattttcccatattctggacgctggtgcccaccacgtgcaccaggcactggccagacagaactaccacccccagcatgccgcgcgcatttgggccgtaccacaacctgtagggtcatctgggtctgaaacgggcaccagcgacgcgggagcagggactgacgcccctctagcaaagcatctgtggtacatcccagacccggggctctccaaggccccgcgcttccgagctccgcgcaaactctggcttctcttgtacgacagaggtggtttgctcttccgttgccccgtggcttcagctcatctttggcaggaaggcgaggcttccgcccggcacagggggtgagctggagcaccgtgcccccaagcctctggacagcatttggaggagggtgcttccctaatcccaacttcggggaaacccctcatgggcgtatttggagcctccgggcccggggtgatatttagggggcgtctgcttttgagacccttaaggggtgccgtttggggacttcggggtgggatttgggagtctgtttcggggagcacccctcggaggcagggtttggggggctttggggagattcttagggtccgtgtatgggcacccttgtccgtggagcaggatttgggttattcttcaaggggagaagcaaagcttgaggttactaaagtcaaggcgggactgggggagggcttgtttcaggacggggtcctggtgacagaacaatcgggaccgacgtggcattgtggaggtgtcaggcctttgtgacctctggttttgtgatgaggtcctccccgcgcctggaggctcaggactgcgagactggacacgtcgggggcccagatgtttctagggagaggagcctcccagctcaggctagggaagggacaccggagcccagctcttcctgagctgacgaggcgccacccggcctttattcattattcataataaggtggggctgtggtaggcggcagtttttttgcctctttcgcacctggtccgctgaaggttctcggcttgtgaattattcacgaggggcggatcagcgtgccgaagggacgtgctgaaggggcgttctgaagtctgccgcgcaaacgagttcattgatgattcgcaaaagttaagtagcaccctgagttttcagtggcttttctaggggttccgtgcttaattcatgaggagcgtggcttttgcagctttgtctgcgtgatccgcggttagctttcccttgcaggtaccagagttaaaacctggcgtctagcaaagggatgaggcctcctacattgttcatttcttatggcctggtaatcccagataatcagccggctctggattcaaatcccatcgatcctttccagttgtgtgatctttggcaaatcgttttgtaagcctgaataatgggtatgaggataacgataagattagcttacactcgtttagctacttagcgcatttaatcttcacgacaatcctaggaggtaggtcattattacccccactttatagataaggaaactgggacacaggaaggctaagtaatttgcctaaggtcacacaatcagtgagtggctgggccgggattcaaattggggtctagttccgcaatctgtagtcttaaccagatgccataatgtctcccctccccattcccctgcgccgccatttgatagtactactactactaatataacacttagcatgtgccaggcactggtctaagccctttctacttatttcttcatttaaactccatcgcaaggtaagttgctgttattcctattttatggatggggaagcagtggcccaagttgggggtttctctagtggctgagtattcataactaattttatattaatgtaaatatatatttacatatcttaacatattacttttatattaatatataatattttaaaaatttaacagtgccttgtgccagcaatgttctaaggctcatcccataatttatattctctgattttcttttgtttgagacggagtttctctcttgtcgcccaagctggagtgcaatggcgcgatctcggctgactgcaacctctgcttcccgagttcaagcgattctcctgcctcagcctccccagtagctgggattacaggcgcccgccaacatgcccagctaatttttgtatttttagtagagacagggtttcaccatcttggccaggctggtctccaattcctgacctcaggtgatccacccgcctcggcctcctaaagtgctgggattacaggcgtcatctgattttcataataacacattactatcctcattttacagttgtggaaactgaggcacctgccaaagacatgtagtgagtttgggtttgattggaccaaggcagcccttgttcctgaggcggggagaatggagggaggcgtggagaggggaggtgggggcagggagtacacgtcccctgggttttctggtggcactgcagtgacatctttcattattcatgaacaggaaggcgtgctcactttgccttggctatagcatcgtaatccctatttgctgggcagggcagtcttgggtgtttcttcgccttatgcataattcataaattgggtggaacctttcttgacctctctgagtttccaggttgagctactgcagcagcataattcattattcaggacctgggagagtgtgttttccctgcagcagccccatttccctgcttacagtgtattagatgcagcaataggcgggcgtgccccttttattccaacccactgggcctcatgcattattcatgagtaagttgtggcctgggtctccttggcttccgggcccctgcaagatcatcattattcatgaatgggggtgtgtggcttccatgttttaacatctgctttctggttgctggttgttagtctaccaaccactcaacttcatgcataacttataatcaggaagcatggccttaacggtttttcttcgcttccttgacagcctggctgcaacaattcattcattagtcgcattccatgaggcgtggcctctgttttacctgttttcgttgttactgccacaatgtccaccaggtggtgctgttccacttctaaccgaatgaatcgcaaccgagtagggaactttatgcatgattcataagtaggcgcggcccgcttgcatccgggtttctgggggtggggcccaaggttttgttccggccccaggctcagcgtccgccatcttgtgtcggcggctcggctgtaaggaggtggcagggacaaccacaaccacaacggccgggggaggagaaggcggcagcggcgattctaggcggcccaggcggcggggaggaggagaaggaggagggtggcggccgggcttggcttcggctccttgaggagttggcggcggcgcgacccggggaaccggcattggtaaaaaaacgtcctttcactgcgcctcgccctgggcaggggtttcggggaggcactggagggccctgagccacgctgctgtcggggcgggccgcggtgactcgggagccaggaatcagcggagtagggagggggagcggatcctggggcggggccgactttccccggccaggaccactccggctccctctggttgcaaaatctgaccttggagtcggacccccaggatgtgcttttagagactcacgcccaacatctctagtctgggacctgactccgtcccgaaccttgtatctcagatcagaactcttccccagtctccaatagagatttacgtggatcagcattgctgatcagagctcctcaccattgaatgccgttaaagacctgccccagaatctcctttgagacacttcctagcttctcagtatttgtcctcaaggcttccaggacgggctagatctcgaaggggtccataggccctttatctctgtaagagagtcctctttagcattttccttcagacccccatcccacacacatgctagccgcgctcagagcttccaggggtactagaccctgtgaaaggccatttgggcctggcctttgtgtcgggggcccctcttcgccacacgtcaggtctcctaaccccaccctggccctagcatcttccatcagagactctgcccagtatttctactcagagacccctcttaccatctgccttgagagactcttcaattcctagactctgtcctttgacactttctctacttttatggaatttctcgctttttatacttccagtattcagagactactgagaggcctcagcatcttccccatcaggcaccttgaacccccagagccttccagtgcaccagataccagggaggaactgtttggatacataatcctccatcaaagagcccctgcgagcatctgctcttgcagatcccgttggcttctagccccttccatcagagactcgcctccccaaccccaccctagacccagcctctgccttcaaaaaccaacctgggttctagctgcttttttcacagatcccttatcctcacatcaggcctcagaatctgccctcagatcgtttcaaggtccctaacgtctgcagtcaggggttttcagcttctgctttcagcctccttggaccccaggatcattgtcagatgtcccttccccccacaggccttcttgttttctttttctttttcttttttccgagacagaattgtttcactatgtcgtccaggctggagtgcagtggcgccatctcagctcactgcaacctccacctcctgggttcaagcgattctcctgcctcagcctcccgagtagctgggattacaggcatgcaccaccacgcctggctaattttttgtatttttagtagagatggggtttcaccatattgcccaggctggtctcgaactcctgacctcaggtgatccacctgcctcggcctcccaaagtgctgggattgcaggcgtgagccaccgcgcctggccatggccctcttgttttctactgcagtagaaaaccctcttctcagcatctaccttcagcgcctccatggggtcctacataattggtcagagaaacccaaccccatttggggacctagccagtgtttgcttattaacctttttaaggcctgcactatctgggcccagcttcccgtttccacaccctcagagcagctgtgatacctagcatgtcctgtcagagattgacacagggcctttgtgttccattagaaacctctcccagcccctcaccatccaccctcacagcctcctgggactctgtagtaggaatgtcagatacacctctcctcttgcatgtccctatctattatttttggttaaagatttctctctgctaccagcatctgtctccagagtcctccagagcctcaacatcctcctgatggaggctgcctctccccccagaccccaacatcttcctgctgcctcctcagactctagaatcccccacccattccctttgcagcttccatggggcccagcaactgtcctcctacctccttgcagccttgggggcctccactgcaatttttcagcctttctccaaaagatccttttccagagatccgaatttgagtcttttcctaataccctagcctagtcctttccctcccaggacttctaacatctcctttcccatttgtctcagagcctccttgctcttagacacccacttcctgattctcctctcacgttcccatggacttctcagttaacccctcccagaaagcttgacatgctccagccccccttctctatgccctagcttctccatcctgctaacctgcctcctctcacacctccaagactcctccctcaaaccctctggtttgggaatagagaatgcttacgcttgaaaatcttcagtttggagactcaggtatgtttagaaactaagccacagctcagctttgccaaacagttcacagtgtgtatgttatggtgggggcctgagcaaatgttgaggtaggaagggtgtagattgtttttctgctgggggtgggggatctttagctcctctgcagagtttctgtcccagactcctgcttgccttgagacagggctgttccaaacctttgcagtcaaaatccacttgaacaatcatctgaaacttcttagactcttgctgcctgcactggggatccagaggtgaaatgtccagatattaaagtgctctctggccctggatcatctctaatttatggagtgaggaaatggcatgtcccaaacaaactgaccaatgacaaggcaaggagataactaagtaatagaggccactacacgtgcccagggaggaactcacatcctcaggtcagtgagttctgaccacagaccttggcttctttaaccctgccagcagccccttgaagacagtttcatttgtcccagcttttggagaaaatgaggctcagaggaaatgagatctctaccccaggtcagtcagagagtcagtaaatggaaaatatggttcacctttgtctctactaactcaccaagcctcttgctacccaggttggctcttagcattctaagcaattcacctggctatctcaggggctccagccagcctgctgcctcccctcatctcccattccttagccctgtggactgggccctgagcccaggggcatttggcaaacagtcccccaccagctgcatgcctctgggcgagtgaatggggttctctaagcctttcttttcccatttgtgatttgggcatagggttatctgggtcatggggattgttaagattagacaaagccctttcctctttgattgacacacagtatgctcttggtagatagtagggagctcttgtcattgtggttggtgctagtgacaagtgccaagatggaatcttaggtacattgggatacttagtgtcataaaagtctcagtgtgggaggacttgtgtgaacagaagactcagtgcctagaggagcacttggggtgaggggaagtgacgctgggtcctcccatctccagcatgtggacccagtcacccccaccaccagatttcacttccacagcaggctttattgttctgtctctgggacctagcaggtgaccctgggcaagttacttctcatttgtccggcaaggacactaaactctgccttgctgggtcagggtcatggaggggatgaaacgtgataacacgaggaagcagcctgggcttcagagtcagcagatcctggtctggtcccagctcagtgtgtgggaaccttggtcaccgaacgtccctgagtgaatttttttccatcactttaaagttgggggtattattgatagcagtccaaaccccacaggagtaccctgaggacagagtgagacgaggtttagagaagtgcttactatggcatctggcacaaggaggactcctgatcaatctaatactcatttatcattgtggttaacctgtttaagggactccgcatgcagatgaggcttgggatgtgtttgttttctatctttttgcaacctcttttattggtctgtgtcggttttcccctcccaaagctgggggcagggttgggctttataaaacttgagcccctctggggactgggttctcagcaagttaccgctcctgccatcatgccaccctgatggatgtccaagcctcacttccctcctgcactccccgctcccgccgccrtccctgggattaagggagaggagaatggctgcttgttactgcctacctactctgtgccaggttctatgctctgtgttatttatcatctcgataaccccgtggggaaggtaagtggtattatcacccctgtttcacaggtgagaaaactgaggcctgtggsggttaattattactgttagtgcgtggcaggctcaagatttgaaaccaggtctgtcctgaatccacatccttcccctgacctcgacacaagtacattcttgtcattcctttcactccaggattggagtctctccctcrttatgctgggctgggaagaagcaaatggcttagtggtcagcagtgtggatttgcaaatcagaccacctgggttcagatcttaggtctgacagctgtgttaccctgggcaagtcctcacctttctgtgcctgtcccctctttgctgtaaaatgggggtactaatacttaagtcttcccttcccccacagttgctactaacaaacagaaaaacggtacccatgtgctccagggtcacctctgacctttttttcctccagatgtccagctcgccgctgtccaagaaacgtcgcgtgtccgggcctgatccaaagccgggttctaactgctcccctgcccagtccgtgttgtccgaagtgccctcggtgccaaccaacgtgagtgtcctctccgtggagactggcagacgaggtggtgggtgggaaagtcttttgtrtcactgtctgtctatccatgctccactcctgtgtgtctccctaaacttgttcttttcctctattcctagggaatggccaagaacggcagtgaagcagacatagacgagggcctttactcccggcagctgtaagtggggccaaggccgggctgaggggtgtggaatgggacattgagaggataaggttgggtggggcaggccctgacctagagtaccccctaacctggcaggtatgtgttgggccatgaggcaatgaagcggctccagacatccagtgtcctggtatcaggcctgcggggcctgggcgtggagatcgctaagaacatcatccttggtggggtcaaggctgttaccctacatgaccagggcactgcccagtgggctgatctttcctcccaggtacctcttcctagcacccttccccctttcccccttcccgaggcaccactgttcccggtgccacagccatttcatctttttccctactgcacacccttamagttctacctgcgggaggaggacatcggtaaaaaccgggccgaggtatcacagccccgcctcgctgagctcaacagctatgtgcctgtcactgcctacactggacccctcgttgaggacttccttagtggtttccaggtatcttgggggtactacscagccttctgcccagttttctcagagcccatctctggtttattcagtagtgttcaatattgatttaatgggtcggcctgaatgtcaggttttgtgctgggggactagagtatgcaggcagcagttagcccctggccctgccttttcttttcttctttttttttttttgagacggagtcttgctctgtcgcccaagctagagtgcagtggcgcgatctcggctcactgcaagctacacctcctgggttcacgccattctcctgcctcagcctcccgagtagctgggactacaggcgcctgccaccacgcccggctaatttttttttgtatttttagtagagacggggtttcactgtgttagccagggtggtctcgatctcctgaccttgtgatccgcccgcctccgcctcccaaagtgctgggattacaggtgtgagccaccgcacccggcctggccccgccttttcaagtggggaagatgtgtacagacagtacagcatagtggttgtgggcacagactgtagagccatactgccttgctgcaggcctccagccttggtagtgtgacttcaagcaggttgtttcatctcctgtacctttgttttcctgtttgtagtcagtgcgtggtagcagcactgacttcatggactttttgtgagggttaaacacgtggaattgcagctggcatataaggactggatgggtgtttgttaattaaaaagtccaggccggaaagaggtgctctggaagctgagagttgtccctggagtatcccaggttgccagggcactgcagctaaatcctgatggaggagtaggagctcaccctggtggggaaggatggacattcaggcagagagcaaaatcccaaagatcatggcggagcaggcgtcgtcttgagaattggaagcaggtgggtgtggtaggagtgagctcagactttggctggagacagagttttactccagtgtctcacagggcatggcagacagacagcagcgggtgtttgtcaaataaatgagtcagctcttctccaaactccctcctcccagctacctcttcacctttcctggtatagtccaggggttcattttcgacccccacagagtctgatacacagtaggtgctatgtgtttgtgaaagaggctgacccagcaaagcctggatgtgtttgccttgaggactgcctgagtcctccacaccagccctccattttttccccttcaccccaatgctgggcctgagcctccatctctccacaggtggtggtgctcaccaacacccccctggaggaccagctgcgagtgggtgagttctgtcacaaccgtggcatcaagctggtggtggcagacacgcggggcctgtttgggtgagtggcagcccacctccctccctgtccccttttcccccaactcctaccaagcccaggccaagactctaggctctccctgccctcatcccttctcagctacccaggttttgggttctgtgttttcatctctccccatgtggcacaagtaccatcttacatcccagcagtgataggctgagtttgctcagcaagttttcactacatcttgagggacccgtgggacctgtatgtgcatgggacacaggcaccagccctattgcttccctctacaggcagctcttctgtgactttggagaggaaatgatcctcacagattccaatggggagcagccactcagtgctatggtttctatggttaccaaggtaaggagaccagccctagggttcctggcaggcaggtgggctgcagtagtccttcctgtctgctcttggtaccctgggsctgtttctgagactcactcttcctttaaccaggacaaccccggtgtggttacctgcctggatgaggcccgacacgggtttgagagcggggactttgtctccttttcagaagtacagggcatggttgaactcaacggaaatcagcccatggagatcaaagtcctgggtgagctgsgaccatgggggaagcagaggggaactagaagatatgttcctgggttctggccggggagttgaagggagaagacatggcccttggttcagagttgggaagacacatcctggtgtttgagatgaactacagacaatcctgtggggtccaataagagctggtgggcatgggggagaggtactrtgtttgagctattcctgggagartgtgtccctrgtatctgagctgagtggggaaaaagtctctggtgtttgaacagggcagatcagcggatctacttgtgtgtgagctgatttggatgggaagcagagaaggtcttcccgtgtagacttggagccagggacacagggtctcacggggtctgagctgagtctggggcacaggagagatggtttctgatgtccaagtggagcctggagctgagggaagacagcttctgatgtctgagctgagtcggggcaggaggttccttatcttgcaggggttgtggattttagggagaatgggtagactgacagctctcttcctgccctctgtaggtccttatacctttagcatctgtgacacctccaacttctccgactacatccgtggaggcatcgtcagtcaggtcaaagtacctaagaagattagctttgtgagtgtgtcgatgggatcagtgggctgtggggggtggttctaggcattccctagttctccattcctctcttctggttctgatgacctctccccccgccacagaaatccttggtggcctcactggcagaacctgactttgtggtgacggacttcgccaagttttctcgccctgcccagctgcacattggcttccaggccctgcaccagttctgtgctcagcatggccggccacctcggccccgcaatgaggtgggtgagtgggcgagccagccagcgcagacatgcctggcactgcaggctcaccatgcctctctgcgtgtccacactccctgccctcactgtggcctgacatatcctctcttggttctttctggcccaccaggaggatgcagcagaactggtagccttagcacaggctgtgaatgctcgagccctgccagcagtgcagcaaaataacctggacgaggacctcatccggaagctggcatatgtggctgctggggatctggcacccataaacgccttcattgggggcctggctgcccaggaagtcatgaaggtcagcacgggtggggagaggcaggattggggtgggccaggtkcctccatgactctgtcacttgctctctgtctgtgtcaggcccctgttaaccactgaccaccccctctctcccttcccctctccaggcctgctccgggaagttcatgcccatcatgcagtggctatactttgatgcccttgagtgtctccctgaggacaaagaggtcctcacagaggacaagtgcctccaggtatgtgggtggsacctgtggggagggcatcattggggacatttctggggaggcctctctaaccctcctccctttgcattccttagcrccagaaccgttatgacgggcaagtggctgtgtttggctcagacctgcaagagaagctgggcaagcagaagtatttcctggtaagtggtccccttggatgtctgctcccctcatcttggcctctggccatcacccctggggcttccttcggcatctcaatgcaaccggtggcgcattctctttgccattctccttatcttgaagggaagcccagtgcatccctcgtttccccttctggtgcctccttcctcacatgactgygtgtcatttcttagagtcctgcaacctgaagatgtggtgttagcccctctccccgtctctcaggggagtgaggggtgatgggtagcttcacactaacctgcatcaccctgaccagcctctgcctgtcttcttggttgcttcttaggtgggtgcgggggccattggctgtgagctgctcaagaactttgccatgattgggctgggctgcggggagggtggagaaatcatcgttacagacatggacaccattgagaagtcaaatctgaatcgacagtttcttttccggccctgggatgtcacggtgagtagggtaggaggttggggctttgtcgtctcactttcctcctttttcttttttttttttttttttgagacggagtttcgctcttgttgcccaggctgtagtgcagtggcgtgatctctggcccaccacaacctctgcctcctgggttcaagcgattctcctgcctcagcctcctgagtagctgggactacaggcatgcgccaccacgcccggctgattttgcattttaagtagagacagggtttctccatgttggtcaggctggtctcgaattcccgacctcaggtgatctgcctgcttcagcctcccaaagtgttggtattacaggcgtgagccaccacacctcacccctcctttttcttgttcccattctttctgtcagagatctttctgcctctgccagaagcccttctttttggcctttctttccctcagcttctgtttttttttttttttttttttttttttgccttaacctctttttagtgctggttgggacagtgtgtctggggtcctcaaaactactctcaagctcaattcacctagagtacttacaggactcagcatatagtcgtgcttgtggctacaatttattacagcaaaaggatacagaccaaaatcagcaaagggaaaaggctggtgcaagtttctaggagtcttctcccagcgggagttaaacaaggcggcctttatttccccagtagcaacagtaactacagaaataacagcaacaaggtgtaacaagacatgaaatgttgccaaccagggaagcttgttagactcagcaccacctcttttacttggggctggtcatgtaggcgcccccttcctggcacataacaaaatttccagactcccagaaggaaaggtgttcagcgtaaactgtattgtttgcatgaacggtttaggcacagtgaaccactgataccaggtagggagcggtgggaaccttcctgaattccaagttcccagacaccagccaaggagccgaccttggaagcaggcctttccaagggttgtagtttcagtctcctaggcttacacttctctgcacatatggaaactgggttggttatgcagggttctctgagaagctttctgtaaggagcagtgtcgtttttgcttacccaggatttattccccctttcatttatttcatttattcaccagatagttttagtactgttttaggtattggggatataccaaggaataaaacaagattcctggagggagaggggaacggacagcaaacaatagacacaatacgatcgtgaggtatatagttaatgttggtgatgagtgctcctcaaaggaaacaactaaaaccagacaagggaagtcggggtgtcagggagaatggtttgtagtattgatgacaatggttaaggaaggcctgagttctgcaaagacctcaaggatatgagggactagagtgccctctgctgtggaagagcctgcgcaaagatcctgaggtgggaggggtcagggagccaactcattttacggtaagtggaggtgggatccaggggaggattctgagcagaggagggacgtggcccaatttgggctttgaaaggatcctgcttgtctgtgtgccagcatcctggtggtggttgggggagtctgcatcaatcctgggtgctgttacctgaaaaaatagcaggtgttagacgaaagaacagatgtctggcccattgtctccagtctgttcctgtccacagcttccctttatgctgagcccctgccacatgcatcatcatcctggccatgtggcattgtcacagaccgtctctcctgctagcctcctaactcagggcctgggtcttccccagcattaagtaaatcagtctcaggcagacagccctttataggtgtttgggccaggtgcggtggctcacgcctgtaatcccagctctttgtggggccgaggtctttgagctcaggagttcaagaccagcctgggcagcatgacaaaaccctgtctctaccaaaaatacaaaaattagccacgcatggtggcacacacctgtggtcccagctactcgggaggctgaggtgggaggatcgctggagcctgggaagttraggctgcagtgagccgtgatcatgccactgcattccagcctgtgtgatggagagagaccctgtctcaaaaaaaataaagatgtttgttgggtgaatgcacaaataagtgagctttgttcccccatccccaccctggaactgcactttcttaaccctttagaagttaaagtctgacacggctgctgcagctgtgcgccaaatgaatccacatatccgggtgacaagccaccagaaccgtgtgggtcctgacacggagcgcatctatgatgacgattttttccaaaacctagatggcgtggccaatgccctggacaacgtggatgcccgtgagtttggaggcgggtgaggtggtcacgggcaaagttgtgtgtgtttcggtgtgtatataccaagaggggtgtcygtctttctgtcctctcctgatgtttctttcctagctctcrctttgtsctccccacaggcatgtacatggaccgccgctgtgtctactaccggaagccactgctggagtcaggcacactgggcaccaaaggcaatgtgcaggtggtgatccccttcctgacagagtcgtacagttccagccaggacccacctgagaagtccatccccatctgtaccctgaagaacttccctaatgccatcgagcacaccctgcaggtgataagctgtgggagaagggaaagaggccaggcatctggccaggctgctgcctctccrcccccaggcccttgccttgccttcagatgttgcatgcctaagtgtaagatgtgccttttctccaaacctccctccctcacttcccaccaggcagcctaggtttctagaatgactcattcttttttcacttttattttgatttttttttcaacacatagacaaatattaagaatattatgatgaatactcaaataccattcctcacctaaatttaacaattcttaatgttttgccacattttcttcttagatttatgtagatttttcttctttgtgcttaaatgtgtcacagacatcacagccctttactccctactatttcagtgcctctgccaagtgaggatatgttgctgtagaacagggtttcttagcttcagcactactgacatttggggctggttatttatttgtcatgggagaggggatgycctgtgcactgtaggatgtttctcagcattcctgacttctgcccactagatgccaatagcactctccctccatcatgacatctcaaaatgtctccagacattgccagatgtccccaggggtgccacatcactcccagttgagaactacttctgtctaacagaaacatcattttcatgctcagcaaaattaacaatcattcttaccatctcttctagttatttatttgtctctaatggtccatattcaggttttccccagctgttactcaaaatgagtttaacagctggtttgtcaggatgattctgtgtgtatggtgcatttatctacagaacagtgcatatattatctagctcggggtgtccaatcatttggcttccctgggccacattggaagaagaattgtctcgggccacacataaaatatactaatactaacgatagctgatgagctgaaaaaataaaagaaaaaaagatccgtgcataaatctcataatgtcttaagaaaatttacaaatttgtgttgggcagcattcaaagtcatcctgggctgcatatgggccacaggttagacaagcttgatctagctgaagttttacaaagtgaacacacaggtgaccaccacctgggccaagaaacagaacctagggattaccattgtgctgtcagaataattcttagtgcagtgtttgaggccaaaccatttagaatagtaggagtatgagggtgggaacaaaatagggaagggaaaaaaaaaacagttccatctgtcactttctcccttctgacactgcagttccagagtgggtatgtttgtatttgtgcaccaaccacagtcttgctaggtcatgtgtaaccttgaacttaacctctctgtgccgcagattcctgttctgtaaaatgggaatgacagcatctacctcacaggactattgtgaaccacttggcatttactgtgtgcctggcactgttttaaccaagctttaaatatatatgtatttgctcatttcttcctagcaaccccatgaaggtaggtatcactgttgtaacacctgttttagagacaaggcacagaggtaaagrtgttatcctgtgtgcctgaagtcacaaaactaggtaatacgtggcatagctggaatctgaacctgaatttctaacatctgtacactccaaaccacctcgctaatgactgcgaactgtcctaggaattctcagaggccagaagytctgtcttgtttgctattttattttttgagacaggtctcattctgccattcaggctgaagtgtattggcacaatcatagctcactgcaaccttccaactcctgggaagtgtctgtacgtgtgtgtgtgtgtgtgtgtgtaagtgtctgtgtgtacgtgtaagtgtgtgtacgtgtgtgtgtgtgtgtgtgcgcacgcacgcgtgcccgttacgttgaccaggctggttgtaaactcctgggctcaagtgatccacctgcctcagcctccaaaagtgctgggattacatgtgtaagcctctgtgtccggcctctgtcttgttttctgccaagtcctcagggcctggatagggatcattgttggtttggtctgagttttttgtgttttaaaaaactgtggtaagatatacctaattgaagtttttattttttatggaggcataacatatctagaataaggtacacagatttttttttttttttttttgaggtggagttttgctcatgttgcccaggttggagtgcagtggcgcagtctcggctcactgcagcctccgcctcccaggttcaagcgattctcctgcctcagccttccaaagtgctgggaatacaggcgtgagccacctcgcctggcactcagatcttaatacatttttaggctgggcatggcggctgacacctataatctcagcactcaggaggccaaggagtgaggtttgtttgagcccaggagttcaagaccagcctaggcaacatagcaagaccctgtctctacaacaaatcttaaaaattagccgggtgtggtggcatgtgcctgctgtcccagctattcgggaggctgaggtgggaggatcgtttcaacctgggaggtcaaggctgctgtgagccgtgattgcatcgctgcactccagctcgggtgacagtgtgagactttgtctcaaacaacaaaacaaaacagttttccacatacacagcactattgtaaccactgcccaaatcaacttcattgatttttctttttttgagacagtcttcctctgtcacccaggctggagtgcaatggcatgatctcggctcactgcaacctccgcctcccgggttcaagagatttcctgcctcagcctcctgagtagctgggattacaggcatctgccaccacgcccagctactttttgtatttttagtagagatggggtttcaccatgttggtcaggctggtctcgaacccttgacctcaggtgatccatctgccttagcctcccaaagtgctgggattacaggtgtgagctactgtgcctggcctggtttttcaattgaggtgggggaatggggaaggctagagggcttccccacttccagagtagctgtgcgccttgtacttgctttattcactgatggtccttctaataatgcctgcggaaacccattttgtcaactgtggccacatgtaatctgtttgctctgtctgcagtgggctcgggatgagtttgaaggcctcttcaagcagccagcagaaaatgtcaaccagtacctcacgtgagtaactcgagtgccctctcgccctgtccctgtccaccagccaaggcatcccggctgctttcctcatgacagtaacacttggcaccaggcacacttttcacatgaatgagtggctgttggggcctcatgttgtttggggtcgggactagttttccatggagaaagtaagattgctctggagcccactcttgaggctgacatgtaatcctatcctctgtcctcttcgattcctgatagagaccccaagtttgtggagcgaacactgcggctggcaggcactcagcccttggaggtgctggaggctgtgcagcgcagcctggtgctgcagcgaccacagacctgggctgactgcgtgacctgggcctgccaccactggcacacccagtactcgaacaacatccggcagctgctgcacaacttccctcctgaccaggtaatgcccagttgttgggtccatttggcagaatgtgtttccctgaaatgggagcctgcagtgtgggtcctcccactgtggagtccagctgtggcaggtgccctgaggcatggggatctgagaagagtgattgatcctgacctgctttttcctcaccctagttcctttgagcaaagaggcttggttgctattgcccttgactgtggtgtgggctgcgtcatacctgattcccagtcagggctgtagggattatgggggagaaattctggagttaagagcacaggaatcaatatgggttcaaatccaaactctacttgaacttaggcaaatcacgtaacttctctctgtacctcagtttcctcgtctgtgaagtagaaataatagtgatctatctcatggggggtttggggaggattaactggtatttattaaaatgaagttagtacaatgcctggtaatccatgagagtttgttaaatgatgggctgtttagcacaaaatggctacccagtgattggtaattgttctctcagccagatctctggttcaacctgtgggaccctacagttgaggtattttgtgattggctccagtccgcatcgagtgcccaacccaagatagtgaattgggggcacatctggggcctaggtgaagcgtgaagattgtcagagaggccttcactctcaggtcctgttctcaaaaatctctccatcccttagctcacaagctcaggagcgccgttctggtctgggcccaaacgctgtccacacccgctcacctttgatgtcaacaatgtaagtctcctttctagggtcttctggggtcaggtggagggtgaataggtgggaaggaggtggcggctccccactcgagggctgatgtgctcacccttccctgccctgccttctcctagcccctgcatctggactatgtgatggctgctgccaacctgtttgcccagacctacgggctgacaggctctcaggaccgagctgctgtggccacattcctgcagtctgtgcaggtccccgaattcacccccaagtctggcgtcaagatccatgtttctgaccaggagctgcagagcgccaatgcctctgttggtgagggtgtttggccagttggccaggagtcaccccacatgtccccggcctagtccagcctccccaccagtcctctacccctggttctgctctgctctgtgaccccaggcctgaggtttacccacaccttcctttgagcctccctttgacatgaagagggtaggttggggcaaattatctccctccctcctcctccttcccactatctggccctcaggagaacttgctgttttactcttgctctgtgtatttcccttagttttgttctttcttctgtttcttcttgatctgttcatctaggaggtatgatctctaccagcagtctctctcccttgatactttcctgccttgtctccttccagatccgcccccatctgtacatctacctgcatgtttctctgtgcatcttcaccctccatagtttggggctgcggtttactgacacccccaccccaccccatctgcatattttttcaccacccctcccttctgtatatgatgcttctgtagctctgtaacgccccctacatttaccttccttatatctcccccgtcttcctctccatagatctcctcccatttccccttccatggtccccatcttccttctgaaatgtctactccttcatgttcctttatgtatgtcttccaatctttccttccatagctctcatcaccttcatatatttcttccatctttctcctcccacctgcctcgccctctgtatatacccccactctcccccttttatatcttctccatctccccccatatctttcctctatgtccacatctgtgtattccccccaacttcccctccatatatcttttttactccccttttcctccctgtatcctctgtgttccccccatcttgctctacatcattcttcccaagatctttacgtctcccatcttgatctctccatctccactttctcctaacattttcatttccgttccttagtgtctctagagagatcattcttgatagcctcagctctttctctgtgtttttcaggtttgtattctgctctgctctacctctcctccttgccccttttctctcccaggatgtctctcctttccaaatcctttttgtacctgaataccttttgccccaccctgggctctcatttccatctcagaccttagcctgggatctaaagggctgacagtgtccctttcttcatgcagatgacagtcgtctagaggagctcaaagccactctgcccagcccagacaagctccctggattcaagatgtaccccattgactttgagaaggtatggggtggggctcaggacagggaaggaggatgggcaaagcatagacaggctggagaaaacaggagtatctggagccagccccgggcctttgtggggatcagattgtgggcctgccatatggctctgaatgagtaggtgttcccagccatccctttgtgatctgggagagtccagcaggcaattgcagtggaggatacacatcttctttatctgatcctctccccactgccttcacaccctccccactcataacaggatgatgacagcaactttcatatggatttcatcgtggctgcatccaacctccgggcagaaaactatgacattccttctgcagaccggcacaaggtgaggggaatctaaatctgatgttccaccctcctccaggtttgagttacccacacttagcccctctgtagaccctgaggctcttgtacttaactaccaccttcttttgtcccttctgtctctcagagcaagctgattgcagggaagatcatcccagccattgccacgaccacagcagccgtggttggccttgtgtgtctggagctgtacaaggttgtgcaggggcaccgacagcttgactcctacaagaatggtttcctcaacttggccctgcctttctttggtttctctgaaccccttgccgcaccacgtcaccaggtgggggcctgcatccgaagcagggtttgggtggggtgtatctgtgtagatctggttctgattcacgtcataccctgtcaccaggtgagggtttctgtctgtgtacctaccctttttgtgtatcctttttcacttattcattaatcacattatttgagtacgtgcgaaaagatgggatatttgaattgtgccctgggagattattagtaactacacaataatggcagccaaaatttattggacgcttcctacacttaagtgctttgcttgcttcattaatgaattcactcaaatatttattgagcaccttttgtgtgcagggactcttctaagttatgttcctcaagtagattatataaataacctattaaatgattttggaatcaaaaaaggataaaaagaggccgggcgyggtggcttacgcctgtaatcccagcactttgggaggccgaggcacgtggttcacctgaagtcaggagtttgagaccagcctggccaacatgatgaaaccctgtctctactaaaaatacaaaaaattagccaggcgtagtggtaggcacctgtaatcccagctactcgggaggctgaggcaagagaatcacttgaacccgggaggcggaggttgcagtgagccaagatggcgccattgcactcccgcctgggtgacagagcgagactgcatctcaaaaaaaaaaaaagataaagaggacttgagaataccagggggcgaggggatgtatttgagattttgtgtaggatggtcagaaaaggccttgctgaaaagatgacatttgagatcagacttggaggatgtaaggggacaaactgtgcaggcttggtggcgagtggggacacattccaggcagagggaccagttcttgaaagggtaccaagataggggtgtgcctggcaagttggaggaattcaaagtccccagagtgagtgtgagattgaggagggtaggagatgagaagaaaacagaatttcattgcttagggtgagataggaaccacaagaggatttcgaacaaaagagggttgtgrtctgactaaacacgtctgcatgggggtaggggggatggagacagatgggggctggaccctctgggatggtctccatcttacactcccctctttgtcttgcagtactataaccaagagtggacattgtgggatcgctttgaggtacaagggctgcagcctaatggtgaggagatgaccctcaaacagttcctcgactattttaaggtaaggcccctcccttactctgtcaccccacctcagggggcgaggtgtacacggtgacttgctggcctgtccacctccatgaccctgctgttccccctccctctccagacagagcacaaattagagatcaccatgctgtcccagggcgtgtccatgctctattccttcttcatgccagctgccaagctcaaggaacggttggatcagccgtgagttggacactggccaggctaggggaggccctgtatgggttggggagcctcatcatccagctgtcccactccagttcactgcccctacctacctgcccatcctctcttgctttctgccctcctgaccctatactcccatccccctatccccaggatgacagagattgtgagccgtgtgtcgaagcgaaagctgggccgccacgtgcgggcgctggtgcttgagctgtgctgtaacgacgagagcggcgaggatgtcgaggttccctatgtccgatacaccatccgctgaccccgtctgctcctctaggctggccccttgtccaccmctctccamaccccttccagcccagggttcccatttggcttctggcaktggcccaactagccaagtctggtgttccctcatcatccccctacctgaacccctcttgccactgccttctaccttgtttgaaacctgaatcctaataaagaattaataactcccacatcgcctgccctgctggttccagggaaggaagggacttcctggagctgtctggttcagatgataactcagagggctcaaccccaccacacctgccagttttctggacaaagaaaatgtaattgccacctcttcctgccctctctgcctaggaagagatggaggcaccagtgaggccatagtgagcaggtacttgggtccatgtgactgttaatttgagctgggttcaattctcaccttctccatgtcctaactccttgctctgtgaagaggaaagttacggtgaccaggctgctagggcatggccagcgtgccttatgtccttagggcagatcccctcccacctggctcaaagcactcagaccctgggcagccttttgtggtcatggttcccagcaccaggaatgcctgtgctgctcttagttcaatttccttgctgcaggggtgtcttaaacagctctgccgaatgccagtgcctgcaggcatacttcgtgatttttatggaaatacttgagaacatctgtagaggaaaagcccgttgcttgccttacgcttcccccggccctgccgccgccccagccccaggtctgcctgtattccccttgaggatcttcagcctcctactttggagaagacagctggctgtggggactgaggggtgttcatcgcttagagcaggtagcaggaggcctaacaccagccccaccgggactgcagagttaccgtgctctgtccttggtyttggctgagtgctccagacaattgaaagcaccagtctggccactgctacatctttgccttcttctattgtactggctcctggtgcctgaggagtccattcatacttctgttcctcaactaaccaataatttatctaccttacttagaaacaagatccctcactcttctactcaaacctgagtgtaaggaatagctcaacctgttctgaactggcttgattcccatcacagcctgtgcccacatctgctgcctcctgggccagtagttcctggtcctgggcacagtatatgcccttgtccacctccttctgatcattttattttcttggcctgctctgcttgggtgaccttatccttccacagtttcttcttccccactaggacgttgaggacagaggcattttccctttggtatctagtggtgatactgtcaaagggaaagtttttcccaccacaggaactttcccattattgctctagagtaccctagacactccacaccgcagtccactggccacaccactacagcagctgaggcttgaacacaactgttgtcttctttctccagtatgccagctcctttgcggatactctatagacaccttgttcactgcacctcccccattacggctccatgtcttccccaccacaactcctggatctccttgacaccttattcgtgcctgacacccttctccatcaaaacaagcttttgagtcatgcatgaatcctggttgcatcttagttgttccccctccacctcattccattttacttctgcggtttgtctaccagtctaccattgttaacaccagccagatgggagatcagggcttagcaggcgggggttgcgtcattgcaccgagccccctgcacccagcagccacaaaggatagggtgggacaaaggtttctcttgtcactgcctggaactatttgcccacctccttctgatcattttattttcttggcctgctctggcaggcattcaacaaacatttgttgtgtgctgtgtgccagtcactttctaggcacgtgagacagcagtggataaaacaaagatccctgtcctcttggggttttacgttctgctaggttgacacccagaatagattataaacacagtaagcaaattgtaccttagaagttgatcagtgctcttcaaaaggcgaggaatagagcccgatctggggatctggaatgatggcagtgcaggtaggaatttttaaatcggaaaggcttcatggagatgactttgaagcaagcacctggaagaagtgagagaatgaggcacgtggatgtgggccagcagcattccaggcaaagggaaccacagcaaatgcaaaacccctgaggctggattgtgcccgtttcactcaaacagctagaaagagcgctagtatggtggcagtgagtcaggggaagaagaggaagagatgaggtcagagaagtgatgagcctgttctatgccaaggcgaggacttttatctttgtcaaatatttccactcccatcatggcccgggaaatctcactaatgtaaaccttactgaaaatcctaactgctgtgatcaaggctgccataaagggaagcccggaagaggcggggaggctgccttggaacagggtagtgtaaggatgtgccagaaggcctgctggaggttgcagccctttgagctggacttggggatagtgtggttttccaggcagaaggaagtgaaggattaggtcggcctggtagtacttggcacacaacatgcgcccaataaataaaatggaaataaaaccgcggagtgttctacttgtgttgactgacatcaaaacaaaacaaaaaaccctcagagtgaggggaggcacgggaggggctgtgccgggcaagagaggtggcaggaaaatccaacgcacggcgcctatgcaaatactcgtgtgaggcagaaaagaggctccgccccgctcgaagttccaagcatgcgcagtagcggctcctgcgcctctaaggatccgcctctttccttctttctcagcctgggttccaccccgggaggcccgctgtatgagatggagggcgggctaaaggcgggacgagactcgattgagcgcaattatgaccaatcaccttgcggaatattcggcctatagcgaaggaggagctcagaacaaaaaggagaccccacccccgccgacggtgaaaacctatgaaacctgggcggaggcgtgcggagtcgggtagagagcgaaatcacgcctcttcagtcagccacgccctttattcttgctcggcctcgccacagagagcaaatcagattggctgggcgacaacctcaaagggcggggctgcacacgttcactacgggaatgaggtagcggtggagggggcagttgggcggggataggccgtcctagctaaggtggtaaaggccaataactcttcaggctgcctctcctcgaaaagtcatcttctcgcgaacctttaaaatgccttcctccccaagcacctcaagggactagaactgagtgcttcatttgtcttttttcctccttgcaaaagtcccgtttgccaccatggggatgtaccaagtgagaccgagtagggggaacgagtggtgattgacgcgccaggttactggccactgctcacctaggcgctagcaaacttctgccaagatcggaactgagtactaaacagcctccacagttctccctggtgccgtctccggcttggcgccgcatcctcctctgggctcgcgatggccgcgtcccctcccrctgcggacgggtcctttggtacatgcagtccgaggtgagtcccctcctttccacttcacccttccgagcgcctgcgtgcgcatgcgcggagcgcggcgcgcgcggcggttgggccgttggctgttcggccctgggatccgccgccactccgcgatcagaccgctctgtgccgcgagccgccgtgagcactcggattcaagccggcgccaacgagtccgggggcatcgcccgcagcggccaagctcatggccggctgagcgggacgccgcctccgcctcagccaccgccgccgccgccgcctcctcctcctcagccggcggcggcccgggcccagcaaccatggctgaagactactgggacgggcgcctgcggcgaacaggaggagaaggaggtcgcgcggcctcatcccgggccgccgccccaggcgccgccgcgccggccccgcggctctgaggttgctcgcgcgcccccgccggtgagcgcgtccccgaggcgtggaggctgcccctcctccttcagaacccacctcgggcggtgcccaggggtctgggctgcggggctggcaggtgcccccacccccggcgaatttcccagaatgcaccggggcggggggtcatttggggcctccctgaccttggccccgccctgggcctgtcctgggagctggggttgggtagtgctgtgggtgctaatggggacctgggggagtcaaaggaccaaagggtgtggaaatgggtgacaatggggtgaaagacttgggggggttgctgatgggggtcggagcatgtggcagtaagcctcacgccaataagtcgtgtaaggttcaaggccccgtgtgtgcttgtggaaggagggcggggtgcggagcgggtgagggacccgagggtgtataacggggggtagggtgtcgaggaagttctaagacatgctcatagggattatgtccgcagagaggcccggtgtgtgttcatgggggacagggtggcacaggtaccagaacgtgtgttggtggggtcagggctctgaggcctggtgcgtggcgatgaggccctggatggtgttaatactgcgtgtctgtccgtggggcctgcagtgtgtgagaatgcagtgtgtgcttgtggagggcaggtagctgaaggactcgagtgtggtgtgtgcgccagtgggggtcatggctgtagagggtgtatgcctgtggcctcgaaggtctaggtagtttgggacccagtatatgctaatgagggcagagtggaggaaggacctgagggtatctaacggaggaaggactgtggaatacctgagcctggcctaaaggagatgagaattgcgtgtctgtctgggcccaggaaggagtggtggggaagtgtcttagcactgtcagaggcttagtggacgaagggtaaaggtgatgtgaggtgtgagtgtgtccatggacacagggaatgtgagtctcgagggcacactaggaaggagcagggtaatagaagtactggtggttgctaatgtgggtttagagacatagaggcacttcaatgtgtgccatttcgagagtcagctgtgtgaagtctggaatatgctaataagcatcagaaccttgtgaagattgtgcccttgtgtccgcggaggaccagagtatgttgaggttccagggggtgctactcgggggtagggctgcggaggggatctagtgtgtaataagggggatcagggctttcatgaagggatctaagtgtgaaccaacaaggattatatctgtggagatatctctgagcagagagcaatagaggacaggaatgtgtgatgatctcggtgtgctaaagtggattacagctagggagggctgaagtgtgtgctaatgggagtcagggctgaatgagacctgtgtgcactaatgagggtcaggccatggtagaacagtgtgtttgtgtgtccctgcggaatagggctgagtaagggttcagggtgcactaatggggaggcaggactgtgtgaggcccggcgtgtgctaatagaaatcaggcctgagtgaagactcagtttgtgctgacagaggggacaggacagtggaaggactggaatgtgtgttaaggatggtcgtagctgtgaaggggcctgagtgtgggtaacactggttagagatctatctgtaaggttcactttatgttaatagcattcagagcagcatgaagaaggtccagtgagtgctaatgtgggtcagctatagagtaccccaagtgcatgttaatagaggtcagaatcatgtagggggaacagtacgttaatgaggggagtcagtactatggagaaggtaacaagcagctaggccagggaggggcccaagaatgtggtggcaagagttacttagaggaggctaagtgtgtgctgacagagttcagggcggtatgttatgtgttagggctttgaatgctgatgggtatatgagataatagcaggtaagatgtagtgaggcctccttgagggtctagcgtgtattaatggggatcaggacatagggtgcgatgaccaagtccttagtggttggtgtg

SEQ ID NO: 93715 - DNA, 13709 bp, Homo sapiens
aaaaggctacgaaatattgcattacatatgcaatttgcgataattggagtaattaatactcatttgagatcagccatgttggagtaggttagatcactcacattcctctcttcatgtactgatctagtaacatttgatcatcacttcagaggttacagatgatgtgctgctgtctattggatgatgcagtttatggttttaaaatcctaagggccaccctaagaacccagggttacaatatgcttaatatttctactgatgatactgaaaagtcaatttctagaggattctctacttaagaagacaaaaatccttgacaaatacctgcttggttccaagatatggtggcataagttgagcaaaataacagatcaatggaaaagcatggacaagataggtaataaattcctactccattggctatagtactgagcatttactttgctaaaaggatgctggttcaatgtgtcatggaaggagtgccctgcagaataaattttggtcttgaaattttgggaggctgaagtttctgagatcaagtcaggcctttttgatccctcataattagagttgtgacagatctaggtgccattttgtaacatttagtgatgacaaagtatctagggtatattttatgtccaaacaacttctggtgatgtctaattaaaggacccactggatctaagtcgaagaattctaaaaaaatttacgttcccatttcttggaaatagatgattaaaaagaccccctacccaggccttagtttctatccatgattagaaactgtggtatcagcactcttcccagtattcaggggccccatcaataacacatgccaaaatgctctagaggggcctcagtaaggaaaacagaaggcgtcaggaaattctccatcatttttcagtgacagcatttgtcagaggaggaaattagattatagaaaaatgctgaattagatatctttatcagtgactgttaaaaccccagggaacaagataaaactactctgaagacagtgggggttggtaagtatgctgcaagaaacacagctctggtacactgttggagacatagggtgaatgtgagagtgagagcacacttgtcaggactcagaagtgcaaacagccctactgaattatcaaagaatgcacaaggatggttgatggcaaccacacacatcgtttgctgtgtgttatcagaggttgctggagattgctggggacttgctatatcatatcagagtcacagcaatatgccaaagacatggatgcctttctgtttagcattatctatccagtgcaaacctatttgcttatgacgtccagtggctctccaatgccaacagggaaaagactaagctctttggcaagatatcaaaggctctccaaactctaggtcttgcttgcctatctcacttcatcttcctttacccttggccttctgctttaagcttcagtgactcccagcttgtgatttttctacttgtagcaaactactcacatacccatgcctgtggtcttagaaagactgctggttaaaatgacccatctggttttctgtatctgctccttcctattcctccttgtagcatcagccctggcatttatgtcctcggagaagccttctctgaatgtttctcttagcccatccttgatcctcccatggtatcttataatgcgtactactgcagatgcaggtattatatgaccttccttacattgtcctgtggttgaattttaggtaagtggtgcaaatgttaatacactggttactgctactattgctacgcgtgataaactgttctttgtctcaaactcacaagttttgtgtcttctgccagcattcaagtaaatgtggcaagctaatttgttagcttgcaagtagggtaaaatcccaggcttttaatagttcattgtatacattatattcattgttttacttccagcaccaaagtagtggttaacatatgcttagtgtttaataaatgttagatgaatgaatgaattgacttaatgctatagaataaaagcaaagaaaagcagcccaaagtgatcagtccacttagaccatgtcttttcaatggcacctgtgcttctgcttagccatctccagtgtgtcttcagtggttgtctagtgtggcttccagagtttatttcctaactacatttttactgatgccagcaaagagagctcagatacttctgtgacattgtttagagcatgaacccaaattgcaccatcatcaatgccatttcttacatgcttaccagggcaagatgcagtgagaagtgtcatacaattgaagttacatagtttatataattcctatgaattattgggctaaaaaatagataacattaaaagcatagtgtactaaatgggctgtgcaaaacacagaagtatacagtgcagaaattaaagaaaggcttaactaaatttttgcagcctcttgtgaacaaggtttagtgtatataatttgtgtctgaagtgctggtgtggctttctgaaattgtatattcttttttcacccccatttcatacgggaaaacttagtcatgaagttaaaaggtgaaataaaatatgtaaggtcaactgcttatagctaaaaaattagagaaagggtctgtagactctagagaagccgccttatagttgtcttttactttctgtttagagccaagtccactttatgaacaaaaagtttgagaagtatttttgatataattccagagaagacctccaaaagattcctagacatggggaagtgtcatctatttaaaaaaatatttaattaggcccagtgcagtggctcacgcctgtaatcccagcactttgggaggtccaggcgggcagatcacaaggtcagtagttgaagaccagcccggccaatatggtgaaaccccatctctactaaaaaatacaaaaattagctgggtgtggcagcacatacctgtagtcccagctactcaggaggctgaggcaggctgaggcttgaacatgggaggcggaggttgcagtgagctgagatcgcgccactgtactccagcctgggcgacagagtgagaccccatctttgagatctagaagtaatgagagataatttgaaactctgaacaaagaaacttttagaaaaaagcattttttatcatactcccaccccctacctcaaacatatttggttgagtgagttgactgtaagttgggaacctatcataactgtacttgtaagtaaagacatgtttttaaagaaacaaggataaagttcattgcatagctggtcattcttcaaataatgccagatcctaagtgatttcaggcttgttaagtatattcatactgttgtgaaatagatctccagaactttttcatcttgcagaagctgaaattccatacccattaagcaacacccctctctgcctcccaccagtcccggtaaccaccattctactttcggtttctataaatttgactactttagacacttcatataaatggaatcaaacagtatttgtctttttgtgactgacttatttcatttagcataatatcctcaaggttctcccacattgtagcatatgcaagacttccctttcttctaaagggtgaataatattccattgcatgaataaatcacatttgttaatccatttgtccatctgtggatgtttacgttgcttccatgtcttggctattgtgacgaatgttctgatgagcatgggtgttaaaatatcacttcaagactgcttttaattcttttggctatatgcccagaagtgggatggctggattatatgatagttttatttttaattttttgaagaatttccatactattttccacagaagtatcaccattttataatcccactaataatgcacgatgttccaatttcttcttgtggaattcttaagactgtcttttctccttgagaaactccctggggattgtgaccagcgatgtcattgattttcaatctgactgaagaatgtaattttccttccaattgcaaagtgtgtactccctaaggaaaggaggagagaagggtcatctccatatatgttaagtagagaaaaatgtcaatagttagatgctgggtaaatactgcaggaaaagaaaggcgtttcagtacacagcatttattcaaatcaatgcacctgacttggtggctagatttaagttaaagtcttttcagtctgatggacaaagcagatgtgtgagcatgaattcaatcatgaaaagtctttattaaaatacaaagagtcaacatatgtcacgtgggggaggcttattactaagaatgtaaattcttaagacaaaaccttcctatagcccatgtgataaatctcttttctgttcctagtcttatgaagggcatattacgatgctttagggcacatttatttgttggacttaccacaattcataattaagtatttagttttgtgcttattttttaatataggaaatgaatacagcataaggccagtggcatgttgtttttttttctcattgcattttcttcagtgatgaagctggtgcctgaggcattgttggaggttaatagatacttatggaatgaaggaatggagtgtggtagaaagagtcttattttctgagggaggagttacgagttctgtactcagaaccactactaagtagctgtgatttctaaggcaagtgacttagtctcttggtcttggtttacccatctgtcaaataaggatttcatatttaaacacttttttcccccagacagtgttacttgggatcttggagattctaggaggtgccctgaattgcagaatgcaaaaatccaagagccggggacacttggtcctccaccgctactttccaaacaaagagatctacttatttctgttttatgtgttaggatactaccaaaatgtttatttacaaaatgatttcaatgcttaaaaaatattcaaaacccataatttaaattggaaaatctctaagtctccttttagcagctaactgcctgggctttcctcatccccagaatcttcactttatccagggttttgataaagtgtcacctcctcagagagaccctacttggccaacaaatctcttggtataatttgtatttattacctggtattattctctattttgtgtggcaggtgttagtgtataaatcttatctcctcaacagcactgcaggttctttgggagtgagggccacataatgtatatcactttctccaccctaatcagtacttaacataaggccagaaatgtaatagatattagtattcaacctattcattcacaaatctttagagaactactcgtaatggttatcatacattagacacttgacatttacaagtctctcaagataccatttaatttcttcacctttaaagtgggggaaagagtactttcttcaaatgttcgttttgaagattaatgaagatcatgcattagatgagaatagcaaagctctggtgagctgtagattctgggctgggggtaaggttcactcactgtctgagtgattagtgctatgtctctcccctactcaaaaccctttagtagctccctcttgcctcaaagattgaattagacatatgttatggtgcctgaccagctttcctatccctcttccctgctaccatttctaaaatcttttcccaccccatgtgattctgatgtgtccacatccaaagcccccactccttcccctgttgttctgtcttttttttttttttttttttttttttttttgctaaaactgttatgaacgatgactctcttctttttggttcacaagtcataggtatgcaggcctacattgctgctattcttctttcccatgaaaaagcctgtgttacactaggagcaaataaggttaatatgcaaagtaatgtggagacagagcttgctgatagagagagaaagaactgatgctattatttaagtccctagatccactcaaggtagtagggttgttgtcagggttaaatgagttaataatgggagtgctgcagccactgccgctgattccagatctcattgccacacgccccgacgactgcctgatgtgcattcctgattccttttggttccaagtccaatgtggcaactctcaaggatcagctgcttcataatcttctaaaggaagaacagaccgcccagaataagattacagttgttggggttggtgctgttggcatggcctgtgccatcaatatcttaatgaaggacttggcagatgaacttgatcttgttgatgtcatcgaagacaaattgaagggagagatgatggatctccaacatggcagccttttccttagaacaccaaagattgtctctggcaaagactataatggaactgcaaactccaaactggtaattatcatggctgggacatgtcagcaagaggaagaaagccgtctcaatttggtccagcgtaacgtgaacatctttaagttcatcattcttaatgttgtaaaatacagcccgaactgcaagttgcttattrtttcaaatccagtggatatcttgacctacgtggcttggaagataagtggttttcccaaaaaccatgttattggaagyggttgcaatctggattcagcccaattccgttacctratgggggaaaggctgggagttcacccattaagctgtcatgggtgggtccttggggaacatggagattccagtgcacctgtatggagtggaawgaatgttgctggtgtctccctgaagactccgcacccagatttagagactgataaacataaggaacagtggaaagaggttcacaaactggtggttgagagtgcttatgaggtgatcaaactcaaaggctacacatcctgggccattggactctctgtagcagatttggcagaggtacagtgaagaatcttaggcaggtgcacccagttttcaccatgattaagggtctctatggaataaaggatgatgtcgtccttagggttccttgcattttgggacagaatggaatctcagaccttgtgaaagtgactctgactcctgaggaagaggcctgtttgaagaagagtgcagatacactttgggggatccaaaaagagctgcaattttaaagtcttctgatgtcatatcattttactgtctaggctacaacaggattctagttggaggttgtacatgctgtcctttttatctgatctgtgattaaagcagtaatattttaagatggactgggaaaaacatcaactcctcaagttagaaataggaatgatttgtaaaatccacagctatatcctgatgctggatggtattaatcttgtgtagtcctaaactggttagtgtgaagtagttctgccacctctgatgcaccactgccaatgctgtacatgctgcatttgccccttgagccaggtggatgtttaccgtgtgttatataacttcctggctccttcactgaacatgcctagtccaacgttttttcccagtcagtcacatcctgggatccagtgtgtaaatccaatatcgtatgtcttgtgcataattgttccaaaggatcttattttgtgaactatatgtatcagcagtgtacattaccatataatgtaaaaagatctacatgtaaacaatgcagctaactatccaagtgttataccaactaaaacccccaataaaccttgaacagtgaaaaaataaataaataaatgagttaatgcatgtaaataaaaacgtacataagagtgtatatgttcaataataatttgctgtcctcaatcatatctcaatgtataatatttctatgtattcttatcttctccaactagactgtaaagtttttgagagcaggcactaggtcctactcagcacttggcctacacttaggttcagtaaccctcgttgaagggatcagcatatttctgtgaggcacaaccagtgtgtggcttcagcttcagctttccaaacagtctgtgattttgttagtagaattgtgaaatttactcctaatgtgtggaacgcatctttgcctgtggttttattttgttaatttcattgtgttctaacttaggctaagttgccatgatgtttttgtgcgaaaactgattttatttttatttttcatcatgcaaaatgtcttttgagaaagctggagttaggacatttttctagagtcacattttaaaaaattaaggtcagtaagcaaagactcccaactccttgagttatgcttggaaaaataaaattgctgctggtgctaagctttgaaattactaaatcactctcaagtcccacacagattgttaaaatggaaaacatctgaaaattaaattctttatgttgcctttggtgcatcttccccttttctgtaaaaggtggagataaaaaggattcctgaaaaggattcctgatgattttttcatgtttttaatgcatgtgcaaaattcttatgtctagttaatgctagcatttgaagctgtgtccaaatgcaagcatttgcctgtttgattttcagttgtgaaggcagagtggaatggaagctgtcagtttattctgatttcctgtctgaatttagtggacaaatgtggaaatgataatataattagtagaatttttaccctgaagtttccatatctacacacaatagccttgaatatggaggatgggaaatgtttgcgcaaatagattcactgaagcacatgatttgagtataagcccttgtaaagttaggggacctgaatccctcatcctttcagatccagctggaccattagctccagaaataaaacaaagtgctaggagaaggattcctttgttgttaatagctacatgcttgcacgatgtgtgcatgtgtgtatttggaagcctgtcccttcagtgtctctccagtcaggagcatcttcttcaaagccttcatgcagacgattcctttaaagcctgcctcttgtctgaaataaaacaatagcctgctagcagcctggaagcccttgaggtaattggtgaattgaaattggtatgtatctttttcatctatccttttatttttaccacagatgtacaaataaacaattgtgttggttttttgtttttaaaaattacatattattctgtccatctttttaaaaatagttttattgaggtataattgatatataaaaattgcacacatttaacagatacaatttgatgagtttgaacatatgcacataatagataatcaaggtaatagataaatcgaccacctccaaaaatttccctgtgcctctttgttttttgctttgtttcattttgttttgttgtaagaatacttaacatgagatctatcttaacaaatttctaaatacaatgtgcccttgttacctataggcacaatgttgtacagcaaatctctagaacttattaatcttgcataactgaagcattgtacccattgaacagcgccttgtttctcctgcctccaagtccctggcagctacccttctactctcagtttctatgagtttaactatttcatataccacatataagtggaatcatgcagtatttgtccttctatggctagcttatttcacttagcataatttcctccagattcatccatcttgtctcatatggcaagattttcttcttttcaaaggccgaataatatcccattgtgtatatacaccacattttctttacccatttatctgttgatagacacttaggttgtttccgtatgttggctactctgaatagtgctgcagtgaacattggagtgcagatatctcttcaagatcctgatttccattcttttggatatacattcaaaagcgggatggctgaatcacatgatagttctatttttcatttttagaggaaccaccacacttttttttatagtggctgcatcgttttgccttctcagcaagagggtacaagggttccaatttctccacatcttcatcaacatttatcttttgcttttattttttataattgtgatggttaatacttagcatcaacttgattggattgaaggatgcaaagtattgatcctgagtgtgtctgtgagggtgttgccaaaggagattaacatttgactccgtgggctgggaaaggcagacccatccttaatctgggtgggcactgtctaattagctgccagaatgamcagaataaaagcaggtagaagaatgtggagagatgagactggcttagcctcccagcctgtatctttgtcccatgctggatgctttctgccctggtacatcagactccaggttcttcagctttggaactctgactggcttccttgttcctcagcttgcagaggacctattgtgggaccttgtgatcacgtgagtaatactccttaataacccctcccctttttatatacatctatcctattagttctgtccctctagagaactctgactaataacgtaatatccatcttaatagtgtgaaataatatctcattgccgttttgatttgcatttccctgaagattagttacatcaagcattttttatataccttttggccatttttatatcttaaagaaatgtctgttgaatttttttgcccatttaaaaatgtctattgagattttgcccattttttaattgagttgcaggagttccttgtatattttggatattaatcccttatcagaaatatgatttgcaaatatttttccctattctgtgggttaccttttaatctgttgagtgttttgtttactgtgcagaagacttttagtctgatgtagttttacttgtctaattttgcttttgttacttctggcgtttttttttttttttttttttttttttggaattttcctcctcagtgattcttgttccaatgttacttatattatttttggtattatatccaacagatcattgtcaagcctaatgtcataaagcttttcccctacgttttcttctacaagtttcatagtttcatgtgtaacacttaagtttttaatctattttgaggtgatttttgtatattgtgtaagctaagggcccaatttcattcttctgcatgtgaatattcagttttgccaacaccatcagttgaagaactgtctcttccccattgcgtatttgtgtaacccttgtcaaagatcagttgactgtacatgcctgggtttatttctgggctctttattctgttccattggtctctatctctgtttttatgtcagtatcacactgttttgattaatatagctttgtattatattttgaaatcaggaggtgttgtgtctccagttttcttcttttttttttaagattgttttggccatttcaaatcttttgtggtttcatatgaatttgatgatttttttctgggtataaaaggaatttacctaaacacaataaatgccatatgaggggacttttaaaaattgtggaaaaattaaattaaaaaataaaaataaaaaatacatactttatttctcaatataaactccatgaagttcaagatacttttgtaaatgataataccagctaattagtctgtccctaaagacctggaaatactggcagtttagccatatcaatgcagtctttttaacattattagatgaagaaaaatgggttctctttaaagactttttaaggttaggggaaaaaaagaagtcagaaggagccaaatttggagactgtaagatggatgtataatgatttcccatcaaaagtcttgcaaaatggccattgttcaattaaaggaatgagcagcagcattgtcctggtggaggtggactctggcaaagctttcctgcgtgtttttctgctaaagctttggctaactttcttaaaacactctcatagtatgcaaatcttatcgttctttggtcctccagaaagttaacaagcaaaattccttgaacatccgaaacaagtttgctatgatctttgctcttgactggtctgcttttgctttggctggacaactttcaccttttggtagtcattgctttgattgttccttgtcttcaggggcatactggtaaagcagtgttttatcttctgttgtaattatttaaagaaatccttcaggatcttgatcctccttgtttaaaatttccattgaaaactctgttcttgtctacagccgatcacagcacaatcattttggcaccactcaaatggtaagtttgcttgactttaattttttggtcagaattgtgtaagctgaaccaactgaggtgtctatggtgtagactgttgtctgtgctattaatcattgattctcttcaattaaggtatgaactaaatgaatttttttttcgcattttgatgtggatggtctgcccctgtgagcttcatcttcaacattgtctcatctcttcttaaaatgagttatccatttgcaaactgctgatttctgtgggggcattttccccacaaacttttcataaagcaccaatgatttcactattcttccaccgtaaatttgatctttgctcttatttcaattttagcagaattcatgttgctctgatagcagttcttttcaaactggtgtcttatagttgttagtgcctcaagctagacgttccgacatgttataacaagttagtacagatttattttggtgcaaagaatttttgaaatccatgtaaagttttttataaaaacactttttttaaaagtcctctttacttagtgataaatgtaatcaagatgaaagtctcatacgctgtacactaaaaactacaaatcattgataaaaatattaaagaaggaacaaataattggaaagacagcccatgtacatggattggaagacttaatatagttaaaatgtccatactacccaaagtgatctacagattcagtgtaatccttattaaagcatgttcctgtacttttgcaatttccttttttctttttttttttttgagacagagtcttgctctgtcacccaggctggagtgcagtggtgtgatcttggctcactgcaaccaccacatctaggttcaagtgattctcctgcttcagcttcccaagtagctgggattacaggcacctaccaccatgcccagctaatttttttgctatttttagtagagatggggtttcaccatgttagccagtctggtttcaaactcctgacctcaagtgatccacccgcctgggcctcccaaagtgctaggattacaggtgtgagccactgcacctggctgcaatttgctttctttactcaacatctttttggtttagatgatggttgtttcaatatttttcaattacaatggcaaagaatgtcaggtataagactttttgtacacatatgagaatctaagtgtaactctagaagttaaaatgcctaatttaaggtttttggaatatttacttttactagaaatggtcagactactttctaagtgtttgtgtctatttaaaacttccagtagcaactaagagttttccccccgcttatcttttaccagatttaatttatttaatttaccagatttaatttattgtaagattttaaacgttttatttatctgagagagtctcatttttagtctccatttgtactggcctgattgtttgtgtaattggatgctttcatgtatttattagccatttgtgtgtcttctcctttaataaaaggagaatattaagatttttttcttaatgatttgtataggcttcagaagcttctttaaattttgagcataaagattttgtaatttattttcattttcagtaccttc

SEQ ID NO: 93716 - DNA, 50822 bp, Homo sapiens
cccccccactgcactgtgggagcccctttctgggctggccaaggccggagcccactccctcagcttgcagggaggtgtggagggagaggcacgagcgggaaccggggctgcgtgcggcacttgcgggccagctggagttctgggtgggcgtgggcttggtgggcccccacactcggagcagccagccagccctgctggccccgggcaatgggsgacttagcaccggggccagtggctgcggagggtgtactgggtcccccagcagtgcgggcccaccggcgctgtgctcgatttctcgccgggccttagctgccttcccgyggggcagggctcaggacctgcagcccaccatgcctgagcctcccacccactccatgggctcctgtgcggcccgagcctccccgacgagcaccaccccctgctccacagcgcccagtcccatcgaccacccaagggctgaggaatgcgagcgcactgcacaggactagcaggcagctccacctgcagtcccggtgcgggatccactaggtgaagccagctggactcctgagtctggtggggacgtggagagtctttatatctagctcagggattgtaaatacaccaatcagcaccctgtgtttagctcaaggtttgtgagtgcaccaatcgacactctgtatctagctgctctggtggggccttggagaacctgtgtgtccaaactctgtatctaactaatctgatggggacatggagaacctttgtatctagctcagggattgtaaacgcaccaatcagcactgtgacaaaacaggccactcagctctaccaatcagcaggatatgggtggggccaaataagagaataaaagcaggctgcctgagccagcattgacaacctgattggggccccttccacagcgtggaaggtttgttctttcgctctttgcaataaatcttgctactgctcactctttgggtccacgctgcttttatgagctgtaacactcactgtgaaggtctgcagcttcactcctgagcccagcaagaccatgagcccaccgggaggaacgaacaactccagacgcgctactttaggagctgtaacacccaccgcgaaggtctgcagcttcactcctgagccagcgagaccaggaacccaccagaaggaagaaactccgaacacatctgaacatcagaagggacagactccagacgtgccaccttaagagctgtaacactcaccgcgagggtccgcggcttcattcttgaagtcagtgagaccaagaacccaccaattccggacacattgggacccagatttctaaggaggggcacagactgttggtgttgtctatgagcagggcatgtcgagattagttcttactctcttacttttttttttttttttgagagggagttttgctctgtcgccacgctggagtgcagtggtgcaatctcggctcactgcaacctgcgcctcccgggtgcaagtgattcccctgcctcagcctcccgagtggctgggactacaggcacgtgccaccacacccagctaattttttgtattttagtagagacggggtttcaccatgttggccaggatggtctccatctcctgaccccgtgatctgcccacctcgtcctcccgaagtgttgggattacaggcctgagccacctcgcccggcagagattggttctttcaagtgatggaaaaactgtaaactggactcactcaattctacaggaaggacttgctcttttcagggtaaagaggcaaggccggggtggcgctcataggaactacaagcagacaggcaacccacctaggagcaagtccttttctccttcagctttgcaatccccctctacagacccctattggcagaagctaacacaaagccagcagacaaaactgacttgtggttttcagtgtcctattgctagcatcacgaaataaggtatagaagagtgggtttgggacccggcgcaatggctcactcttgtaatcccagaactttgggaggcagaagcgggagatcacttgaggtcaggagttcgagaccagcctggccaacatggtaaaaccctatctcgactaaaaatacaaaaattagctagacatggtggcaggcgcctgtaatcccagctactcaggaggctgaggcaggagaattgcttgaacctgggaggcggaggttgcagtgagccgagatcccgccactacactccagcctgggtgatagagcaagactcagtctcaaaaaaaaaaaaaaagactggttttggagctgagacaataacctaataactgccaaaatacaactgtggcaaagccatttagctatcccccaaatatcagtactgccttttcatcatgctaaatagtggcagcgaggtggctctgcagatcggaactaccatttcttagttcctcttgcatctaggtgatactttatgacaggtatgtgtgacattcaggccaatctaagaacccactctttcttgtttcccatgcgttgactagttttgtcagcatccagggtgacttttgatgccatatgttgaaagtgacagagctagtgttaccataacagatacataataatgctctagacactttcgcactcctcatagttaccatgagattgccaaggaggttttaaaatccaccagcagggagctcacaaatgcttatcaaaatactacccccaaatacatgctaccttcaatataagaagaaatattccttttaccctttgaacttagtttatttagctgagaaaaagtgatactcttaagagttttagagactttattcatgcattctaaattggagaatacttagtgttgataatgcttctggtgtaatgctgcaattatgttataatagcacactattaaacttgttaagaatttctgtaaaatacactgggtggggagtggacaatggggatgaattccagtgcctctctcttcaccagaacaaaaatgctgtgtttttttaaaatgatgcagtgtgagattactaacaagtggccatcttcagactctaattgaagtcacatgttaacacacaaatttgaacttccaccagctccttcattcaacaaaggtgtaaaaaaagttagggttttcgtaagggaatgacccttaggcaccaatcctagaaaaaaaaactatgtttaaaattttctcagatattggggctaaatacaaaggagataaacaaagaaagatttttctgggttagtcagagcagttgctttaaaatttcccatccttttgtaaaaaaggaagcctagaacctctgcaacaaagtcatacgcttacttaaattcccttttagattgtttaaatttaaatttgtttaaagtttaacttgttttctgcctttacattttgaaatatcatgaagaaatctggtcaaatacgtttttagaaaggtaaccggcaacctctcatgaagatcatgttggatgttggctcaagaggccagaaagtgaagaggaggcagccgtagcaatgtctcagtggattggtcggaaggtcttcctggacctcagagttctgcttcccaaggcggagatgttctggaagactagtgaagatgtcttagagaggaatttgatacttctttagctttctcttcctctcagtcaagtttccctggtagcagagaaggagagtgattgacaaagggactagaaagagaactggagtggctttgatgaataaggacaagcaccaggagggctctgacacacttaccaggtgtgggagagcagcaggcttgcatgtaagcgtgggtgcacgtgtgtgtgtgtgtgtgtgtgtgtgcctgctccctcctctcctcttgccccttccttctccttctacctcctctcctctctctccctctctcccctctccccttttctcccttctctacctctccttcttcctctccctctacctaggcatgtgctgatataccttgatataaacttgaactccctgaaccctgatcctaccaagtgcaactctttaccatgctcactttactttcacttgcttcctttctcctgagacttccctaaaaaatgtttgctatgtttgcctatgatattaccgccttttttagtgttatgaactcccagttctctcttctaagttaggctcaaaggaatgatatatagttgtagtttacatagaatagaataaaaatttacaaagttgtgccaaatacacaaaatacatttatttttattagaattctgtaccagtagaagtaaacaggtttaccttctgaagtttaaggggctatcaagtcactcaaagatcaatgtggattaaggcacaccaagtgattaaactatttgtatctgagattagctgccaacctccaaaatactctcctcagtagctttccacttacccttgaaattctcaccaattcccagcacaatcatagctcactgcagcctcaaactcctgggctcaagggatcctcccaccatgtctggcagaaccttcctgtggaaggcagggccttccgaagagatacaaacaggtttccagagtattggcacaaaacagtgaagtaatttacatttatgataaatgatttggcatagtccctgcttcacaactgggtagtgattaaagctctctgagatttggtttcttcatttgttttaaaaaaattctctctcttctctgtacttgatgcccatttcgtggggtccttgagcagctgcattaattatccaataagatgcaagctgacaagactgaaggtggtctcccttcctgtgatatttacattttaataatagtatctcaataacttatatctgatagatatttgtgagctctcgtataatcttcccaccagttctgtatggtagcctgattatacatctatcttattgccaaggaaatgatctaagagaggtttaaatgacctgaccatcatcatagaacaagtcagtggtagaataaagatcagaaatcatattttctgccggacatggtgggaggatagcttgagcccaggagttcaatactgcagcgagctatgatcgtgccggtgaattgccactgcactccagcctgggaaatattacaagacattgtctccaaaaaaaaagaaaagaaaagaaaaagaaaagaaaataaattatatctcccactcctagcaagtgcttttccctaggggtgaatattttcagcctctgtgtttctggaccttccatggtttgtttctgatgatttggacagaagagagggcaatcccagtcttgccctgagcataaaaccactagcatcaaccctagtttattatgtgcacactatgtgctttgcctcacatccagatcctcttcctcgactctggaatcccctaccagtccttcatggtctggctagagaccttctccaggcagcctctcctgatcaaaaccacactagagtcattctttcctcaaattaaatcccctcagaacatgtgaatccataatcctccactagttgggcttttttgtgcgtgttggtggtgggtgggaggttccatataccagttttcagggaaaagagaaaagtgacaacataaccaactatcagagttttagttgaactgccagattttaggcaatgactgggattgatacaaattcagttcaatttcatccactttttctgtctagctaaacttctgagaagtgatcactgatgatctgatgataatggggttaacctagaggctctttaaggtcctcaaaggaagagaaaatcaatggtcgcatttggggacatttgttatcacaacactctccaaaggtgacctgggcatgtctgataactgcatttttcatccattcgacaaataaaattcatcgcacaaaggatcaaagccctgggatgctgagaaggaaatttgcataggaatttcaatactgaaaaggtcagcgatccaatgagactagctagccctggggagttctgaagcccttgttctaaggaaaggaaacgaaatggggttctctttcattttgaatgatgatgagatgacttacgataacaagtctgacttcaaagtggtgagctatcccatttgagcttcagctgcattaaaattgatggcttcaaggaccagaaagatatgcttattagttgcatgactggagagttacagggctatctactctttggagttaaaactcttttgggtgccctagcaaagtgaggtagcacattctgcttaactacagagaatcatttctgaagtcatatatactaagatatgcttcagatgtctatgtcagcctaaagttttccaaaatagttcagttcaacaaatagttctcaaatgtctattgtccaggcaccgtgctggttgctggagatggagagatattaataacgagttataagtgtcaggcattactcagagtttcttactatgtaagaccctctgccagatgctttagatacatcatctcatttcattctttccattaccctgtgaggtattcttagccccactttatatggtctctagccagatcatgagggatctgtagggggttccagagtgaggaagaggatctggacatgagtcaaagcacacagtgcacaaaataaactagggtcgatgctagtggttttatgctcaggacaaggctggaattgtcctctctttttctgtccagatagtcagaaataaaccatggagggtgcagaaatagaaagattggaaatgtttacccctggggaaaagcactggctaggagtgaggagataccactttacaggtgaaaaaagcaagtcatagaaaggttaaataatttggccaggcatggtggtgcatgtctgcaatcccagcactttgggaggccaagacaggcagatcacctgaggtcaggagttcgagaccagcctggtcaacatagtgaaaccctatctctactaaaaatacaaaaacttgctgggcatggtggtgcacacctgtagtctcagctactcgggaggctgaggtggtagaatcgcttgaacctgggaggcagaagttgcagtgagccaacatcgtgccactgcactccagcctgggcaacagagcaagactccatctaaaaaaaaaaaaaaaaaaagaaaggttaaataatttgcctaaggttacacacccaatacatagcagagatggaacttaaccccagttctgtctaattccaaactccatgatcttaaccactataccatactgccttagatattaatacattttaagagcctcatggtagactagcaggcacatatgaaatgacgcattttctaattattatgctaaatgctaagatagaagcatgccggaatacagaggatgtgcccttgggaagtagcactgcatatggatttagagcacagactccaaagctataactgcctgatgggttcttctgcccacagcacagacaaaaccagaccacggcattgcaatagagaaagagtttaggccaggcacagtggcttacgcctgtagtcccagcactttgggaggccaaggcaggtggatcacttaagcccaagagttggagaccagccttggcaacatggcgagaccctgtctctacaaaaaatacaaaaattagcagggtgtggtggctcacacctgtggtcccagctactcaggaggctaaggtgggaggatctcttgagcctgggagtttaaggctgcagtgagccatgattgcaccactgcactcagcctggatgacagagtgagaccctctacccgccccccccccaaaaaaagaatttaatagatatgaggctagccatgccatgtgggaaatggagtcatcattgcaatcagtctccctgataatttgggggctagggtttttcaaagacagtttagaagaagggatgggggtagctaagtaatgggtgcttgctgctgattggttggtggtacaaacatgggggtatgggaaatggtcctcatgcgcactgagtcacttttggttgaggccacaggagtggttggcaggttcaggtggagccatcagtccttcagacacgcgaaaaccctgaaatgatatctcaaaaagccaatcttaggttctacaatagtgatgttatctgcagagtaaatggggaagttgcgtatctggtgacctctggaataatggttaccaatcgtttatgtctacactttggcagaattcggctcctttatcctcctaacctggtggtctctcattagcttttaaaaggcakttgagttttgggtaagggctattagcatttaaactataggcccagcgtggtagcacacatttgtaatcccagaactttgggaggctgaggtgggcagatcacttgaggccaggagttccagaccagcctggccaacatggcgaaaccctgcctctactaaaaatgcaaaaattagccaggtgtggtggtgcacgcctgtagtaccagctactcaggaggctgaggcacgagaatcacttgcacctaggaggcagagtttgcagtgagctgagatcgcaccactgcactccagcctgggtgacagagcaagactgtgtctcaaaataaaaataaactataaactaaatatctcccaaagttagcttggcccaagcccaggaataattaagggtagcttgaaggctaaaggcaagatggggattggctagatcagatctcccccactgccatacttttctcactgttaaaatttttgcaaaggcagtttcaaagccagacagcctggatctgaagtgtggatttgccacttacaaattatgtgaacatgggcaacttaaacctctatgtgcctcagtttcctcatctgaaaatcaagataataacaaaacttaattcatagagttgtgaggattaaatgtgcttagaatataattcctgacacagagtaagcactacactacaccagtgttagataaaatgaataagcttaactccaaatgaggttacaggaaagctttttggaaggactgatgcctggagctgagtcacagaagatgaataagagttagccaggtgagggccgggtgcagtggctcacacctgtaatcccagcactttgggaggccaaagtgggcggatcacgaggtcaggagattgagaccatcctgatcaacatggtgaaaccctgtctctactaaaaatacaaaaaaaaaattagccaggcgtggtggcggacgcctgtagtcccagctactctggaggctgaggcaggagaatggcatgaacccagaaggcggagcttgcagtgagccgagatggcgccactgcactccagcctgggcgacagagcaagactcygtctcaaaaaaaaaaaaaaaaaaaaaaaaaattagccgggtgtggtggcatgtgtctgtaatcccagctactctggaggctgaggcaggagaatcgcttgaaccagggagttggaggttgtggtgagccgagatcacaccactgcactgcattccagcctgggcaatagagcgagactctgttaaagaaaaaaaaaaaaaaaaagagccaggtgaaggtgggaaaggtttaccaggcagggggagagcatgagcataaaacacaggcatacagcagtattgttgatggaggctaactacaagcagtttggcagttctccattagaccataaagcacaaggaaggaagaggtaggggctgttctgggcaggggcagttctgtaggtcacttgaaggaatttggactttattttgtaggtaacatagaagaatcatagaagaaaagagttttatgtaggggaacaatgtagacagatacatatgggagagtagatttgttatatggtctacaatttacttaaaaatactccgcagagacagtgtgagatacacatasacttacacacatgtacatgtagatatacacatactctaggggcagttaatatctgaagtacccccagtgacaaacactttccagcagcacttagtttgcatataaagacactaattgtgagtccaccctccagaggcagttactgaaaaactgcaaccaatctacctaaacctacactagaggggttgctcattcacataaaagagtcattcattcatgaaataaatggtgttctagatacatggatggacacttctctctaccctcacataaatgaagcctaaaaaactggtgatcccagagtggcatcttagttctaggaatctactagtttctacatcctgacacctaatggatgattctattgcctggtctgcccattgagctaaaatgctactactggagaactgctgcatgtgcttcaagtgaattgctcctacatggggcttaatggagcttgtgaagacaggtttcaagactacgtctaagtgctaaaaaaaatgcatgattgacagaattgcaccaaatttgtgttttcattagaacataccaactggttgggagattgtgggggatgaggaagaactaaactccccagctacctctagccattagaagctactgatatcactgaaaagtacctgatgatgtgagaggctaaactggtttaaataaatttgcaggctggggcggtggctcacgcctgtaatcccggcactttgggaggccgaggcgggcgaatcacaaggttaggagttcgagacgagcctggccaacatggcgaaaccccgtctctactaaaaatacaaaaaattagctgggcgtagtgtgggcgcctgtaatcccagctactcgggaggctgaggcaggagaatcgcttgaacccaggaggcggagattgcagtgagccaacatcatgacactgcactccagcctgggcaacagagtgagactctgtgtcaaaaaaataaataaataaaaataaataaataaatttgcaatagaattgaagaagggcaattatggaggcagggaaacaaattaggcagagactgctgcaagtggttcaatcagtagatgataaactacaaaaacaattacataacaaaagatgacagcaagagagaaatgaaagaactgcaaaacagataaaaaataataaaatagcaatagtaagtccttatgtgccaataattattttcaatgttaatggactaaattctccaatctaaaggcatagagtggctgaatgaataagaaacaagatgcagtgatatgctatttacaagacactgacattagatataaaaacacacataagctgaaagtgaaggaatgaggaaaaagatattccatacaaatcataaccaaaattgaacatgggtggctatacttacatagacaaaataggctttaagtcaaaaactgtcactagagacaaataaggtcattatgtaatgataaaaggatcaactctgcaggaaaatataataattaaaaatatatatgcacccagcatcagagcacctaaatatttaaaacaaatattgacagatctgaagggaggaattgacagcactacaataacagtaggaaacttcaataccccacttttaataatggatagaacatccaggcagaaaatcaattaaaaaacagcttacttgaacaacactatagactaaatggacccaacagacatatacagaattctctacccaagagcagcagaatacatattcctctttagtgcacatggaacattctgcaggatagatcacatgttaggtcacaaaatgagtcttaacaaatttaagaatattgaaatcataccaagtatcttctcagacagcagtggaatgaaacaggcaatcaataagataaaatcaacaaacttacactaagaaaaaaaagagaaaacacaaattaatagaatcagaaatgtatctctaggtggacagtgacagaaaaaaaagagaaagaaaaaagaacatcagaaatgacagtggagacattacaatggatgatgcagaaaatggatcataggggactattatgaacaacatattgaataacctagaaaaaatgaatacattgctagaaacacacaacttaccaagactgaatcaagaagaaatagaaagtctgaagagaccaataagaaacaaagagataaggccgggagcagtggctcacgcctgtaatcccaacactttgggaggccgaggtgggcggatcatgaggtcaggagatcaagaccatcctggctaacacggtgaaaccctgtccctactaaaaatacgaaaaattagccaggcgtggtggcaggtgcctgtagtcccagctactccggaggctgaggcaggagaatggcatgaacccgggaggcggagcttgcagtgagcagagatcacgccactgcactccagcctgggtgacagagtgagactmtgtctcaaaaaaaaacaaaaaacaaagagataggatcagcaatcaaaaagcttccaacaaagaaaagtccaggactagacaagcttctggaaaattctacaaaacactcaaagaataattaataccaaaatttcttaaactcttccaaaaaatggaagaaggaacacttccaaactcattttataaggccagcatcaccctgataccatgagccagacaagacatcacaagtaaaaaaaactataggccaatatcctcaatgaacgtagatgcaaaaaccctagtgggacgcaaggatggttcaatatacaaatatatcaaatcaaccaatgtgatacaccacattaataagatgaaagcagaaccatatgatcatttcaatagacacaaagaaagtattttacaaaattcaacatcccttcatgataaaaaccctcaacaaaataggtatagaaggagcttaccttaacacaataaagcccaaatattaaaaaccatcacaagcatcataagcagtggagaaaaactgaaagtttttcctctaagatatggaacaagacaagaatgcccactcttgtcctgctattcaacacagtactggaaatcttagccagaacagttaggcaagagaaagaaataaaagacatccaaataagaagagaaatataatgatttatatatcctgatgacatgatcatatatgcagaaaaccctaaaaatgctaccaaaataactgctagaactaataaataaacttggtaaagttacagtatacagaaccaatatgcaaaaattagtgtcatttctcacgtatgttcgctgcaacactactcacaatagaaaagaggaatcaacctaaatgcccatcaatggtagaatggataaagaaaatatggtacatatataccatggaaaatgtggtacatatatactatggggtacagccgtaaaaagaacaagactggtcaggcgtggtggcacatgcctgtaatcccagcactttgggaggctgaggcaggcggatcgaggtcaggagatcaagactatcctggctaacatggtgaaaccccgtctctactaaaaatacaaaaaactagccaggcaggccgggcacggtggctcacgcctgtattcccagcactttgggaggccgaggtgggcagatcacgaggtcaggagatcaagaccatcctggctaaaacggtgaaaccctgtctctactaaaaatgcaaaaaaattagccgggcgtggtggcaggcacctgtagtcctacctgctctggaggctgaggcaggagaatggcgtgaacccgggaggcggagcttgcagtgagccgagattgcaccactgcactccagcctgggtgacagagctagactctgtttcaaaaaaaaaaaaaaaaaaaaaaaaaaaaaaaaaaaaaaaaacaaacctagccaggcatggtagcacacgcctgtagtcccagctactcgggaggctgagacaggagaatcacttgaacccaggaggcggaggttgcagtgagctgagatcacgccactgcactttagcctgggcaacagagggagactccatttaaaaaaaaaagagagagagagagattagctaggcgtggtagttcatgcctctaatcccagcactttgggaggccaaggcgggcagatcacctgaggtcaggagttcaagaccagyctggccaacatggtgaaaccctgtctatactaaaaatacaaaaattagccaggtgcggtggcgggcacctgtaatccctgctactcgggaagctgaggtgggagaatcgcttgaacccgggaggtgaagtttgcagtgagctgagattgcaccattgcactccagcctgggtgacgagagtgaaaccctgtctcaaaaacaaaacaaaacaaaaacaaaaacaaaaaacccaaaatcatgtcctttgcagcaacgtgaatggagctgaaggccattatcctaagcaaactaatgcaggaagagaaaaccaaataccgcatgtcctcacttataagtgtgagctaaacatggagtgcacatggacacaaagaagagaacaacagacactagagcctatttgaaaatggagggtggacccattaactcgtcatttacattaggtaacatggcacatgtatacatgtgtaacaaacctgcacgttgtgcacatgtaccctagaacttaaagtataatttaaaaaaaaagaaaaaccaaataaatggagacatattccatgttcataaaaaaaaaaagaaaatggagggtgggaggaaggtgaggatcaaaaacctacctattaggtactatgcttattacctaggcgacaaaataatctgtacaccaaatgcccaccacacacaatttgcctaaataagaaatctgcacatatactcctggacctaaaataaaagttaaaaaattaatgttatttccataaactaacaacaaactatctgaaatgcaaatttaaaaaaatcccatttatattagcaacaaaaagaataaaatccttaggaattaatttagccaaagaggtgaaaaatttgtatactagaaattataaaacattgatggaggaaattttaaaacacacaaacaaatggaaagacatcccctgttcacagactggcagaattaatattgttaaaatgtccatactagccaaagcaatctacagattcaatgcaatccctaccaaaatcccaattattttttacagaaataggaaaaggaatcctaaaattcgtataggacaccaaatagccaaagcaatcatacaagaagctagaagcatcatactccctgacttcaaattatattacacagctatagcaatcaaaacagtatagtaatgacagaaaaacagacatatagaccaatggaacagaatagagggcccagaaataaacccattcatttatggttaacggatcttcaacaagggtgccaagaatacacaatgaggaaaagacagtctcttcaacaaacggtgttggggaaactggatattcacatgcagaagaatgaaattggaccctgctataatttgaatgttccctccaaaactcatgttgaaatttaattgccattgtcagagtattaagaagtgggatcttaagagatgattaggacataagggcttcaacttcatggattgattaatgctgctatcaatggagtatgtagttattgtgggagttcagtccccttattttctgtcttgcccttctgccatgagataatagagcacgagggccattgccagatgcaggtgccatgctctttgacttcccagcttccagaccatgagtcaaataaactattgtttataaattatccaatctttggtattctgttacagcatcagaaaaagactaagacccctagctcacaccatataccaaatcaactcaaaatggattgcttaaacataagatctgaaaccacaaaactctagaagaaaacagagaaaagcctttttgacattggtcttggcaatgactttttgatatgacagcaaaagcacaggcaacaaaagaaaaatagacaagcgagtcttcatcaaactaaaaatcttctgcacagcaaaggaaacaatcaacaaaatgcaaaggcaacatacagaatgggagaaaatatttgcaaactatatatccaataagggattaatacccaaaatatataaggaacctgtatagctcaatgccaaaaacacaaataagccaattaaaaagtgrgcaaaggacctaaatagacacttctcaagaaaagaaattaaaattgctaataggtatattaaatgattctcaatatctctaatcagggaaaggaaaatcaaaaccacaatgagatgtcacctcacacctgttagaacgaatggctactatcaaaaagagaaaagttatgtgttggtgaggatgtggaaaaaagagaactcttgtacactgctggcaaaaatgtatattagtacagtcattatggaaaatagtatgaaggttcctcaaaaaattaaaaacaaaactaccatatgatccagcaatcctgcttctgggtatacacccaaaggaaatgaaatcagcatcttgacgagatagctacatttccatgttcactgccgcattattcacagtagccaaggtgtagaaaaaacctaaatgtcctttgatgaatgaatggataaagaaactgtggtgcatagatatataatggaatattattcagcctcaaaaaagaaggaaaggctgggtgcagtggcagaatgaatggataaagaaaatgtggtgtatagatatataatggaatattattcaacctcaaaaaagaaggaaaggctgggtgcagtggctcacacctgcaatccggcactttgggaggctgagctaggagtactgcttgagctcaggagtttgagatcagcctgggcaacataatgagaccttgtgtctataaaaaatcaaaaaattagccaggtgtggtggtacacacctatagtcccagctactcgggaggctgaggcaggaggatcacttgagcccaggagactgaggctgcagagcgagacactgtcgaagaagaagaaggagaagagggagaagaagaagaagaagaagaagaagaagaagaagaagaagaagaagaagaagaagaagaagaagaagaagaaggaggaggaggaggaggaggaggaggaggaggaggaggaggaggaggagcagaagaagaagaagaagaagaagaagaagaggaagaggaagaagaagaagaggaagaggaagaggaagaggaagaggaagaagaagaagaagaagaagaagaagaagaagaagaagaagaaggagaagaagaagaaggggaaggggaaggggaggaagaggaaaaagaagaagaaggaaattctgccattttcgacaacatggatggagctggaaacattatactaagtgaaataaacaagacacagaagagagaagctgcatgatctcactcctctttggaatagaagataatcaaattcataaatttataaaggcaaagaatatgatggaagttgccagggggcaggaggggctaattcagacttagtcttacgtttgccagatagaccaaccctggatgtagagctactctaaatagaagaaaagagggccaaggacagaacctaggagaaagccagcacttaacaatgaaagctagagtcgactctggatctgattgttcaggattaatgtttaatttgggcctacatttccctaccatttgtatggctctggatctatttttttaacaccaaattggctacatgtcccaggaatgccaactgataacctttacaaatcataattagaaaggaaagtgtgtggcaataaagtcatatatcatattctggaaagagaacaggaacaggagtcatgagatttgccaccttctctctctgggtttctatttctccaaacataaaagtgatgaactggcttctgttatttctatggctcttccagccatagaaattggagcagcctatgattctttgacatttggtttatctacacttttcttgtagctgtatcactgctctcctacattaatacaaatgggtagaagctgactatattcttttcaaggtcatgacaatagaagaaaaccccaaaaacccagtcacaaaatatggtaagtaaaaggaagtgagagttataggggaaaatgtgattgacctcttgctattaatatcagtgctcagctgtacaacagtaagggtgtgtccccttgagagcaaatcaatggctcaaaagagggaaacaaaccactttttttcctgataaaatcaaggtttactcctcaaccctgctaatttttgaggagatagtgaatattgttctctcttcattacctctctcacagttgtcataaaatgttaagagattttttttttttgagacaaggtcttgctctgctgctcaaactggagtacagtggcatgatctcggctcactgcaacctccgcatcccaggcccaagtgattctcctgtctcagcctctaggcccaagtgattctcctgcttcagcctcccaagtagctgggactacagatgtgcaccaccacacatggctaatttttttttttttttttgagacggagtcttgctctgtcgcccaggctggagtgcagtggtgcaaccttggctcactgcaaccttcacctcccagattcaaatgattctgcctcaacctcctgagtagatgagattacaggcgcgtgccaccacacctggctaatttttgtatttttagtagagatggggtttcatcattttggtcaggctggtctcaaactcctgacctcgtgatccgcccacctcggcctcccaaagtgctgggattacaggcgtgagccaccgtgcccagcctaatttttgtatttttcgtagagacagggtttttccatgttgccccccagactggtctcaagctcctgagctcaggtgatctgcccaccttggcttcccaaagtactgggattacagctctgagccactgccaccgtgcccagcctagaatgttttgatatatgtaaaagaaagggtgtataactactgttctcaactcatcaactattcttaccaaaccttcaaagctttttggagggaaattagtctagagacagtgtgccctgctcaccttcttccttactgccagcttggaatgattttccagtgtaacacctaagttccttgcttctattctgaagtttaagaatacttttagagagggggtgtgaataaagatcacgycgcctttcttttttattgtttctttttttgagatagagtcttgctttgccacccaggctggagtgcaaaggcatgatctcagctcactgcaacctcaaactcctgggcgcaagcgatcctcctgcttcagcctcccaagtagttgggacacaggtatgcatcaccatatctgactttttttttttttttttttttttttttagatggagtctcactgtgtcgctaggctggagtgcaatggcgtgatctcggccaactgcaaactccacctcccaggttcaagtgattctgctgcctcagcctcccgagtagctgggattataggtgtggaccaccacacccagataatttttgtatttttagtagagacagggtttcgccactttggccaggctggtcttgaaatcctgacttcagatgatctgcccgtctcagcctcccaaagtgctgggattacaagtgttagccaccgtgcctggccatacacctcgctatttttaatcattttttaataaatggcaactgctatattgccaaggctggtcttgaactcctggcatcaggcaatcctcctgccttagcctcccagagttctgggattatagccgtgaaccactatgctcagcctgtgctgtcctttctatgaaaagatggtacaactgatctatgaataagccatgtcctttcagttcttttgctagcattgaggatgagattattctgaatcatccatactctctcacactcttgtgaccaaacagctatcatgtgtacccaggtggctactgatagaggtaaaagcagtggccaagaaattaactagttcctttacctcagaccttggatcacaaaccacacgtctggtactcttctcaattactttcaccatattgaccgtgtcatcgggtccaccacctaggcaatgtgtagacataggctgagtcccaaaaccycagtacggaaccccacaggaggctccagcttggagaacgggttaagttctaggtttctgttccaatctgtgaagctgatgcagtccctggagcagggtacaggggtcaacacactgccttctgttttttgyaccagggcaggtagagggaggccacaattttggaagacggtgattgcccagctgccagctttttcagcagatggtataaccaccatgagataattagcgtgcagtcccacagtggggctgggtacagagaaggagcaactgaaatggaaaattagatcaacaaaaatggaggagaggttgttacctcagttgaaaatgttcacacctcatttgtgaaaggctcaacatgaaaggctcctgactgcatcagcactaaagatgcatttctttcccgttctcatttgggtctcagaatgccttactagcttcctgagkgtattttatttctgctcttcctcaaattgcacttcctttatgactactaatgtgaagaggtctggaatatcctaatgctcagatctcccacttcctggggcacacgtaaacayacctgcttggtgtacaggtgtcatggccagaacccatcaggaatgggactgtgcctgcctcaatacctctgctggcaatctgtcattttgcttgtttaaccaaaggctcgtatcattatacggcttgaatctgttaagaatcgaggtgacaaattgtgcttttgattgttcttttgttgttttaaacatccttttgatgcactaagagccacttatatatgaataaaacaagcagccatctgttttatgaagcactggattgtaaaagtgtcaactcaagcacagtctactaatttgtcaattgttgagcattggccaattgacagaaattagctgtgttgctggacatacacacccttacttcattagttgtatatgtctgtagttgggaggggagctataaaataacactggtgatgggygtggtggctcacacctgtaatcccaacactttgggaggccgaggcaggcagatcacctgaggtcaggagtttgagaccagcctggccaacatggtgaaaccccgtctctactaaaaatacaaaaattagctgggcatggtggcaggcacctgtaatcccagctactcaggaggctgaggcaggaaaattgcttggacccaggaggcagaggttgcagtgagccgagattgtgccactgcactccagcctgggcgacaagagcaagacttgtcttaaaaaaaaaaaaaaaaaaaaaaaaaggtgaaaaagaccatggccctggttaaccccaggcagaagggaagcttactttttttttttaagacgtattctcgcactgttgcccaggctggagtgcagtggcacaatctcagctcactgcaacctctgcctcctgggttcaagygcctcattacaggtgcacaccaccatgcccgggtaatttttgtatttttcctagagacaaggtttcgccatgttagccaggctggtctcgaacgcctgacctcaagtgatctgcccgcctcggccccccaaagtgctgggattacaggcatgagccaccgtgtcgggccagaagggatgcttacttctggatgcagtgtgcaaagattgtcctattgccttcagctccaggttaaatcctcctacctcagactgactcccttccttatagaaactggcagtgttcaatacttgacaattgagttccttaggacctccgtgatggcttgcctttgaggagaaaggggaagcacaaaagaagaggaaactaaacaaagaataaagccctcctgcaaccagaagtcatccttatccctcattttggctaagtacactggattcataaactcttttttattgaattgaatttcaaagcttttacttagtgtttttctggtaggtagataaggcagaagccaacaagcatctagctacccaactcaatagtggggcccaccagggcatgatccaggcatatttatgaaataggcaaagtttgtactcagcatgcccccactcctcctttggctctttcctccccttctggcccacctctctgagtcccagcatctccygctgacacctggctgggcagggtcattccctgtcccacctcttaatgtaagctggagttcctatttcttagcattgagcaccatttcagacctctcacacatctcaaatcaaaaggtatcattctaatcccacagggccgaacttcatcatggaatatcctcataagtgacgcatctgcatttttagggaggtcttctggaattcctcagtccagacagatgattctgatgctggaaagttcagacatgattaaactttagcaagagacatttgggggtactcaggagggcagtttaagaattccttaaaacatgacttcctgaggcagttgtacctattgtgtgtgtgtgtgtgtgtgtgtgtgtgtgtgtgtgtgtgtgtgtgtgtgtgtaggactggctctagaatcacatggaggctcctgggcaagaaccatatacatgtacagaagtcagctggcttcttctgtcctgtaagtttccccaattggtgagagaagtgatctaagaatagttcaggcagcccaagatgctgatttctggtttcaaaactctataatgagggtggaataatacacattggagaagactccaaaaggtaggagggtgggaggttggtgaaggatgagaaagtacctattggatacaatgtatacaattcgggtgatgggtacactaaaagcccagacttcatcaactatgcagtataactgatagagtttgtatatttgtcctcacccaaatctcatgttgaaatctaatccccagtgttagaggtggggcctggtgggaggtgtttggatcatggggacagatccctcgtgaatggcttgggccacccccttggtgataagtgggctctcactctgagttcacatgagatctggtcatttaaaagtgtgtggtggcgctctcttctctctctctctgtctctccacacacatacacacttccctctctctgccctggccaccccattctcaccatgtgatrtgccggctcctgctttgccttccaacatgattggaagcttcctgaggcctccccagaagtagatgccactatgcttcctgtacagcctgcagaaccrtaagccaattaaatctcttttcttgtaaattacccagcctcaggtatttctttatagcaatacaaaattgaccccgtcccaaaaaaaagcctctcaaaactcaaacaatccgattagaaaatgagcaaaatatatgaatagatatttcaccaaaaaggatatatagattgcaaacacacgacaaagatgctcaatcaacatcattagccataagggaaatgcaaattaaaatcacaatgagatatcactaaacacctatcagaatagctaaaattaaaaaacagttaacaacacacatgctggcaaataagcagaaaaactgtatcattcatacattgttggcattcttcaacagattaatgattaaacaaattataattcatccatgccatggaatactatgcagcaataacaagaaatcaggggccagacacagtggctcaagcttataatccaagcactttgggaggctgaggaaggaggattgcttgagcccaggggttcaagatcagcctgggcaacatagtgagacactgtctctacaaaaaaattaaaaattagctgggtgtggtagcacatgcttgtagtcccagctaatcagaaggctgaggtaggaggatcgcttgagtgagttcaaagctgcagtgagccgtgatcacatcactgcactccagcttgggtgacagaatgagactgtctcaaaaaagaaaaaaaaaagaaatcaggtattggttcatgcaataacttgaatgaactcctgggaattttgcttagtgaaaaaaagccaatcttaaaaggttataaactgtatgattatttacataacactcttgacaaaaatatagagatagggaacagattagtgggtaccaggcattagggaatggagcatataggaggtaggcatggcagcccagtgcggtggctcatgcctgtaatcccagcactttgggaggccgagggagtggatcacctgagatcaggagtttgagaccagcctggccaacatgtgaaaccctgtctctactaaaaatacaaaaattagctggtcttggtggcaggtgcctgtaatcccagctactcaggaggctgaggcaggagaattgcttgaacctgggaggcagaggttgcagttagccaagattgcaccactgcactcaagcccggatgacaaggttgaaactccatctcaaaaaaaaaaaaaaaaaaaagagataggcatggctacaaaagattccttgtggtgaaagtacgtttctgtactgtgttggtggatacatgaactacaagtgctacaactgcataaaacttctagtgaaaaagatctgttatttttttttaaaatgcatataatgaaatacatagaacacataaacagaaacaaatgattacaggtaaaacttgggaaatctggacaagagtaataggttgtagcaacgtcctggttgtgatactatagtacagtaaataagatgtcaccactgagaaaaactggataaagggtacataatatctcaatgtgccgtttctgacaattgcatgtgaacctacagtcatctcaaaatagaaagtttaattttttaaaaaaagataaaaacaaaaaaattggggccttgaacattttctggctcattgtgcaggcatgaaactcattggccatctggctaccaggctggatagttacaaagaagaatgacttcccaaacctgagtatgtagcaccttagggcctctggtaatccaaagaagaattgtttgccttctggaaattctcagtaaccaagtttaattgaacatcactttaatgaaaaaaccaagcctttgctatataaatcttcataccaggagacagcactaggaaatcaaaatagggtgtgttaatctatccccaccccagaggcagggttttgctctatctcccaggctggagtgtggtggtacctcctgcctcgacctcctgggctcaagcaattctcctgcctcagtctcccgagtagctgggactacaggcacgcgccaccacacccagctaatttttatatattttttttttgtagagaggtggtcttgccatgttgcccaggctggtcgccaacccctgggttccagtgatccaactgccttggcctcccaaagtgctgggattacaggcgtgagccactatgcctggcccaaaagttctttatatatcctagatacgagttctttgttgggtatgtagcttgcaaatattttctctcagtctatagcttgtcttttcattctcttaataggacctttcatagatcaaagcttttaattttttatgaagcccaatttaatgtagtttttcttacatggataacccctagacagtgtcaaacctaagaacactttgctaggccctaaatcatgaagattttctcctgtggttttgttttttctctaaaatgttttatagttgtatgctttacatttaagtctgtgatccattttgagttatttttgtataaggtgggatgtttaggtaaaagttcacttttttggcctatggatgtcaattctcctgaactgtttgttgaaaacgctatccttccttaagttgcttttatacctttgtcaaaaatcgtttgagcaagtttgcattgctatatttctgggttttttgttccactgatctatgtgtctactctctgtcattaccatactctcttttttttctttttatttgtacaatattggggtacatgtgcaattttatcatatgcatagattgcacagaggccaagttrgttagggctttgagtgtatccatcacatgaataacatatattgtacccattagccaatttctcatcatcctcctcccttccacccctcactcttccaagtctgcaatgatctatcatttccactgtctatatccgtgtaccacagtatcttgattactatagccatatatggtaaccctttatattgggaagagtgattccctccaatttattctttataaaaatcactttagctactctaggtcctttgcctttccatgtaaattttagaagaagcttttctatgtctataaagatccttgctgagattttgataggaatttcattagcctatagatcaatttggggataattgatatctttactatgttgtcttttaacccacacagtatgtctctgcaattattaaggtcttctttgagttctttcctcagtgttttataatttccaacatacagatcctttcatgttttgttaaatttatacttgctctttggcacaaggatgaatggcattgtgttctttatttagatttccacattgttagtatatatatgtgattgatttttgtgtgtttatctggtatcatatgaccttactgaattcagtgaatagttctacgaggtttttttgttttattttttttaaaaaaaaaagattccctgtgattttctatgtagacaattaagtcttttgagaatcaacacagtttcacttgatcctttccaatccatgtaccttttatttccttttcttgccttgttgtgctagagctatttttccccctttcttgccattgtactggatagaacttacaatacgatattgaatagaagtagtgagaacagccaggcacggttgttcatgactgtagcactctgggaggccaaggtgggtggataacctgaggtcacaagtttgagaccagcctggccaacatggcgaaaccccgtctctactaaaaatacaaaaattagctgcacgtggtggtgggcccctgtagtcccagctacttgggaggctgaggcacaagaatcacttgaacccakgaggcagaggttgcagtgagctgagatcgtgccactgcactccagcctgggcaacagagtgagactccacctgaaaaaaaaaaaaatagtggaaacaaacatgcttgccttgttctgacttgagaaagaactcagtctttcaccattaagtataatgttagttgtaggttttttgcagatgttctttatgagattaaggaagttttcctctatgcctagtgtactgagagtttttaatcatgaataaatgttgaactttaagctgggtgtggtggctcatgcctgtaatcccagcaattttgggaggctgaggtgggcagattgcctgagctcaggagttcgagacaaacctggacaacacagtggaaccttgtctctacaaaaaaatacaaaaaattagccaggcatgatggcacacacctacagtaccagctactgggggactgaggagggaggatcacttgggcccaggaggttgaggctgcagtgaaccatgtttgtgccactgcactccagcctgcgtaacaaagcgagaccctgtctcaaaaaaaaaaaaaaagtttgaatgttatcatcaaatgctttttctgtgccagttgatatggttaaatgattttagtctgctgatatggtggattacattgattaactttaaaatattgaactatgcatacatgggaataaatcccagagtataattcttttctacattgttgggttcatttggctattattttgcggcagtttctgtgtctaagtccatgaaagatattcattcatctatagttttcttgctttgtactgtctttggttttggtatccttctgggaatctgattatatgaatgttggatcttttgttatttctaacaggtccctgaggccctatcttttttttcagtctattttctctctgttgttcaggctgggtaaattctattgatctataaacaagtttactrattttgtcctctgccatctctgctctataattgatcctatccagcaatttttaaaaatctatttttcagttctgtaattttcatttggttctttagaaaatgtgaacaggtgttttaatcatgtataaaatgcctgattatgtatgaatttgaaggaagaagagatcaaaggattcctggaagaaggtgtgtcagaaggggccttcaagtaaagaggcacagactatccctgcctagggctgctctgagcatcttcccatttcttcctcacaacaacccaacaatgattatagcaatacttatacccattttacagatgaggaaactgaggctcagtcaggttaaatttttttttttaggttaagttatttaaccaaggtcccattgccaagaagcaaaggagtcaggacttgaatccaagtcttcctgatgccaaagcccatgctttcactggtatctggaggcccaagttaaataccctgccaaggggaaatcttcccaaacactcccagaatgtggccacttgttccttgggacccccatgttgttctatcccaggaacttgcttgcccccacctgctgtgagctctagtcacrtgtgtctatgaagggtgtcatcacagtatcacctatacctgtacccggcacaggtccttgtaggctggtagataccccaggtgtctactgagggaactttaacccaattaaacctgagatctcaaaaatgcccttagtggagggctgctgtgaggattccatgaatggatgatcacaaagagatctagttcagtgtttggcacacagtaagtactcactgcaaggaagggttgccattgggctgtttattgttatttgtatttgaccagcctcccttcctggattyraagtagttcctattcccagaaagaggcagataagagatagtcacacagccacatgaaggtcaaaaccaagtttcccaattctggactccccaggaagtgctcaatgcccctcagaaaactactcagtcaaggttcaggtctgtgtcctttgataacataagagccccttgtgatgaaataattcagctgcagctccatcacagaaccacacatgtatttcccatcttaacttgtccttgccctactccacgttcttaatcagagactgaatgtaccatgtcagactggcctggagtatatttgattcttttgtataacttctattgctatgctaagattttatattttttccatttatttcaagagactttgcaattacttattaaagcatttttgtggtggctacattaaatcccttgtcagataatttcaacatctaattcatcttggtgttggtatcagttgattgttttagggtgatttttatcatattctggatatgttgactattatrttagaagactctaattcctacttaaatatttgattttagcaggcagtcagtttgtttaggtttagcatgcaggtcctggcctacttttgaaggctgtgattccaatgacaatttagtttcagagcctctgtagtgctattttgatctgcttgattcatgtggtgctaatgggtccactcttccctgctggtgctgcctgaggaagcagagtgttcctcagatagggttgcctggtgcctctaggtgggggaagtgatttttctagtctgtggaaacaaagaatcttccttgtctctgctggttctggtgggactcccctgactttgctgcctgccttcctggtatctctcagaggaagagagaagcctcaagaccatgaaaacaaacaggcttcctgggctaggctacttgtcatggtcacgtttccccttgatggtgtgcttgcttggagagtatctttcagtggggtaggggagtctctgaccttgtgggaaaggacagcacttctgctggctgcttattgtcagtgaggcaccttgctaaatcccacttrcyggagttgccaggcttacctgttggtgtcagtaggactcccattcaatgcagaggagaaaggaacctacaggaaccattttctattgctacgttggggtttgggaaatgctgggcctgggtcacatttatggcttgagagtcataaggtaccctgctactatggtgttcctccagtcctgggattcctaatcgttctgccttcccctttacaccttttagaattctcctgtggccacctcttgaattatttccaggatttctggttgggcttacctgggagaagcagggagaaatgagtctatgctatcttgtccagactggaagtggaagaccaatcctgcattggtgtctgctgcttcttctcctaggaatgattcagactttcatttatcatccttttttggggggcaaagagaagctcagaaggctttgctttggttaatatatcgagcccccagttttttgtttatgggtgcatccatatccctatgtgtgtgkgtgtgtgtgtgtgtgtgtgtgtgtgtstgtgtttgagaagaaaagttggcagagattagccctgaaataactgtattacagtagccaaacactctgataggatattgagttagctgtggatttgtcttgctgataagatactcctataccactatactcacagaatcatattttgaaggtcagaacaatcatattttggtatttccatataggcgaaaggcagaaaatgtgagaaacacattcacccgtccaaacccaaagaatagactcagagacacgaagaacagtggaagcgagacttttaatggcggtcttacaaaatcgggtgtctggtaggcaggcacacctggggcagttacagcaggtaatttatctcttgcatgcaagtccctcccccagttcctcattggtcaagtactatggggttacaatagtcccagatatcacctaagtttcattatcttttataagattataccccagtcccctaccccacttacatttcgatttcccaataacaaaactttcttcccttttatgggctgacccctgctctacattctgtttccttatcatgactttctaggtacatgagccatgtggtttgtcatgtccacaggctggttgccagtacatagatttatcatgccttgaaaattgaccatgtaaaatgttttctcacaaattccctcctcttttttatttacttcctttggtctcattttcatctaaacccttttggtcctccaatcactctagaagttgtctactttcttccttataggagagtgagtttaatttggtttctaatagtagcaggttattttgctggtaagtcattggcatttgtttattaatagctgtttcaattaatctctgtgctactcccttcacacaagggataatacaacatcccactgctgttaagactcctgccacaattatgagagatgtaaggattgaagctaccatgtctttccattttccaaaccaaccttctagccagtctgtaaatgggtcaattccagcattttctgccagtttattggctacagttgtcagtccttgtaaaactttggtgatggtcccatctggggcaatattgttgggaatgaaagtacaacatttcccatctagcataacacatacaccccctttttctgctagtatcatgtctagcacaagtctgtttcccaggccatttggctggtggcatcaaactcgctagccacctctttgagggcgtcctgagtacaattgatgaatctctgttgattataacagatatagttaatccaatccacattcttattaataattgatcaccaaaagagtgctgactcaaacccagcagctatttggcttcaggccttaaattcattaggcacccccttggggactcctgtcgagtcaatatatatattgggatcaaaagaatttgtcaaatctgtctggttttggtggccatgtgtattttcgggtatcttatggaatgccagggtgaaaggaatggccaattggactaaagcacaagtcctggtccarttggacagtaactaacaggttatggaggtcccctttcccacaataccaccagacaacagcccagagtatatggagagctgagtaattgccattgcctgactcagcagtgacaattaggatgtgggtacaagtacgagagttctcccacgggcttattgaactctgccccctgcctagagagacaagaggagtggttcatattccctatagagaatgaggggattgctctgggatctgaccaccacaatgcaggaaagaacaatgacaggctcttacaagtctcatttcccatgcatctttgtcctggtatagagccaacatgcaatgcatgccttcaggatcggtatcccatcctaggggaaatggaatcacctgggcctgaggtcgtcccgcagcacgcacatagcaattactttcttttttgagacggactctcgctctgtcacccaggctggagtgcggtggcatgatctcggctcactgtaaactccgcctcccgggttcaagcgattctcctgcctcagcctcagcctcatcctcacgagtagctaygattacaggcacgtgccaccacgcctggctaattttttgtatttttagtagggacggggtttcactgtgttagccaggatggtctcgatctcctgacctcgtgatctgcctgccccagcctcccaaagtgttgggattayaggcgtgagccactgcgcccagccagcaattactcttgttgagggcttgtactgaaaatttgaaccaggcattcacatccctgtaccctgtctcaatttctaaagtttgccttaaatcctttacctcaattatttctacccttttagggtcattacttggttaactatttccaccaataacagcataaccattatgtctcttgccatttgtcacttgggamaactcatccacaaacagccttatcccatcatgtagtggagcttccttaaggtctggtctaactttgatttggtattctatgatatctaagcagttatggtctgatgtctctttgttcttctctcctttccataggaaactggctggattcaggcaagtatctgttgttacagccaaattatctttttctagtgacatggcttcatatttttgaatccaagaatccattaaccacctcctggctttttgatttaatatattcctgacttggtgtgggtgcttactattagggccccaccaaagttagcttttgactctaccagcagggctgtggcagctactgcttgcacacattcaggccacccccgagagacaggctcaagaagcttggagacaaaagcaacaggttgcctcttccctcccccggtatgagtgagcactccaaggccaaactctggtctactgttacaaacagatggaatggtttctctaaagatgggagggccaggaccggggcagtaatgagggcctgctttagctctttcactacctgaatttcctmtggggatcattgcatgggatcgggttcctcttctagtaacttgagatacagaatttttgtcttttgagcatatgagtcaattcacaacctgcagtagccagttgaacctaaaaattttcrgagttctctctgtcttaggcaaaggcaggcccactattccagatattctctctgggtttattctccacttcccttcactaatcaggtgtcctaaatatttaacttctttttctacaaactgcaatttgttcttagagacttgcaatcccctttctcctaggaaattaagcaagcttatggtggtttctgatacctcggccctcctctccccagaaattaaaagattatctacatattgtaatgactgggttcccctggaaggttggaattcctcccggactttttctattatttgaccaaatacatttggggctgccatgaaaccttgtggcagcacagtctagcagtcctgttgttttctcccagttataggattttcttattcaaagacaaagaggtccctgctcctaagatctaggggacatgcccagaatacatcttttagacccaccacactgaatcacttatgttcatagagtatcttattaaggagggcgtaggggttaggtgccacaggatggtgggtctggacaatttgattcatagtccctagatcttgcaccaatctatagaacccatcaggctttttgactgggaaaattggagtattgtatagtgacatgcagggttctaatagtccatctttaatcaatccctctattaccagttggagatcttttctcccttcagtagaaatgggatattgttttctttttctttcttttttctttctttttttttttttgaaacggagtctcactctgttgccaggctgaagtgcagtgacatgatctcagctcactgcaacctccgcctcctaggttcaagtgattctcctgcctcagcctcctgagaagccggggctacaggtgtgtgccaccatgccgagataatttttgtatttttagtagagacggggtttcaccatgttggtcaggakggtctcgatctcttgacctcatgatacgcccacctcagtctcccaaaatgctgggattacaggcgtgagccactgtgcctggcctgttttctgaaaactacttctcctggttgttttagtttaatctgtaagggtgtgatttttaaccctcccctgttgccttccctaatccacacaaggggattaatttttctttcctcttgctttgttaggaggcccatcattacttttatttgtccttcctctattcctaatcctaaacccaatctcacaatcaggtcttgaccaaggaggttagttcctgcttcaggaacatataagagtcacacctcaatttgttcaggtcccaatctaattaacatttccttgaatatcagaacctgaaatccctccccttttaccccgatactgtcaattttttcttagagacttctgtaccccttggttggtgaattagggaggagcaagccaccccagtatcaaccaaaactgtcacttcttctccctcgggtcccaccttcacatttatcagcggttcctggagggtcctactcagaaggaacccctggccccccttgtcttcatcaaccgtcatgaaggggatcattttttcttcttttttccattcaggacattctctcttaaaatgccctggttttccgcacttgtaacatcaactcatagtcttaggagcttttccyttcttyctctgtgtcraaatctattatcccattgtttccttcaagagggatcttgatctaaccttcttctgactaccttttccacagtggaaaccatgattctygctttttgtttctgcttctcttcctctctccttacaaagaccttctgagcttccctcagtaattcttcaactggtttctcattccattcattactcttttgtaatttttttgtaatgtcaggccagctcttagttacaaagttaaccttcaaaaggccttgccctactgggtcctccagatctaatctagagtattttctcaggaacctctgcaggaatgcagagggagtttcctcattttcttgttgaatcttgaatgcctttgagacattttgtgtcctaggagtggactctttgatccctttaattattagttccctgaggtcctgcatttgggtccagtccctgggatcattattatcccatttaggatcgacatttggaaatttttgtttggttggcaagactccttgccygggagggtgttgcctctcccagatggtcatggctgctctcctaatcattcccctttcttctcctgtgaacagaatattcatgatagacatcatttcagcccaggtgtaaaagctggttcctaggaattggtccagctggtctgctaaaccgaggggatcttctaggcgtggtttcatttccttcttgaaattcctaacttcagaacttgtaagaggagcatttacaaagccagtctctccctgtcccatgggaacttctctaagagggagcatgctagatgcctgctgtgtggacaggataaggaagttcttaatatccctcttacactgttctttttcttaaatttggatgaggacttaaaggagcaattggttyggttcccccatggtctccaggtctttcttcctctaaccctcctgttgcccccttgatcttcctgtcccctattttgtgagctgtatggaggggcaagcatgatagggggtcccagggcttttcactgggcaagagctttttactaggctctttttcttcttctttgatggggaacgtgggggttaattctttgatccagcagagagcataacctatctcttcttgtgaggatggtttttgttttttgttttgttttattttgttttgttttgttttagtggagtcttgctctgtcgcccaggctggagtgcagtggtgcgatctcagctcactgcaagctccgcctcccgggttcacgccattctcctgcctcagcctcccaagtagctgggactacaggcgcccaccaccacrcctggctaattttttgtatttttagtagagatggggtttcattgtgttagccaggatggtctcgatctcctgacatcgtgatccacccacctcggcctcccaaagtgctgggaccacrggcgtaagccaccgcgcctggcctagaatggggttttatcattcacatagagaattaaagcttggcacacccagttctcatctgagccaaacttaaatcaaaagactgaaggcttgcgaatsgggtctttgggacaggtaaaacagcaatactttatcatcttttccttttccttgtccctggttcaagggttgtccctccaaacctgcagcattctccttaaaggactatccgggggaatgtcagagggagtctctttggctccctctttcctttgtcccctaggcctagaatttctgtttcccattttcgtcaatctgtgtctgagtttttccctgtgtactcaagccccccactagaggtttcttgcacacaccgagaatcatttcatccgtctctggctgttcccctcgcgagagaacagaaccgcaaattgggtctccacacttgcttcatacctaggatacgtctcagtcacacacactcgacctccaaaaatgcccaaccaccaagacaatactcacagtccaattttcctaccttggctcgtacatgaggttgcctggttgccacggtgcctgcttttctccctgtgtcacctccactgcctcctgaataacagtctcaggtttgtctatggcctctgcagggagccgggattcccagacagagcaggccacttaaatcaggtgggacgcctctcccctcttggcyggagtccaactccacgcaggcacagagatcccagatgggcccccaagtttgtgagaaacacattcatctgtccaaacccaaagaatggactcagagacacaaaagaacaatggaagagagaattttaatggtgatcgtgcaagaatgggtgtctggtaggcaggcacagctggggcagctacagcaggtaatttatctcctagcacgcaagtccctcccccagttcctcattggtcaaatactgtggggttacaatctttctggacgtcacctaagtttcattatcccttataaggttataacccagtccccttccctgcttaagtttcgattttccaataactctgtaaactttttcttcccttttataggctgactcctcctctacattctgtttgcttattgcgactttctaggtgcatgagctgtgcggtttgtcacgtccgcaggctggctgccagtacttagatttatcataccttgaaaatggaccatttaaaatgttttctcacagaaaataagattttaaaacattatcctccctttatataaarccttgggatatcagcatactctgtgctggaccagcatactctggtcctggaaaataaggaccactggatcactgtccatcacaggaaaacaaaatgccactgtagaaaactgtctgtggcaggctgaatagtggtcctcacaacataccggtataacataatggtaaaatgctgaaagggactttgcaggtgtgattaagttaatattcttgaaatgagatgattgctctggattagccaaggcgacctaatctttattacggactcttcataaaagaggcaggaaggtcagagtcagagaaggtcacgtgactatggaggcggaggtcagagagtcacagagagacttgaagatgctacgctgcaggctttgaagacggaggaaggagctatgaactaaggaaygtaggcagcatctagaagctggaaaatggctgattttgaacttcaatctccaaaactgtattgccttagttggttttgtgtggctataaaggaacacctgagactgggtaatttataaataaaagaggttgatttgcctcacagttctgcaggctgtataagcagcaagcagcatgatgccagcatctgcttctggtgagaacctcaggaagcttctaatcatggcagatggcaaagggtgagcaggcatgtcacatggtgaggggggagtgatagagagaggggaggcatgctatgtacttgtaaacaactagatctcctgtaaactaatagagtgagaactcattcattatcatggggacagcaccaagctattcaagagggatcaacccccataacctaaacacctcccagtgggctccacctccaacattaggggtcacatttcaacatgagatttgaaggggacaaatatcaaaactatgtcatatgtgataataaatttatgttgttttaagccactaaacttgtgatgatttgttatagtagccataggaaattaatactaatagagagcaaatgacaatgatcaggggttggaartcagagagtgttggagaatagtatgagcatggttgcttgtacaaggatgcacttaaaccatgagactctagtttggaaacaagaagcctgagaagagactggctcaatgtctaaaccattgctgctctatagaactttatttgatgatgaaagtgttctacatctgcactttccaatagggtagccagtagccacatgtgactactaagcacttgaaatgtggctagtacaataagggaattttttctttcttttttttttttttgagatggagtcttgctctgtcacccaggttgaagtkcagtggcggatttcrgctactgcaaacctctgcctcctgggttcaaggaattctcctgcctcagcctcccgagtagctgggattacaggtgtgtaccaccacgcccagctaatttttgtatttttagtggaaacggggtttcaccatgttggccaggctggtctygaactcctgacctcaaatgatccacccactttggccttctgaagtgctgggattacaggcatgaaccaccatgcccagcctactcttaattaatktatatttaaatttaaaaatctacatgtagctaatggctactgtattagacagacagttttctaccattaaaaagaatgtggatagggtgactatgaacttattcattaaartgttcaatgctagaaaactagcttgccaaaaatagtctatgccaaattaaagaagtaccarcacttctctagagatcagatttcttataatctctgccataatataactaaaaacctagatgagaaaaaagcatctaagcagcatgtaaaattgctgtcataaaacccatgaacttcacttcataggagatgcatggagtcagtccttagtcaaacagctacacattagaagaaccaagaatacgttgatctcagaacttcttcaaaagcacaaaaatccggaacacacttagggaaaagacataaggaaagacatattgctacatgcctcagaggtccaggtcaaaagcagatgatcataatggccaccctgagtcacaagacaaggttatattatgttctgaatcatctgtttaagaaggcaaagcaggccaggtgcagtggcttacgcctgtaatcccarcactttgggaggctgaggtgggtgggttacttgaggtcaggagttcgagatcagcctggtcaacatggtgaaaccccatctctaataaaaacacaaaaattagctgggcatggtagtgggcatctgtaatyccagctactcagaaggttgaggaacaagaatcactggaacccrggaggtagagactgcagtgagccgagattgccactgtactctagcctgagcaacagaatgagactctgtctcaaaaaaaaagaagacaaagtagtgaataactcagtattaaaaaaaaaaaaaactcaacagagggaatgggtaaatgcaaaaccaaacagttacctttccactttcatgtaaaatcccttgttttagggttctagccactatgctatgccatccactccagctccttgttagtcacttatgcaccaggattgatctgaaccaggtttgataaattatttcaaatcctttctcaccattaccatccaaatccttctcacttgccacgcaacttccaaatctggatcaattgaattgatccaccaccattgtttctatttccagactgctgcgccctggtggaagaaataacacaatgatataggcaggaatatcttgaaaagcatggtttctgtggaatattatgcagyagttaaatatgtaagatatcagctgggcgtggtggctcacgtctgcaatcccagcactttgggaggcccaggygggcagatcacctgaggtcaggagtttgagaccagcctggccaacatggcaaaaccccgtctctactaaaaatacaaaaatcagccaggcgtggtggcaggagcctgtaatcccagctactcaggaggctgaggcacgagaatcgcttgaacctgggaggcggaggttgcagtgagctgagatcgtgccactgcatttcagcctgggctacagagtgagactgtcacacacacacacacatacacacacacacacaagmtatctatatatactgatacagaaaaaaatccatacacattaaataaaaaagcaagtgaaatcacagtccctagtatggctataatcaaaaggacagatactaacaagtgttggcaaagatgtggagaaactggaagcctcatatactgctggtgggaatgtaaaatggatcagccmctttgaaaaacaatccagtagttcctcaaaatgttaaacacggagttaccatatgacccagcaatcccactcctagatacmcmcccaaaagacatgaaaatatatgtccmcmcaaaaactggaacatgaatactcatagccatgttatttataatagccaaaaagtagaaactggctgggtgcagtggctcatgcctgtaatcccaaaactttgggaggctgaggcaggtggattatgaggtcaggagatggataccatcctggccaacatggtgaaaccctgtctctactaaaaaaaaaaaaaaaaaaaaaaaaaaaaaacttagctgggtgtggtggcacgtgtctctaatgccagctacttgggaggctgaggaaggagaatcacttgaaccagggagtcggaggttgcagtgagccgagatcacgccactgcactccagcctggcaacaaagtgagagtccaccaaaaaataaaataaaaagtagaaactacccaaatgtccaaatgacaaatagataaacaaaatgtagtatatccacacaatggatatgccaagagcaagttgcaagttttttgttttgttttgttttgttttattttgtttgagacagggtctcactctgttgtccaggcaggagtgccatagcacaatcatggctcactgcagccttggcctcccaggctcaagcagtcctcccacctcagcctcctgggtagctgtgactataggaacacamtgctacatccagctaattttttgtattttgtagagacagggttttgccatgttgcccaggctggtctygaactcctgagctcaagtgatccaccygcctcaccctcccaaagtgttgaaattacaggtgtgcaccaccatgcctggcctccaagagcaattttattcagcaataaaaagaatgaagttctgattcatgctacaacataratgaaccttgaaaacactgtgctaagtaaaataagccagtcacaaaagatcacatattcttccattaatatcaaagtccagaatagggaaatctatagagactgaaagtggattagtggttggtaagggttgaaggataaagaggcgatagctaaaggatacagggtttccttctgaggtgatgaaaatgttctaaaaattgactatggcagtggttgcacacatccatgaatataytaaaaataattgaactgcacactttaaatgtgtgaattgtgtagtgtgtgaattatagctcaataaagctgttatttctttttwaaaaaaaagcaaatgatagaataatacatgtactatgagctcatttatataaaaaccaaaactacatatgcatgtaatataaacatttgtgaatgtatgtaaatatatagaacatgatttggaaggatacccacccatctgttagcattggttgcttttggggagagaagtaggattgccttctgtaacatcacactttcctgtctctcctcctacctccctggttgttcctccaaattgctttgtaggcattctttcctctgctcattcctttataatccacatttaactcttcaggctctccttgaagtgatcatatgatcacatatttcccatggtttcaacaatgccagtccatatcctgactcatttattcaacaaataatccactgagcacctgctaagtactgtgctagttgctagacattcagcaggactgaggcaaataagattgccatgctcatgaaatttacattctagtggcggtgaagatatataataataagcaagccaataaatgaacagacaatttcagataatgttaagtggtagggagaaaataaaacagggtgaggggcaggcaccatggtcatgttgagcaccgcgtctcgcaccatgccccaagccgccatccactgcacaagtcgctccctgccacccgaggcccgcatgctcgccatgtcccttccacaaccaacgcaggccgccttgggcatcctggcccggcgcaccatggtgctgggcatcatggagatggggcgccacatggacacatctgccagcgccacggccgtgcacgctttcctggagcgtggccacaccgagctggacatggccttcatgtacagcgatggccagtccaaaatcatcctgggcggcctgaggctggggctgggcggcggcggcgactgctgagtgaaattggccaccaaggccaacccttgagagggaaaatcactaaagcctgacagtgtctggtcccagctagagacgtcaytgaagaggctgcagtgtccccgattggacctcttctacctacatgcacctgaccacggcaccccagtggaagagacgctgtgtgcttgccaccagcgacaccaggagggcaagttcgtggagcttggcctctccaactatgccggctgggaagtggccgagatctgtaccctctgcaagagcaaaggctgggccgggcgcggtggctcaggcctgtaatcccagcactttgggaggccgaggtgggcggatcacgagttcaggagatcgagagcatcctggctaacacggtgaaaccccgtctcgactgaaaatacaaaaaaaaaaaaaaaaaattagccgggtgtggtggcaagtgcctgtagtcccagctactcaggaggctaaggcaggagaatggcgtgaactcgggaggcggagcttgcagtgagccgagatggcgccactgcactcccgcctgggtgacagagcgagactccatctccaaaaaaaaagaaaagtaataaataaataaataagagcaaaggctggatcctgcccactgtgtaccatggcatgtacaatgccaccacccggcaggtggaaatggagctcttcccctgccttgggcactttggactgaggttctatgcctacaaccctctggctgggggtctgytgaccggcaagtacaagtatgaggacaagggcaggaaacagtctgggggccacttctttgggaatagctgggctgagayccacaggaatcgcttctggaaggagcaccactttgaggccatttccctgatgcagaaggccacacaggccgtgtatggtgtsagtgcccccagcatgaccttggccacccaccctctggtggatgtaccaccactcacagctgcagggtgccmacagagacgtggtcatcctgggcatgtccagcctggagaagctggagcagaacttggcagtgatggakgaagggcccatggacccggctgtcatggacacttttaatcaaacctggcattttgttgcccacgaatgtcccaactacttccgctaggcccatcatggcccaggctgcccaaggcttttccgtcacctcttttattctctcacgctgaccagtcttggccttgagctgacttaacagggtctttctggatcgtctagatccatgtgttatttttctagcttcctgccttgctccctgctcatttacactgtgaaaggtgggggtgagtcccacttgggcatttcctgttgaataaagcaggcacttgacccagccatagcccaggtcaaccccactcccgccccaccaaaaagagagagagagaaaaaaaaaaccagggtgatatgatgagatactgatcagagtaggtggctccttagttgggatgaccagggaaagcctctatgaggagctgaccctagagctgagatgtggatgatgagaaagaaggtaagagaacattttatgcagggtgcataggccctgaagagagaacaaattatagctggaagcatcataaacaaataacatagtatgggatgagatcagatattttggtaagggctactatatcttattaggtcaaagtaaagagcttgaacgttatacaaaatgtaactggaagcccctggagggttttgaaacaggcagagtgtcctagtctgttttacattgctataacagagtatcacagactacgtaatttataataaacagaaatttatttggctcatggtactggaggctgggaagtccaagagcatggagccagcatctgatgagggccttcacgctgcgtcatgccataatgaaaggcagaagtacaagagagggtaagagcgagggaacaggaagagtcaaacttgcttttataatgcagccactcttacaataactaacccactcctgagataatgacattaatctattaataagggtagagccctcatgacctaatcacttcttattatgtcccacctcccaacactgttctattgggaattaagtttccaacacatgaactttaggggacacattcaaaccatggcattctattctggtccccaaaattcatgtcctcacaatgcgaaatacattcattccattgcagtagccagaaaattcttgtttcagtgtcaactcaaagatccaaagtccagtctcatcaaaagcagatatgggtgggactcaaggcataattcaccttgaggcaaattttcctccagctgtgaggaaacagattaaaaattaaacaaaattatttatttacaaaatacaatgctgggtgatgtggtttggatatgtgtccctgcccaaatttcatgttgaatcgtaaactccagtgttagaggtggggcctggtaggaggtgattggaccatgggggtggatcctttatgaatggtttagcaccatcccctctgtgcttttctcgtgatggtgagttctcatgaaatctggttgtttaagtgtgtagcacctcccctctctcttcctcttgctccagccatgtaagacatgcctgcctccccttcaccttctgccacgattgaaagtttcctgaggcctccacagaagccgagcagatgccagcaccatgtttcctgcagaacctacagaatctacatacagcctgcagaaccatgagccaattaacctcttttgtttataaattacccagtctctggtatttctttctttcttttttttttttttttgagacggaatctcactctgttgccaggctggagtgccgtggtgtgatctctgctcacggcagtctctgtctcccaggttcaagcgattcctctgcctcagcctcccgagtagctgggactacaggcacgcaccaccacacctggctaattgtattttagtagagatggggtttcaccatgttggccaggatggtcttgatctcctgacctcatgatctgcaccccttggcctcccaaagtgctgggattacagacatgagccaccgtgcccggcctggtatttctttatagcagtgtaagaatggactaatacagtgggacagacataagatagacattcccattccaagggggagaaataggcaagaagaaaggggtcccaagtaagtccaaaacccaacaaagaaaaccacattaagtcttaaaggtatagaataatctcctttgattccatgtcctgcatcttgggcacaccaagacacgggctgagcccccaaggcctcaggcagccctgcccctatctatggctttgttgggctcagcacatgtttcagctgtctcaggttggagtctcatgcctgcagctttcccaggttggcactgtatgctggtagctctacggctctggggtcccagtggtggtcccactcccacggttccactaggcactgccctagtggagactctgcaggatcctgctttccacagctccactaggcattgccctagtgggggctctctgcagtggctctgcctctgcaacaagtctctgcctgggcccccagactgtccgatacatcctttgaaatctaggtagatgccacaatggccccataactcatgcgctcagcacttctgcagagtcagcaccctgtgcatgctgccaaggtttacacttgtaccctccagagcagtggcatgaactgcacatgggctcacttgagccatggctggagcagccaaggagctcttcaccaaaacatgggaagcagagtcctgaggtggccctgggcagtgaatgctgaggtctggtgggcacctttctggaaaccctgccctcaaggccctgctctgaatttgtaatgggagggacaacctactcaatgatctctgaaatgtctttgggatctttgtcccattgttttggtgactagcaatattaccctttctatctccctactgttctcctcacttctgctgctgcttgcgattcatcctcattccccatcccagttgccccctcccctctccagttctgtgaatgcagaggtcctgttgtcattcatccacatcctacctccaacccagatgattgggtgggggacacatgctttacaaccacaagtatgaatggctactccagaagtagagattcctggctgttgcctgcagccatgtcctatcttaccacctgctacctgcccagctcttcagaggaagggttcactctaaccctggcccagctggcctgagataagctagttgctgaagtgcagcctcttgtggccactatgactacaatatgatttttttctttatatatattttatatttgtattatctttttaattgagatggggtcttgctatgtagtccaggcaggtctcaaactcctagcctcaagtcatcctctcaccttggcctcctaaagtgctggcattacagttgtgaaccactgtgcccagctggtacaacaactttggaaaacaatttagcaatattttgtaaagttgaaagtaagcatactataggacccaacaattctaattctaggtattcattggtgtagggaaactttttgcacatatgcactgggagacacataaaaggatgtacattgcagcacagcttgcaaaatacaaaaattggaaagaagctgatgtccatcaaaaggataatatataaataatcagggtacgtttacatgatggaatgatacgaagtggttgaaatgacttatcatgaattaggcttagtctttcagtctgtgttttgctacatatatacctatcctcaaacaaaatatactcttgtttgtgtattaatttctatccaagttgataaaaacagtatcatccagtatatatctgtctacaacttgctttaaaaaaaaaaaaaaaaaaaacctcattgcttcctaatgtatatggattttattwattaattaattaatttggaaacggggcctcactctgtcactcaggctggagcacactggcacaatctcagctcactgcaacctccctttcccaggctcaagtgatcctcccaccttacactcccaggtagctgggactacaggtgtgtgccaccatggccggctatttttttgtattttttgtagagacgagttttgccatgttgcccagacttcgaatatgactttggagctggtgaaaaggacttggaacctttttaaaagcccatgttagcacttccagtttgttgagccagggtcttgctttgttgtccatgctgttgtgcagtgacatgatcacagctcactgcagtctcaatctcccaggctcactgcagtctcaatctcccaggctcaagcagtcctcccgcctgagcttcccaagtagctgggactacaggcatgtgccatcatgcctggctattttaatttttttttttttttttttttttggtagagatgaggtctcgctatgctgcccgggctggtctctaactcctgggctcaagtgatcctcctacctcggccttccaaaatgctgggattacaggggtgagctaccacacctggccagcacattcgatataaatgaaatttgacaggattctagaaggcaagctggttataatctgttgtacacacaaggacaagtgaggaagaaaggagacacagtgcccagggataggggagcaaaataagatatactcagttatccatggtcatgaagaacagacatgccaggttattaaaaaccggtagataatccaaaaggcactctggaatacattatatgtcctatcaacaccttgcctctgaaccccagtagatttattcctctagttaacttttctcagactgacattaaaatgagcatatatttccaagttgcttccagatgatggctggagggagtgggcaatagcatgaagactgtgaagggtaaggacagcctaaaataatccattagccacagagaatctcagtgtgggtatttgagagtcacctgtacacgctcagtaaagaggttctgcttgtcaaggcaaccgaattgagccacctgactcttcttagaggcccactccaaaggtatatagtaagttaagtcaggagtctcaagctgaatgcctctcagtccataatgctaccagtcgcatagcatgtgtggccaaaaccagagatactctgttgattcccaacattcttgtgcagaagcaactttagtccacattatgctatttagcaatgaattgtagtagggaaaggaaaggtagggagggctctgcccccatccctgtgatatgtgggccatagttgctctgaaaacccagctacagaatggggacagtaaacaacaaacagagttctagttcagtcatgaaccattttcttatggttatagcagagtgataatggagcagggaaaggacaagaggccaaaacacagagtcagtgctcctgaaagcaagattactcactggagacatttattggtttctgtttttcctgtgaaggggagaaagtaggtcagcacactcaaagaactgtgaccaggaacagtggctctgagagggagtcatttgctgcaccctgtgccaagatgaacgagtaatagacacgcctctcaattgagggcatttgactgaggtcacttggcttcgggaaaaactcaggctattgatcccttggtgtgtattctttgcaggccttaggaggtaggtacaagggaaggctcgcagttttaaaaccaacatctaaatggttggctagcatgagctggcaagcacaggaatgtttatgagcaaactgtgtgcctactttggctttcagacaagatggacaaggctcagggcagcttggctaaaaatagatggcacagaggggcctaggaagcaggagagctaggtttcactcccaggtctctgagttaaccttcaggcaaacttcctgagtgtctttatttcatatactgattagctcttagtaaggaggagtattgaataagttttcctaggtctagagaagggttcacatggagtctgctacattttcttgtctcatctttcctcaaaagatccaagtttgggaaaagactggttgtgatcaggtggaaggtggagtagctgacatacgatggaacagtaccaagctatgatgaccctctgggagccacgagtccttctggactaaccaaggtggctgcccagccagagccaaaaggaggctccctgaccctgggtctggaggcagaggtggcagagaagtaaacaagaggcaccaaatcagaactcctgatgcataacccacagctatgagggggatagtgtgaaatgcagggctttaagtaggaaatttagtagg

SEQ ID NO: 93717 - DNA, 42710 bp, Homo sapiens
atttatgagtgagatctagtggaagaagggagcctccaacctcttggccaaactctcctggaattgcctctgtatcaggtagctggggtaggaagggaatgagaatactgatgtcccacccttaccaggaatataccatagccttcagatgtaaggtgagagaagaaatcccatattctggatgtacttattaagagttaaaatccattatactggggttgaggggctataggagaaaaggagtaggttccagttcaaatgccacagattctcagtgcacctagtgaatattagtagattttcttgaataatttttttttatttgtaatttgcccttaagaccatttcaagagacttcaaatattcttttatttttatttttcacaatttatgtctgtttcactagggagcatgtctgtctgcagaactcctcccattgccattcttgaagtgacaatcagaactcttatttttaatcagataggttatattctattctttaatagaaaacagaagaccagtgatttcatcccataataattttgctaaaattcactaaatgagaaatgaaattactaattttattagttttttttcttttgttaaaaaaattctcaattcagtctaaggaatagtgtctatttaaatatttcagataaaatatttatgcattctatttgtaaaattgataatgcctatttgttagcagatttgatctaatcttcctagttaccttggctcctaaagaaggagtatttgctcaaaaaatatattatgatcaattgagaagtgttgattagaaagacaacaatttcaaatatgttgaccacaaaatgcaaatttaaagaagtgttttaattgtgtgaaaaaattaaaactgataacaatatactagaaaaattacttattcagataaacatcaacagttcacttttgagagacaatatgggactatatacaaagaatgactattggctttttgatgtttagatattcaaaatgacaatattatattttttgtaaagtatagatatattatttaaatatttatatttataaaaataatttttgaatattatttaattattctaacaatataataaatctgtattaaaattatataagtattttaaagcaatagttattttaattatttttagggcactactactttatatttgagttgactttgcttgggtaaaaagttactttatctccctaatgaaaggcatccatgttaagacataaatcaaaaatttagacttaaaaaaaattaagcaatagcaactactacaaatgtgatttatcttaaccagtggtatccagaaattcaaacaaattacaggaaaaatttacgaaatttttcattgtactattactttttgtgaattataaaaagtagactgtggattagaattggttggttaaacccatagcagtgtagagcaaagatgaaatctgaattatagataaacattttgcctttataatttaggtagtcaaaaggaggccaaatttaaccaaaatgtagtaattaaaagatcactgaatatgccttaaaatgtcttttaaattaaattttcctaaaggtttaaaatatatgtatatataaaagagactattttaatgaatcttaatacccacatcatcaagattgaatgatgtttaacatgcaccatgtttaatttgtttatttttgatttaccaaagtatttgaatcaagaactgtcatcatggatcgtcagtatgcagctttttaaagaaagaattttttttcaataatggaaatttgaaagtttcttaattttatctaatgctcaactcactttcacattgacaggtaaaacaaaatagtatttttatcatttgtttaattgaaacaataagacaagttccagggtacatgtgcagaatgtgcaggtttgttacataggtatacacctgccatggtggtttgctgcatccatcaacccgtgatctacattaggtatttctcctaatgctattcctctcctagccccccaaccctgatagataagattttttaagaatagatttaccggttataaatcttttctaatccaacttcattgccttatcagaggaataagatcaggtttccttcataatgttcagaactctacaaatactattgcttccttatggatatgttaatctttttttttttaaatatttattctgtttcctgtgaactgaaaactagaggcaaaggcctcagtattttttttcagccttattgcaagaccatagtatgatgcttctatttcattttacattatatcatgaagcactaaaagtccactcttagtgatgggtcaccaggttcaagttgtgacagcttgaacccacaagtgcacattttttgttttccctttataatgaacaaataattaccatggtaatgcattaatgtcttgtgaatatccagtcaccaaacaagttttcaagtaatggttttaatatctgtttgataattgttgactgcatcaattatatcttgaggggtatttaaaaagcaattttatgatatattttcctacttttacaaaactcagaatttttacagaaaactgaatcagaaaaattcctgttctttaatttatcaattttcaaagtaggtatttggtacactagctattttaaatagtgtcaaattattattttttaaacttattttgaactattggacttttagataatttatgtgtctcaatcaactgcagtagtcattaggagattaaacaatttttgtttttatttttgttactctaatgatcatgtatttgccctataagattctcgtcagacctgccaccctatcattttggttatgactcatcagtctttgatatggtgctttttggtcaaaaatttacgttctagttccaattttgtgtgtttctttcctgcctcagacttaaatttaacattttttcccaaagaatattaatttcttatatttgagaatggaattgagagacaaaaatatatctggtaataatgcacatcattactggaagttgcttcctggtaatcattttagtatccaaaattatgaaatacatatctaaaaactaaagtaactataaagatttcctaccactattcctaatttccatttaacataacagagttgtactcatttctttataaaaattttacttctatattttttctttcaacaaagaatttattctaaatatcatttcacagtatttattttaacacttttcttacaaaataaatacaattgatagttattttttaatctgaaactttaaaatgtctgtacaccagaaaaaagtgaaaattctacagggtgaagaactcaaggtagggactatttctagggttcaaaattgaagtttagtgggtaaaaatcatggcaccaacaatcccaacacagaaataagtttaattaaaatcacaattttgtttttcttatgagcagttgttatcaattttatgagtaatatagacggtgagtaacttgtatagaataaacattttgttgccctgcacacaatttctttattagtagttctgcaatgctttccaggaaatcaaaattataagatgcttccctggtaattttaaggtacaccatataccagtccatgacttgactgatggttctctgaaagcctttcgacgcttcttcctacaaaaaatgtagttattcaatggaactagtgacaggtgattcttatattagccccaaatcacaggagtttggagagttgcaggtatacttgagtcaagactagaagtattagggctgggtgcagtggctcacccctgtaattccagcactttgggaggccgaggcgggcagatcacgtgaggttaggagttcgagaccagcctggccaacattgagaaaccccgtctctactaaaagtacaaaaattagccaggtatggtggtgggtgcctgtaatcccagccactcgagaggcttaggcaggagaattgctttcgcttgaacgcaggaggcagaggtgtcagtgagccaagactgcaccattgcactccagcctgggcaacagagcaagactccatctcaaaaaaaaaaaaaaaaaaaaaatttagaatagcagcagtaaaaagaaagtcagaaacagagaaaggttcttatactgaactcttcaatgaaacatagcattctagttctacagaacattacacattttcactaggctgcattttttttcactttcgttaagtaattcagcctttgttgtagcacactaacctgctcttgagaacactgccaacattaaagtataacttacgttccttgaaaaatagtttgtacacctctgtgttagttttttgaattcttatagaggaatacttaaatctgggtaatttataaagaaaatcggtttattttggctcacagttccgcaggtggtatgagaagcatgctgctagcatctgcttctggtgagggcctcaggaggtttataatcatggcagaaggtaaaggggggccagtgtgtcacatggcaagagggggagcaagaaaaagctgaggaggttccaggctcttttaaacaaccagctgttttgtgaactaagtgtgacaattcactcattactgcaaggatagcacaaagccattcatgagaggtcttcctccatgacccaaacaccttccactaggcccttctccaacattggaggtcacatttcaacatccaaaacagatgactctccaaatgagtaaagtaaaactctatcaccttgtggcagtggaaatcaaaattcatttgcagaagatttgcggttgtttaattacaaggataacgaaatgatagagagtgacagctagtatcctagagtttgggaatccagttgcaaattcaaatccgtccagaatcattgctgtttgggcctacctgctagcgtatgtacactcccctaaaatatcattagagacaattctaagttttaagcctggctgggacttctaagacaatcataaagattctaagaatctccaaattggttggttcccactttatacacctgctccaaagagactgggccttaagaataatataatttgaaggtttaatttcatttctgtcttcattgccccctccaacacaccctgccccacctaatagaataaacctttatttgacaacaccagctgggcagaggctgtgagctaatcacaacttctgtatgggcataaaagatatgaaagttatattattgtaatgtctgacctgttgaaaataacaggattaggaaactggaaagatcttagttttaataccagtcatattttaaaactaattcctcaaaattaaacaattttgctgagctataaaaaactttggaactcattcactccaacctcttacttacagattaaatgtgtatattgtgtcaattcctaaagcgactgagttgccccaagctaattaataacaggtagacctggaacccaaatatttttacttgtaatttagtgcaaacaccagggaactgcagtttactacagctgctttctaatgccagtcaataggtcagctcattttgtaagaataaattactgtctccctaacattgactatgttctttcttactggtttaggtaggcttttctcattctaggttttgcattgctactttggcttattaaaagttaaaaacaaaaaacaacaataaatactatgataaatcacataacagaatttcatatatttcagatataatgaatactatttttctcccttcctctgcaaagaccttatcttctctaagcagcaagggtgaaaaggagagaaatgatgaggaagtaactgtgatcaaatgttactttcttagtttagtgcagactccttttattaattttaatttcattcttgttttatgatactgcaaagtgattaatttcttttcatcttatgttattttcactttttacttaaaattttaaactcaatttcttacataaaatttccaggtggatcaagacaccaaacagaggtaatggcactttactgacaatcaagcaatctagtggggcaccgaacacattaaagggagtgaagactagaacaatcaaaagaattggtaccaagaagccagattcacagggtattgtgcatcatgctagcaacacacttaaggtctaaggttaaaaataagattatctggtagcaagtaaggaaggcaagagggatgtctgcaggagacagggcatgtataaatgcttatatttaargcccctagttttgaagacaatataatacaaagatggtttcctgaaatgaggcaattcactggaaatgcaacacaaaatggctttaggtctcctatactttcttagtgttgaaaaatttttttaatgttattttgtctaattttcctttcacctcatcttaattaaaactaatctttaaataatctccagaataataaatatataaactcttatcatcctcttcagtcaagcagaaaattttatttttgcttgactcttattttctgtttgctgagtgacttactttatatttaaaatcatgcaaaagtatgcagacttgccatcaacaagcccactgtctctaaatgtcaaactgacctcagttattgaaatctgaaagctggttttatattgccctttttgagcaatttatgattgccatatattatactaccaaaaatgtagaggcttcaaaccagtctgtccattactgtccaaatcactgcacagtaaaaggaagcagtgactacagccatcatccatgcagtgtcgacaaatttcttacagataaaatttctgaaatgtggacagccttaaattactcagttgacagaattttgtcaagaattgtttcrtagtttttggcaaccttgtagcctaaacagatgcctatcaacatgcctgtatccattttatgcctgatctgtgagaggagagagaaggaaaaatatactctcctatgcayatttatcatggcttgaaaagagagcctcagtctatttcacacttattgccacaagtaatttaagtttgaaatcttgaatctttctttcagttttggccagtaacttacaagccaagtaatgccctgtccttaccaatactcaaacatcagtattggaaagatggattcgtttcttaaagcatcaaaattaaattaattaattaaatgataattcctcacagtgtatatagttcatagtttttaaaatgctttcacatattctattcctttaaattttatgataaccctctatggtagaacgcatgagcacaattgtttgcagcatgtgaatatgagtgtaacctgtttttacatcagaatgtcagtatgtctggatgtgtctggtacactgatgaaacagacactagaagtctatttatattaagggacaaagaagctcctggggaaaaaatatttagaaggaaaataagcaaaagctgccaaggttattttaaggacaatggatcaggattaaaggagtagaatatttaaatgcatagtattgcacttatatctgaaattgattacagtacgaatttataaaaatatgtccaggtcagagggaaaaaaagttacaattaaacttagtctttattgtaagtctctgtgagatgcagagatcacagaatattagaagcattgtcagtttcactgacaaagtcagctatctgaattgaaattattatgagaaaattaatcctctccacttacagcattacctaaatatatttctgaaattattccaaatcttacagtgtattaataacttaacagaagctccattttaattgtttcttcacattttattctaccattcctttatctcagtgtactcttaggttgattcctgtcatttaaaagctatcatagcaccattgtcagtaagaggagtatatttaacaacagcgtctactttgctgaacagccattttattcacaggcctaactgaaagataatcatcattagtgtgttaattttaattcagaagccccaaaactcctgtcgacgacttatactgtattagcaatcacaaattgtttacaagttgtggcaaaaagactaggcttattatgaactagctcttaaagaaatctttaaaaatcactagagaggccgggcgcggtggctcacgcctgtaatcccagcactttgggaggccgaggcgggtggatcatgaggtcaggagatcgagaccatcctggctaacaaggtgaaaccccgtctctactaaaaatacaaaaaattagccgggcgcggtggcgggcgcctgtagtcccagctactcgggaggctgaggcaggagaatggcgtgaacccgggaagcggagcttgcagtgagccgagattgcaccactgcagtccgcagtccggcctgggcgacagagcgagactccgtctccaaaaaaaaaaaaaaaaaaaaaaaaaaaaaaaaaaaaaaaaaaaaaaaatcactagagaaccaccgagcatggtggctcacacctgtaatcccagcactttgggaagccgaggtgggcagatcacttgaggtcaggagttcgagaacagcctggccaacatggtgaaaccccatctctactaaaactacaaaatttagctgggtgttctgatgggcgcctataatccctgctactcagaaggctgaggcaggagaatcccttgaacctggaaggcagaggttgtagtgagtggagatagcaccactgtactccagcctgggcaacggagcaagactccgcctcaaaaaaaaaaagtcactagaaaacatccttcagtaaaagtagacacaaaaactcttaatagaaggaataggataataggataaataacgacacacacgtgaccaggaaaaggaaaagaaaattattatttagcaataacaatttgttttaaaaggtttgcttttaaatcatcctttctttttctaaatcttacatatttgtgtgttttttttcctttactcactgcaataacttatttaacatgatgtgaacatagtcacaccactaaatggcagaacctggactcatcataggtagcatggtttcaaacactgtgctcctaaccgctagagtaatctcagacacaattttaacattcattgatatattttttagacagcatgcctcttctaaatttagttaattttggttgctttacaaccgttgattattaaaacatgtgtacacatttttgaaaacataatactctaatatcaaatacaaaaagccttatagtaaaaagtaccaatcctttgcccactctacctgattcccagttccactccccagaatactgcatttagttctttaagtgtatattcttgtttatgcttctgtaattttttgggttttttttttggttgttatttgaatgttacatactatgcagtggacaaattatttcgatgtagatttagttaagtgacatatattttccttgacttcccttcctttcctcctaaaatattatttttagttcctcccattgataagtaatattcctgaaacatttattttattctaataattataaaataagtgtctttatcattttcattaataattattttagctctcatgcaatacttcttccccaaatctaacatagttatattttctaattttgtatataattgarctgtcaaaattgaaaatcaataactttttatattattgtgatcagagttttattgtaatgtgaaatgatacctgataatatatactactcttgtttaattttgttgatccttaaatttgaacatacatttctctttttgtgctattttcctttgacatatccttaaatttaacaaatctgtgtcacacgatattctctgcacagatccttctctccaccacctctcacgttcatttctggtctagatttgttactttctgaggctttccacaggtttatccattcatgattcatcattttttccacaactctcttcagtygtattcattgtaccttatgtcttctttctaaatgtaatcctttgtgtttcttgaattcatcaccaagtaatttgcttagagtttgtggataaaacatttcttctataaataccttaaaaaatctttattttgccttcacatttgattgatagtttggctgtttacaaaaatatagtttcaaaataattttcctttagaaatgtaaaagcagagcaacatttctgygaggagcttggcaaaatctttctccaaactgcaatgataaaactttataaacatgacaaaaatgataaatttctggraattgactcaatgcatatgtttatttttaaaaaaatgcattagtggatcattggaagggatagtcaataaacccacttctacttcttcattttctcatctatgcattctaccgttttgagtcacgacaggtcatgatagtcatttatatcggttttataatctttacaaggcattgcctccaagtcattatgtcaactgcatcttagaaggacataactatcaacctggaatgaacattctgttgaatccccagatacacgtattagctgaagccttgtatgaaggaaagacaaaaccataccctgaatttgtgcagattttggggcaacatgaattgctgctcctttcagtgtgaaacaggttcaatgtaatcaatttgcctctaagtaactgattgattttctaaagtaatggacatcagcagcagttttttccatcccttggttaagggaaacccataatgttgggcccatacatagccttgatgtgtactgccacaattactacttatgcattcagtactgcagtaaggtatgacagtttaaacttacgagacaactcattctgatcatttagtacctcttcctggtgattgctttctggaaagtgtcaataagcaaagatctttacgttttcttccccacttaatatgtcyatccatgccatgtgctattttcccattcctcctcctcctaatttttctctctctcccatttcagaactctagccaaacaaacaagtcagtcaccattaccctgtgttcatatattgttctaatcactgacaatttccctttccaaacaaggtggatattcaacaagggcattgcctgcaactctgccttttggtaacatttcccttccacccttcttcagagccacctaatagtacaattatcatgtagcagcaggatcctttggcactagtggatgctgcagtgtgccactcaggcttctcttcatgtgtgaagtactcctttctctgccacaagtgttcactactgttcattgcccagaacagcctggtacattcaccctcaacggacaagccatgcctgatcaaataaccaaacagcccctacccacatttgacctgtgaatcagcccagcatggaggctgtgtctaagaaactacaagctgctgcagcttaggcaattgaggcactcacaagcatgatgactatagctgaataaactgcatggatactacaacactgtgcccacctggaacctaggcaatccaccctgcctaaatgacaccctaagacacatctgcaagtgaaaatttttccctgtgaaagatactctaaaatataagaaaaggtgactgttccactagatgtacagacatcaacagagacacaagaaaaattaaaaacagggatgcagaatagcaccaaataaatataataaatttgcagtaactaaccccagagaacagaaaaatttttaactgcctgaaaaggaattcattataacattttttttaattcagcaagataaaggaagcacagatataaaatttgaaaaaaatgagaaatacaattctgtatgacaaattccaaagagtgaaatatcattaaaaaaatttggagttaaaagccccagtgagtgaaatgaaaagtgcaactgagactttcaacagcagactatatcaaggagaagaaagaagtttcagaacttgatgacaaatattttggaataattctgtcaagaaaaaagaagaagaaaaaataatcaaagaaaacctacaagatatatgggacaccattctgtgagcatgttttttgcattatggaagttataaagagagaacaggtggaagaaggcacagaaatcttatttaaaaaaataatagatgaaaacttcccaagccttgagaaacatatggacatcaaaatccatgaaactcaaaagaatcccaaacaaaagaggttctttctaaagcacattataatcatactaccaaactgaaagacaaagagaatcctaagagcagcaagataaaagcatcaagtctaatatgaggaaatcccattagattatcagcagatttcttaacagaaaacttgcaggccaaaagaatgggattatacattcaaagtgctgaaagaaaaaaaaatcctgccattcagyacagttatttttcagaaatgaagaaataaagtcttttctaaacaaatgaaggctgaggaaatttttcactaaaccagactttgcaacaaaatgcttaaaagactgctccaactagaagcaaaatggagttattactatgaaatcacatgaaagtataacccttacttttagagagaaactcataatcaaattcataatacactattactatccttgtagtatagtatataatctttcaaatctctagtagaaaagctaaatttcaaaatagtaagctataatcctagttacaataagttgtcaagaagatatgaaaaatgtaaattatggcaayaaaattataaattttatggtggggtagatgtctgaattatatgcatgcaatcaaaattaatttttatcagtttaaaatatacttacataactacaagaatttttcatgaaagtgccagattagtcacaaaggaaaaaattacaatatatacmcaaatgagaaagagaaaagaatcaaatcttactactacaggaaaccacttaatcacaaagttatacaacagaagaagaagaaaaaaacatttttttctacaaaatatttagaaaacaacagaatggcaggagtaagctcttagctatcagtaataaccttgaatgtaaatggcttaaattcttcaattaaaagacacgcagtggctgagttgattaaaataacaagactcaactatatgttgcctacaagagactcacttcaacaataagagtacatataaactgaaagtaaagggaaggaaaatgatatatcatgcaaattaaaaccaaaagaaaggaggatagctatacttatcagagaaaatacaattcaatcaaaaactgtaaaaacagataaaggtaaccattgtataatgataaaggggccaatttagtaagaggttataaaaactgtaaacatattggcacccagcacaagagcaccaaaatatatgaagcaaatataactaaaatatttgctaactaaagagagagatagacttcaattcagtaatagtagggaagttcaacaaccacattcagtaatggacagatcatccagacatagaatcaacaacaaaaaaaatggatttaaactgtatcctaactcaaatgaamcttatagacacagaagttctatgatgaaagtttatagcaataaatgtstacatcaaaaaaattagaaagatcttcaataaacaacctaacattscacatccaagaactagaaaggccagagcaaagttaatccaaaataactatagtaaaagaaataataaagatcacagcagaaatacacaaaatagaagttaataaaggaaagcaaataaaacagttttttccaaaaaaagataaaattgactcttttaactaaactaaaaatatggataattttcaaataaatgcaatcagagatgaaaaagaaggtattaaaactgatagcacaggaacacaaagaaactattataaaaatctatatgccaacaaattgagaaacctagaagaaatgtatacattcctgaacatatacaacctaccaaaatagagtcagcaagaaatagaaaatctaaacagaataataacaactaataagaataaatcagtaataaaaagtttatcagcaaagaaaaacccaagacttgataatttcactgctgaattttaacaaacatttaaaaaaccaataccatttttatataaccacttctagatttctcaatttttttggcatatagttgtttcaaagtctttcaaattcatttcatgaggccagcatcaccctamtatcagaaccagacaaggatacagtaaagaaagaaaagtacaggccaattcccttgatcaacgtaatrgtaaaaattcttaacagaatactagcaaatgaaaatcaaaagaacattaaagtcattattcaccataatgaattgggrtttattccagggatgcaaggatgattcacatrtgcaaatcaataaatatgatacatcacatcaacagagtcaagaaccagcaatacataatcgtttcaataaatgcacaaaaatcatttgataaaattcaacaccctctcatgattgaaaactctcaaccaattaagtatagtaaagatctatctctatgtaatacaggccctacgtggcaaacctacagctaatatccwgaaagggtaaaagttgaaagcttttctttgaagttcaggaacaagaaacgactttcagtcaacatagttctagaagtcctagccagggtaattaagcaaggaaaaagaaataaagtgcatccaaattggaaaggagaaaattaaattatccctgttggtagaatacatgattttatatatacaaaacactaaatattccacaaaaaaaattaaaactaataaatgtattcagtaaatttcagtgtacaaaattaacacacaaaattcagtagcatttctctatgctaatagtaaagtacctaaaaaaaaatcaagaaagcaggggaggagccaagatggccaaataggaacagctctggtctacagctcccagcgygagygacgcagaagatgggtgatttctgcatttccatctgaggtaccgggttcatctcactagggagtgccagacactgggcgcaggtcagtgggtgcgcgcactgtgcgcgagccgaagcagggtgaggcattgcctcacttgggaagcacaaggggtcagggagttccctttccgagtcaaagaaaggggtgacggacacacctggaaaatcgggtcactcccacccaaatattgcgcttttcagacctgcttaaaaaacggcgcaccacgagattatatccygcacctggctcggagggtcctacgcccacggagtctcgctgattgctagcacagcagtctgagatcaaactgcaaggcggcagcgaggctggggaggggcgcccgccattgcccaggcttgctyaggtaaacaaagcagcctggaagctcgaactgggtggagcccaccacagctcaaggaggcctgcctgcctctgtaggctccacctctgggggcagggcacagacaaacaaaaagacagcagtaacctctgcagacttaaatgtccctgtctgacagctttgaagagagcagtggttctcccagcacgcagctggagatctgagaacaggcagactgcctcctcaagtgggtccctgacccctgacccccgagcagcctaactgggaggcacccccaagaaggggcacactgacacgtcacactgcagggtattccaacagacctgcagctgagggtcctgtctgttagaaggaaaactaacaaacagaaaggacacccacaccaaaaacccatctgtacatcaccatcatcaaagaccaaaagtagataaaaccacaaagatggggaaaaaacagaacagaaaaactggaaactctaaaacgcagagcacctctcctcccccaaaggaacacagttcctcaccagcaatggaacaaagctggatggagaatgactttaacgagctgagagaagaaggcttcagacaatcaaattactctgagctacgggaggacattcaaaccaaaggcaaagaagttgaaaactttgaaaaaaatttagaagaatgtataactagaataaccaatacagagaagtgcttaaaggagctgatggagctgaaaaccaaggctcgagaactacgtgaagaatgcagaagcctcaggagccgatgcgatcaactggaagaaagggtatcagcaatggaagatgaaatgaatgaaatgaagtgagaagggaagtttagagaaaaaagaataaaaagaaatgagcaaagcctccaagaaatatgggactatgtgaaaagaccaaatctacgtctgattggtgtacctgaaagtgatggggagaatggaaccaagttggaaaacactctgcaggatattatccaggagaacttccccaatctagcaaggcaggccaacgttcagattcaggaaatacagagaacgccacaaagatactcctggagaagagcaactccaagacacataattgtcagattcaccaaagttgaaatgaaggaaaaaatgttaagggaagccagagagaaaggtcgggttaccctcaaagggaagcccatcagactaagagcagatctctcggcagaaaccctacaagccagaagagagtgggggccaatattcaacattcttaaagaaaagaattttcaacccagaatttcatatccagccaaactaagcttcataagtgaaggagaaataaaatactttacagacaagcaaatgctgagagattttgtcaccaccaggcctgccctaaaagagctcctgaaggaagcactaaacatggaaaggaacaagtggtaccagccactgcaaaatcatgccaaaatgtaaagaccatcgagactaggaagaaactgcatcaactaacgagcaaaatcaccagctaacatcataatgacaggatcaaattcacacataacaatattaactttaaatgtaaatggactaaatgctccaattaaaagacacagactggcaaattggataaagagtcaagacccatcagtgtgctgtattcaggaaacccatctcacgtgcagagacacacataggctcaaaataaaaggatggaggaagatctaccaagcaaatggaaaacaaaaaaaggcagggcttgcaatcctagtctctgataaaacagactttaaaccaacaaagatcaaaagagacaaggccattacataatggtcaagggatcaattcaacaagaagagctaagctaaatatgtatgcacccaatacaggagcacccagattcataaagcaagtcctcagtgacctacaaagagacttagactcccacacattaataatgggagactttaacaccccactgtcaacattagacagatcaacgagacagaaagtcaacaaggatacccaggaattgaactcagctctgcaccaagcagacctaatagacatctacagaactctccaccccaaatcaacagaatatacatttttttcagcaccacaccacacctattccaaaattaaccacatactgggaagtaaagctctcctcagcaaatgtaaaagaacagaaattataacaaactatctctcagaccacagtgcaatcaaactagaactcaggattaagaatctcactcaaaaccgctcaactacatggaaactgaacaacctgctcctgaatgactactgggtacatatcgaaatgaaggcagaaataaagatgttctttgaaaccaacgagaacaaagacaccacacaccagaatctctggacacattcaaagcagtgtgtagagggaaatttatagcactacatgcccacaagagaaagcaggaaagatccaaaattgacaccctaacatcacaattaaaagaactagaaaagcaagagcaaacacattcaaaagctagcagaaggcaagaaataactaaaatcagagcagaactgaaggaaatagagacacaaaaaacccttcaaaaaattaatgaatccaggagctggttttttgaaaggatcaacaaaattgatagaccgctagcaagactaataaagaagaaaagagagaagaatcaaatagacacaataaaaaatgataaaggggatatcaccaccgatcccacagaaatacaaactatcatcagagaatactgcaaacacctctacacaaataaactagaaaatctagaagaaatggataaattcctcgacacatacactctcccaagactaaaccaggaagaagttgaatctctgaatagaccaataacaggatctgaaattgtggcaataatcaatagtttaccaaccaaaaagagtccaggaccagatggattcacagccgaattctatcagaggtacaaggaggaactggtatcattctttctgaaactattccaatcaatagaaaaagagggaatcctccctaactcattttatgaggccagcatcatcctgataccaaagcggggcagagacacaaccaaaaaagagaattttagaccaatatccttgatgaacattgatgcaaaaatcctcaataaaatactggcaaaacgaatccagcagcacatcaaaaagcttatccaccatgatcaagtgggcttcatccctgggatgcaaggctggttcaatatatgcaaatcaataaatgtaatccagcatataaatagagccaaagacaaaaaccacatgattatctcaatagatgcagaaaaagcctttgacaaaattcaacaacccttcatggtaaaaactctcaataaattaggtattgatgggacgtatttcaaaataataagagctatctatgacaaacccacagccaatatcatactgaatgggcaaaaactggaagcattccctttaaaaactggcacaagacagggatgccctctctcaccactcctattcaacatagtgttggaagttctgtccagggcaattaggcaggagaaggaaataaagggtattcaattaggaaaagaggaagtcaaattgtccctgtttgcagacgacatgattgtatatctagaaaaccccattgtctcagcccaaaatctccttaagctgataagcaacttcagcaaagtctcaggatacaaaatcaatgtacaaaaatcacaagcattcttatacaccaataacagacaaacagagagccaaatcatgagggaactcccattcacaattgcttcaaggagaataaaatacctaggaatccaacttacaagggatgtgaaggacctcttcaaggagaactacaaaccactgctcaaggaaataaaagaggatacaaacaaatggaagaacattccatgctcatgggtaggaagaatcaatatcgtgaaaatggccatactgcccaaggtaatttacagattcaatgccatccccatcaagctaccaattactttcttcacagaattggaaaaaactactttaaagttcatatggaaccaaaaaagagcccgcatcgcaaggcaatcctaagccaaaagaacaaagctggaggcctcacactacctgacttcaaactgtactacaaggctacagtaaccaaaacagcatggtactggtaccaaaacagagatttagatcaatggaacagaacagagccctcagaaataatgctgcatatctacaagtatctgatctttgacaaacctgagaaaaacaagcaatggggaaaggattccctgtttaataaatggtgctgggaaaactggctagccataggtagaaagctgaaactggatcccttccttacaccttatacaaaaatcaattcaagatggattaaagacttaaacattagacctaaaaccataaaaaccctagaagaaaacctaggcattaccattcaggacataggcatgggcaaggacttcatgtctaaaacaccaaaagcaatggcaacaaaagacaaaattgacaagtgggatctaattaaactaaagagcttctgcacagcaaaagaaactaccatcagagtgaacaggcaacctacagaatgggagaaaatttttgcaatctactcttctgacaaagggctaatatccagaatctacaatgaactcaaacaaatttacaagaaaaaaacaaacaaccccatcaaaaagtgggcaaaggacatgaacagacacttctcaaaagaagacatttatgcagccaaaaaacacatgaaaaaatgctcaccatcactggccatcagagaaatgcaaatcaaaaccacaatgagataccatctcacaccagttagaatggcaatcattaaaaagtcaggaaacaacaggtgctggagaggatgtggagaaacaggaacacttttacactgttggtgggactgtaaactagttcaaccattgtggaagtcagtgtggtgattcctcagggatctagaactagaaataccatttgacccagccatcccattactgggtatatacccaaaggactataaatcatgctgctataaagacacatgcacacgtatgtttactgtggcattattcacaatagcaaagacttggaaccaacccaaatgtccaacaatgatagactggattaagaaaatgtggcacatgtacaccatggaatactatgcagccataaaaattgatgagttcatgtcctttgtagggacatggatgaaattggaaatcatcattctcagtgaactactgcaagaacaaaaaaccgaacaccgcatattctcactcataggtgggaattgaacaatgagaacacatggacacaggaaggggaacatcacactctggggactgtggtggggtggggagaggggggagggatagcattgggagatatacctaatgctagatgacgagttagtgggtgcagcgcaccagcatggcacatgtatacatatgtaactaacctgcacaatgtgcacatgtaccctaaaacttaaagtataataaaaaaaaatttaaaaaaaaaatcaagaaagcaatttcatttacaattactacaaaaaattacctgtgaataaatttaaccaaggtagtaaatgatatatacaatgaaagctgagtattgatgaaagaaaatgaagactatataaataagtgagaagatatgatttcttcatgatttggaagaaggaatattgttaaaatctccacactagtcaaagccaactacagattcagttaaatccctatcaatataccaatgacattttttgcagaaatagaaaaaaaattctaaagtttctgtggaaccacagaagaccccagataaccaaagctatattgagcaaaaagaacaaaacttgtggtgtcacactatctgacttcaaaacatattacaaagccatagtaaccaaaacagcatggcatcagcaaaatagtcacatagaccaatggaacagaatggggaacccagaaatcaatccatactcatacaaccaattgatttttgaaaaaggcaacaaaaatacacattggagtaaaaacagtctcttcaataaatgktgctatgaaaactggatattctcatgcagaagaatgaaacaagcccctatctctcaaratatacktaagtcaactcaaaatgaattaaatacttaaatataagatgcaraaactataaaactattggaagaaaacatgtgaaaagtgcttcacataattkgtctggccaagaatatttgtataataactcaaaagcacaggcaaagaaagcaaaactaaagaaataagattatataaaactaaacagcttgtacacaacaaagaaaacatcaacagagttaatgacaacctmtaaaatgggagaaaatatttgcaaattatgcatcttacaggaggttaatawcyagaatatataggaattcaaacaartcaattgcaaacaaacactctgattttaaaataggcaaaataaatagacatttctcaaaagcagacatgcaaatgagcagcaagtttatgaaaaaatgcttagcatcactgtattagttgattctcatgctgctatacctaagactgggtaatttacaagggaaagagggttataaytgacttgcagttccacctgccgggcgaggcctcaggaaacttacaataatggtggaaggggaatcaaatcggtccttyttcacaaggcagcagaagagtgcggtgctgagcaaaggtggaatccccttgtaaaaccatcagatcttgttggaattcactcactatcacgaaaacagcatggggagagtggggtaaccatccccataattcaatcatctccactttgtcctgcccttgacatgtggggattatcacaattcaagatgagatttaggtggggacaaagacccaaaccatatcagtcgctaatcatcagggagataaatttcaaaaccacaaccaaatatcccttcacatctatccgaatgtatattattcagattaaaaaagacaaaaaaataacaagtgctggtatgaacgtggagatataataactcatatactattggtaggaatgtaaattattacttccattatgagaaacagtatggtgattttcaaaaaattaaaagtagaactaccatatggatcctgaaatcctattactgtgtgtttatccaaaagagatgaaatcattatgtcaaagagatatctggacttccatgtttattgcagcacattcacaatagccaagctatggagcaacctaattgtccatcaatgaatgaatgcatagaaatatatatatatatacacacacatacatatgtatatgtrtatacacacacaatgaaacactgttcagccacaaaaaggaataaaatcttgtcatttgcagcaacctggataaactcagaggacattaacctaagtgaaataaggcagcacagagagacaaacaccacataatctcacacagctgcaaaacttaaaaatctggttccaatgaaatagaaagtagcataagtggtcaccagaattggtcaagggtgaaaaattacgatagwtaggaataataagacctggtattgtattacatagtagggtgattatagttcaaatattatattgtacatttcaaaatatgtagaagagaagattttgaatggtcttaccacaaagaaatgataaatgtttgaggtaattgataacctaattaacctgactctatcattatacaatgtatacatgttagaaatatcacgacatactctataagcttttaccattattatgtgttaattaacaataaaataaacctttaaaagttgaaattatccgtgggctcaccatgtaactttctgtttcgtcaatggctcccatcattcaatgtctcttgtataatatcagaaagtggtttatccagtttctcacttgtttatagcagatctagcctattaccagtttctctgctacacacagcagcagaaaactgattttattttaatgaaaatagtactcattcagtaagcactgtaaaaattttcagagaaatattttttgtttactcacagtaaatacagaaattttagatttaattgatttgcatattctatgttagatttcacatgatcagaaatatgttagacaacaatagaatgtaacaatactacaaatgttattcaaaattctttcaattaatgcaaattattaggaaaaatatgctatttgtaaaattacctgactacttgaaagaaaataagcaaaataagctatagatagctatgcttaaattttaattcttgaaattgctactgaattattgtagctatatatatatatatatttgctatctgagaaataaaaattagtatcttgcttttatacagcctaaaaacatttccctatatattgagttgggcatgtacaatctttctatgaaggagcaatgtagggatttttaaccccttttgcagtgaaataaataaaaaaccagtaaattagtgaagactaaattggtatctcagtttaaacttggtaaaataaaattttaattagttctttttacacaataattttatctttcatacacagcttttatgtgatattgcattatggtcataaattatatgatactttcatctttatttctcacctttaacatctaaagcctcgattttaataaaagtaattgtttacatagccttctttatgactatcaaccttggatttatcctgtttatacatcctycctgttttccaagaaaaaaattccaaatgttgttttttggtctgtgtatgttattatatctattatctgagttttgaaaattattctgctacagcaatcctttgttttagggttctagcagcagcttcaatatttatattaaatgcttattattttgacagctcaaatgtcattaaaatgacagattactagtttgagttcagaaaccattgrcataaaaggagtaatgcgtattttgcaaaatttactgtgcaaaatagaaggacatatattttaagttgtcawtgttaattgtatctttttctggatgagcaataaataagtgctgttctgataacaatggtgacatgacataggataaagagcaggcatcaaaaaagcgagcatttcrtttaggtcactacgtccaaatagtaaacattttctctgaatcatactaaggtttccttgaaagtactgtccaataytcattaaatttctctacatttctttgatgtaacatgtactgaatgtgttttcacctttatttctacaattcaattatatcaagtgaattttagaatgtagacaaaagtgattgtgttttgtcattttaatatgttgtctgaagtwgctgaatacctgtgagatgttaacatttagtgtatattgggttctgtagccagagaagacttaaatctgattacagcaggattgatgggtcaggtaagaggctaaaaggtaaaaagtaaartactgaactaattgcagagagaagcagacttctaaatttcgtgtgatattttaaaagaataaaatgttgatttaaaaaagttaatgacaaggccaggcgccgtggctcatgcctgtaatcctagcactttgggaggccgaggtaggcagatcacgaggtcaggagattgagaccatcctggcgaacacggtgaaaccctgtctctactaaaaatacaaaaaattagccaggcrtggtggcaggcagctgtagtcccagctgctcaggaggccaaggcaggagaatggtgtgaacctgggaggcaaggcttgcagtgagctgagatcgtaccactgccctccagcctgggtgacagagcgagactccgtctcaaaaaaaaaaaaaaaagttaaccacaatgccacatagtaagaatatataaagaataataccatcttacaaatatcaatgtttcagttggttaatgctttcgttgattcatcaatcttgtattgaatattcaaggccttatatagggagctacatcataagtaatacaggcagttgttcaagtcctgaatgattatgaagattatagaattagtggagatgatgttaaggactacagtgtaactaaaggtattagagatattcaaattccataggtgtttcagaggaaagagaaattgctttacacaaaaacgtttttagaaaaagtggaatcggtgctgccttcctccttctgaggtgacctcagcatatttcaccaggatttcccccagccacccctaagaggactggtgcctacacttgtcattgggacatttatgggaaagctcactggtatgactctgcccagctttgtcctcctgaccrtggactgaacagggaactcaggtcactgggcattctacagaccaacccatcacctgaagcaccagagagcacatcttattaaagaaagatcaagctcatacccatctgattgtgccacaggcagctcttggctatcagagccaactgttagcctggaggttgagttcagacaagcaagtcaatatacaataatgacaatttcaattcaacaagatattactatcctaaaaatatatatgcatgcaacacaggagcacccatattcttaaaacaaatactactagacctaagaaaagagataaacagcaatgcaataatagcaaaagacttcaacacactartaacagcactagacagatcaacaaggcagaaaatcaacaaagaaactggaattatactagattctagacaaaatgtacctaacagacatttaccattcattctactcaaaaactttagaatatacacttttctcatctgtgcatggaacattctcccaaatagatactatgtttggccataaggcaagtttcaataaatttwaaaaatatgaaattgtattaagtatctctttggaccatagtgatataaagttagaaatcaataccaagaaaaactctcaaaactccacaaatgtggctgagyatggtgactcatgcctataatcacagttctttgggaggctgagctgagaggatcacttgtggccaggagttttagactagcaagaccccatcattttgtacttttttgtacamgaaaatttaaaaacagttagctgggcatggtggcacatgactgtagtcccaactacttgcgaagctgaggccagaggatcacttgagcacagaagattgaggctgcagtgagctaagatcatgccactgcattacagcctggatgacagcgtgaggatttgtttaaaaaaaaaagctattcaaatttatttatttatgaaaactaagcaacttgctgctgaatgatctttgagtaaatgacaatattaaggcagaaataaaaaaaagttaatgagttacactacaggcacaacataccaaaacacctgggatacagcaaaagcagccacaacaaacatcacactaaatggggaaaagttgaagcatttcccagaactagaacaagacaaaatacccattttcactactcctattcgatgtggtattggaagtcctagccattgcgaacagtcaagagaaagaaacaaaaggcatcaaagttggaaaagatgacataaggttatctctttctacagatgacataatcttatacctagaaaaccctaagcactcctccaaaagactcctaaacttgaaaatgatgacttcagggtacaaaatcaacatataaaaatcagtagcattttcataaaacaagatcattaaagctgagaacaaaatcaagaactcacccctaactatggaaatgctgttacactgttggtgggagtgtaaattagttcaaccattgtggaaaccagtgtggtgattccttagggatctagaaccagaaataccatttgacccagcaatcccattactaggtatatacccaaaggattataaatcattcyactataaagacacatgyacacgtatgtttattgcagcactgttcacaatagcaaatacttggaaccaacccaaatgcccatcaatgatagactggayaaagaaaatgtggcatatatacaccagggaatactgtgcagccataaaaaaggatgagttcatgacctttgcagggacatggatgaagctagaaacatcattctcagcaaactaacacagcaacagaaaaccaaacaccgcatgttctcactcataagtgggagtttaacaatgagaacacatggacacgaggaagggaacatcacacaccagagcctgtcaggggtggggggrctaagggagggatagcattaggagaaatacctaatgtagatggctggttgatgggtgtagcaaaccaccacggcatgtgtatgcttatgtaacaaacctgcacattctgcacatgtatcctagaactagagtataataaaaaaactcaatcctatttataatagccacaaaataaaataaaatgcataggaatacatttaaccaaggaaatgaaagagctcttcaatgtgtaccacaaaacactgctgaaattgtagatgacacaaatgaaaaaaacatcccacgctcactttttaaaaggatatattattaaaatgaccatactgcttaaagcaatttacagattcaaggcaattcctatcaaattaccaatgctattgttcatagaattagaaaaaaaaatcctaaaattcatatggaaccaaaaaagaacgtaaagagccagagaaatcataagcaaaaagaacaaagctggatgcatcacgttagctaactttaaattatattacaaggctattgtaaccaaaacagcattgtactgatatgagcatagacacatagatcaatgtaacagaatagagaatccagaaataaagccacatacctacaaccaactgactttcgtcaaaaaaaaaaaaaatgtacagtgggaaaggataccatatgtagtaaacggtgctgggaaaactgaatagccatgtgtggcagaattaaactggatctctaattcttaccatatgcagaattaactcacagtggattaaaggcttaaatgtaagacctgaaactataaaaatccccaaaggaaacctagaaaacactcttcaggacattggcctaggcaacaactttttgactaagatcgcaaaagcaaatgcaacaaaaataaaaatagacaaattggacttaatgaaatcaaaaagtttctgcacatctaattaaactagacaacatctgcccatcaaaagaaataattaacatagtaaatagacaatctccagaatgaaagagaatacttgcaaaccatgcatctgagaaagtacaaatatccagaatctaggataaattcaaacaactccagaaaagaaaatcaaataaacctattaaaaagtggccaaacgccataaatacacatttctcaaaataagacatacaagtgaccaacaaacatatgaaaaaatgctccacatcactcatcatcacagaaatgcaaatgaaaaccacagtgtgatacagtattacaccagtcacaatggctattctataaaaagttagaaaatagcagatgctagtgaggctatgaggaacaaggaatgcctatacactgttggtgggaatctaaattagtattgtctgtatggaaaacagtatggatatttctcaaagaactaaaaatagttgtaccattttacccagcaacctatctagatacctagatactactcctactgaaaaaacttcagaaaattgaagagggaggctcccccctgactctatgaagccaaaatcagcctgataccaaaatctggctacaacataacagaacactaaaacttcagaccaatatcccttgtgaacacaggatcaaaaatcctcaacaaaatactatcaaacttaatccaacaccacatcaaaaagataataaaccacaatcaagtgggctttattcatgaaatgcaaggcaggttcaacatacacaaatcaataaatgtgattcaccacataaacaattgaaaacaaatatatggtcatctcaatggatgcagaaaaatctttcaatacaatttaatatacatttatgacaaaaccctcaagaaactaggcatcaaaggggcatacctcaaaataataagagctatcataacctcaaaatgataagagctgtctgtgacaaacccatagccagtatcatactgaatgagtgaaagctggaagcattctcttgagaatcagaacaaggtaaggatatcaattccaaccactcctatcaacatagtcctggaaatccaagccagagcaatcagacaagaggaagaaagaaaaggcatccaaaaatgaaaagaatatgtcaacctatctctcttcactgacgatatgattctatacctagaaaaccctaaagactctaccaaaaggcttctagaactggtagatgacttcagtaaatttccaggatacaaaatgtatgtacaaaaattagtaatatttctataccartaatgttcaatctgagagccaaatcaagtacacaatccaatttataataatcataaataaaaaaataaatacctaggaatacagatagcccaataggtgaaagatttctacacagagaattacaaatcaatgctcaaagaagtcagagatgacaaaaataaagggaaaagcatttcatactcatggattaaagaaatcaatgttgttaaaatggcyatactgcctaaactaatttacagattccatgctattcctatcgaactaccatgacatttttcacagaattagaaaaatctattccaaaattcatataaaccaaaagagaacccagatagctgaaggaatcctaacccaagagaacaaagccagagaagtatcacactacctgacttcaagctatgctataaggctacactaaccaatacagcttggtactggtacaaaaacagacacatagaccaatagaacataatggagaacctagaaataaagctacaaatctgcaaccatctgctatttaacaaagctgagaaaagcaagaaatggagaaaggaccccctattcaatcaatgttgctggaatacctggatagccacaagctgaagaatgatactggactcctacctttcaccatatacagaaattaactcaggatggattaaagatttaaatgtaagacctcaaacaataagaatcctagaagaaaacctaggcaatacccttcttcacatccttgtacgcaaaaaattggggggctgcatccccaaaagcaattccaatagagacaaatattaacaagtggaactaatattgttgggatgtttgtctcctcaaaatttcatgttgaaatataatccccaatgtttaaggtggagcctagtggcaggtattgtcatgggcgtggatgcctcctgagaggcttagcactatccccttgatgatgagtgaattcttgttctgttagttcatgcatgatctggttgttttaaaatgtataacatctcttccttctctctcttcctttcactctcacgatgtgacaatcctgccccttcttcacttttcaccatgactgaaagcttcctgagccctcagcagaagctgagcagattctggaaccatgcttcttcttgtatagcttgtaaaatcatgagccagttaatcctcttttctttataaattatccacccttaagtatttctttatagtgacacaaagccaactaacacagggaccttactaaactaaagaacttctgcacagcaaaataaattatcaataagcagtctacagaataagagaaactcaacccctttccttcaaaaacccaatccctttccttcaaactttagccctagttagattaggatctctgacayatttaactgaaagagtcctaaataatacgatacatttagattctttgatagcaaggcagaaaatatatagcactaattatatgattgcttgagtttttaaacacaactgcatgtcctgctcatcttgtgagaatagatgctcataaaagcaagttatccagctggtgagccaatggctaagtcttggatagttttctgaatgtcagtacatgatgatacatcttttcagttaaatttaatttgccttcacaataaaaattgaaaaccattgaaattttctgcatttgctcagtatgttgtttctgattaattttattgatggtttaacttggcattcaaatttctaatcaaatggattttcaaagtcctgttaattaaaataacagcctttacaatgtagcatggaaatatagatgcaaaaaaatacatttgagtgtcttattgttaayagaaggccacatatatattttaatatatctactgtaatcctcattaagattactctcagcaagctacagttcatcatatcaaatggtaatgtaatgcacagtgattactgtttctaattctacactgttctttatggccttatcatttctattttattgcagttgttaagcaggacaagaatatgatatgcaagctagtgttttgctaagccatttcacagtacacgcttagttgcaataataattcattttatatggtcttagtatatattatgaagctatttcccagaatgaaaatgttgttgatatataaaacaaaattatgctttaaattgttatgcaacaagaaataatggatgaagtctgatttgattagcaaccatatcatttacatatgtatcttaagggaagttagttttaaaattgcatatttataatgtggtttcctaggaaatgtgataacagatataaagaagttaagatatgatactctttttgtttctaaaaatctttttagaatttcaggagataaattatttagggttatagtattaaactgatatatttataataatagccacttatatttttagcttattaactattagtaattattcaatattttattaattaaatgaatggatttctacctgcaagaaataagtttcaactatttgagaataagtttttcaacttcagataatataacatgatttaaaaaatacatatagaattaagaatacattcttcaaaggttaacttacacacaattaatataatttcaaaatgctttgccttggagcaaaacggaagtcaatatataaaaagccataccgttgatgctaatattttagactcagttttgtcattcaccctttttgaacctcagcattctattctacatgacagcattagcttaaatctactctgattctttttttcctcttaaccttttataaaaccaatacatatactctcagaagaagcaattgaatctactagaatgttttggatttggagagctttgataattcagatggtgcaataatatttaatatttggaataatcagagtttggagtgagaaactaccttcacatctcttcagtccagtctctttaccccagatgaaacatcgtttctcaggaagttcaccagaagctatcaaaaggttgtctccacacctggatttaaagcattggtaagtttgtatgcttttttctcacaattaatttttgtctttatcctatttctgyatcttcagtaaaatttagtgggctaataagaaaaaattcaagatttaaaatatgtatgcttattaacaatatttaattacttattttatccacacatttaaattcatagattgttctctaattcgttatctaagaggaagcatgtgggagagcaaaatgaagttgccttcatgtcttgctggcttttcccagcaaaatgtctaagttcaaaaggacctcaaaatgtgtgcagagtgataaaatgaaggggatataagagcacaatatcttgaaaacacatgaagggcaaaaaatgatcatgaaattgaaaggatattagtctgactggttaagaagagaaaaataagaggaaatattctaaaggtctttaatataaaggtagcgtatgttgtgcttagcatcactgtgagagattgatgaggtcagaagggaaattcctatgtaacacaattgaacatggaggattataggtagtgtcagagaaaactcctcctgtgccctaatcatgacacagaactagcaggttattttcaaactataagtggttatgagcacaggagtaagatagaacagggataatgggcattcgagccacaacctttgttgatctgtgactaaagctcagatgtagcctttcctcattagtaatgtgctgaattatcttaggataatgcaataaaacaggacaaggaagaatgagagcactaatttagaacttgagttaaataaaattttacttgttaatgctgctgttcttgctcaactgaatccgtrgactaagattcattctcattaaatttgatttaatgttacacaagagaatgaaatggataattgggtaactttcccttatgtatctgatagagaagattcaagaatttcctgatgagctacaatttaaaaaacacaaaatatatgcaactatatgcatgaatctccagaacataattctcaacaaaaaatgcattagaagtttatgtttataccctgtgattttatttatataaatgtaaacacaagctgtggtcttaaatgacaatattgcagctactttgggtgtagagtagtgtctgggaaggggcatgtcagaggcttttggttgtctcactaatattgcttattcatctgaatattgattttgtgttttttgtaaagaaaattgtaattaattaatayagtggtgtaataatctgcatatatttctgcttgccgtctatattttgatgaatatctatgtaaaatgtattctgtgtatttccaagtattgtttactctaagaattcaaatgtgttataatttcagaatatctttatatgtaaatcggtacagtaataaattagaatagaaacaccatagaattatagtagtttaatcaaaactccaaatgaaaaatagaaaaaagctatgtaagatggaaaactttactagaaactaacatcaatatttgtccaaaatgtaacttaatttattaaaaggataaatttatatatattgatttatatagatgtaaaatataatatatacacagtatataaatattatgcaaaataatatatayacacatgcaggtgaatttcactattcatagtagttatgttctataaattcaccaaaaacactgacttagagaatactaagcccctatggaaaatacagggttagtgtcctgtgcactctggctacacattttcatcaaccaatcaacacataacattgttttatgagtgcttcagtctaaagacaccttatttaataattattgttgattcattaacattgaactcacagccaatacactatcatttgtgcttgaacagagatcatctaatacacctgatttctccatgtagcagatcacagtcttcttgcactcaggagtactagaaagcaattcagcactaggctgagggggagaagcatttgaaggtgtaaagtcactagtgaaaaccaaatagtgcaaagaacactgcacaaagagagctcagaaatgtcactgattaggatatgagaattgaaacaagaagacagaaagttaccttgttctaccttaggtgttgtatatcaggcaaatcaaattttttgctgctctgtgaatgttcgcaaatgatggcaaaagcacctcaagtattaatttcaggattacaaataagctttagctcataggggaatttacaaatatggactctgtgaataatgagaatcaactgcagttagtttaagcagttgtgaaaaattgaaggccaacaccacatcaggtgtaaaaaatatcaaattaccaaattttaaatgtttaattttcttctaatattttaatgaatgtcaacatataatcaaccaatttggaattgctgttggtgagttgctagagaaacatgaatatttggaaatttattcaactcaaaatttttttccaagacagacaatttaggagagcaattaaaattatttgcaagagtgagagtggcaacctgcacttcagtatactgtaccaatgtggtcatttttttccccagctcatcactgccccctaggtgaaatgaactgttaataattcaagaaagcttttaaaatcatttaaggcatttcggtttgtacttgtaatcattaagaacaatttcagtctctctgctcttctggttcgacagacagctgcatcttctcatgcaccaccagcctcttccctgagacaccatggtgaaggtgaakgccagagycaacggattggactatattgggcacccggtcactagggctgcttttaattctggtaaagtggatattgtcaccatcaatgaccccttcattgacctcaacaacatagtctacatgatctagtatgattccacccatggcaaattccatggtacagtcaaggctgagaatggaaagctcgtcttcaatggaaatcccatcatcatcttccaggaccaagatcctaccaaaatccaatggggtgatgttggcactaaatgtgttgtggagtccgccagtgtcttcaccgccatggagaaggctggggctcatttgcagggggagccaaaaaggtcatcatctctgccgcctctagtgatgaccccgtgtttgtgatgggcgtgaactatgagaagtatgacaacagcctcaagattgtcagcaatacctcctgcaccaccaactgcttagcacccctggccaaggtcatccatgacaactgtcattgtggagggactcatgaccacatttcatgtagtcactgccacccaaaagactgtggatggcctttccaggaaactgtggcatgaaggccgtggagctctaaagaacatcatccctgcatctactggcactgtcaagaacaggggcaaggtcaccctgagctgaatgggaagctcactggcatggccttctgtgtctctaccgccaaactgtcagtcgtggacctgacctgctgtttgggaaaaactgccaaatatgatggcatcgagaaggtggtggggcaggcatcggagggcccgctcaagggcatcctgggctacactgagcaccaggttgtctcctccgaattcaacagcaacacccactcttctgctttcaatgtcaatgagggyaatgacattgccctcaacaaccactttgtcaagcttatttcctggtatgacaatgaatttggcaacagcaacagggtgatagacctcatggtccacttgacctccaaagagtaagacccccagaccaccagccccagggagagcacaagatacaaaaagaggccctcagctgctggggagtccctgccacattcagtcccccaccacactgagaatctcccctcctcacagtttccatgcagaccctttgaagagggaggggcctagggagcctcaccttgtcatgtaccatcaataaagtcccctgtgctcagccaaacaaacaaagagaacaatttcagctgcaaataaaagaaaatagagaacaaaatttcctcatattatttagatgttgggaggtaggtccttaccattataagttatttctgattttaaaatatcatcaaaacctcaggtgtatgttttgtatgttgtcattttctgtatgccagagttaccataatagttctaggagtttcagacacatcgaggcatcaattcaattttttaaaaatctccaaaggaagaagaaatgttgtgtttatatagtcttatctgaaccctgtaaacaacttcttctaacgtgtgtttgttcataactgtgccacatgctcatggcaaaacaggcacaggcaaagagaatagcatacttatggggttgtgggcttcttctgtgaaacacacaacagagtgaagaagaatgcaaatctgaatgaattttgaaattctgtaaggacataggatgggaaagtggatgcttagtaagcaataaataacgtacactacagaatcataactaacacttcattaaatgacactattggcttagaaagatgaaatgttacgatttaaaatacaatgttttttaagtatttcagttatttttaccagctgtgtttatttttcagtgtttttcttttattttattcaagtgaaagtttttgttatattcacatgaaagttgtatttgaaaaagttttctgtactactcttttaacatcaactttatttagaactcagtgccttaggggacatttatttttaaagaggagaagcccattcaactgagcttaggttaaaaatggacttctgtttgatttttatattcatataaaggatttttattaggcaatatagtctcaaagatgctgcatgtattatttggaaggggaacaggttgaggaattagttctgaaaatcattttatgattaaatacgtcactctaaagaaaataacaaaatgcaaggtaccatcataaaataaagaatgcccaaaaattgtaataataaaattatcagaatatgaacagggctagaaaaaaaagacttaatagaacaaaatagaaagcagaaccaacctatacatatatgtagaaatttcatcatttgtatggtggtatttcaaatttgtggaatctagatcagtcaatttgaataaaaaatactggctgaattccagatggaaatcctggactgtccacttaatattttcattctaataggcatcttaacatcacaagttcaaaacagagttcacgatttctttcaatctatcctttcccattttaatatataacaaaactctctacttgattactcaaaatacaaatctaagggtcttcctagattcttatcttttccgcatttcaaacattaggtaaacgaattacattgaaagagataactgttgtcatttaaaaatgaagtatatcaataaaattgtttatggtagcccctgcttagccatgggggacacatttcaagaccccccagtggctgcctgaaaccaaaaataataccaaatttaatgtatactacatatactatgtttcttcatataatgcatatctgaaaaagtttaatttgtaaattaggcacagtaagaaattaaccataactaatgataagatagaataattataacaatatacagcaatgagagctacatgaatctagtctctttctctctcaaaatattttattgtactgtcttcaccattcttctcttaatctgtcaatctgatcaccaagaggactgctgagtgactcgtgggcaggtagcatggacagcgtggatatgctgggcaaaagaatgattcactaagtgactaaggggcgggagccagacagtgagctttctgatgaacagcgggcaatttaaaacttatgaactgttggctgggcacagtgggtcacgcctgtaatcccagtatgttgggaggccgaggcgggtggatcacttgaggtcaggagttcgagaccagcctggccaatatggtgaagccccgtctctattaaaaatacaaaaattatcctggcatggtggctcacacctgtaatcccaactactctggaagcaaagaatcgcttgaacccgggaagcggaagttgcagtgagccgagattgygccactgcactccagcctgagtgtcacagtgagactctgtctcaaaataaacaaataaataaatgaataaatcatgagttgtttacttctgggattttccatttaatattactaaccgtggttgaccaggggcaacagaagccgtggataatgggggctattgtacacaaaaattaccatgatagagttttacgcagtacaaatgaaaaacaaaataacacaattccatttacacgtagttttatgtagaaagtctttaaataattgtgactagaattaaatacagtagattactattagtaattatttgtgatgtgacagatgtgttactatatacttagtttatcactttctcttcctagacccacaagaagttatttctcagcctttcttgcagtttccatgtacttgggccctacacaagatgtgggatgaaagcagtgaaagacatttccactactggtcctcttaaaaattctaatacaaacttccagtaatgaccttggagaccctatgttccagattgagaagttaaaagatagacaaggactacatagcctacatcaagttttgggtgagtgagaaataaatattgattatgttaagacattgattaatatatcttagaagtaggataatgagagtatttatttcctgtgttatatattattaaattccatgttgtaacaaacaaacccacaaaccacagtgactgtattgttccaccatacagtgtattttttattatggttaacaaaacatataacgtgagatctacccatttagcaaaattttaaggttacagtaccatactgttagctataagcacagttttacaacatatccctagaactattttatcttgcgtgactgaaattttatacccattgaagagcaaatccctatttccctctcctcccagtccctggcaaccactgtcctcctttctgcttctgtgagcttgattactttagatatctcatagaaaatttagtatatgcatataacagtatactagtcagtcataaaagaagaaaacctgtcacatgcaacaacacgcatgaatcttgaggatgctatgctaagtgaaataagccagtgcattttttaaaaaaaactttctgttggatctctgtagatgaaagccccaaaaaatacacctaaaagttatttgtttccatttatatgtatattcatcctatatttgttattttatttatctattctttgaaatacttatattttatttttcactaaattgtacagattctgcctctaacattacttatcactgttgaatctttctctcctctgcatttcaatctctaccatttttgttgagcttctaatcttctattgtctgaacttatgcaaaagccttgttcccagtttctgtctgtgcacatgcatcacctataactgagaccagattgattactatggaaagcaaatcagcttatgtcacctattcgtttaaagagtttatttgactcccaagttttcatagtatattttaaaaatcttcataatttattctcagtctacttttgtgccttcatctcaataccaagtttaaatgtcactgtttctttcaagtcttttctcattaacaaaaataattattttcgttctttctaactgcatataaactatagctttaccatagagtttgtaatattgttataattatttttctttctgccggtttattgaatggaaacaatgaaagtgtcttatttatcagtttactagttacagtgtaggcacttaggtattaaaaagtgtgtgctgtttacctatgtaacaaacctgcacatcctgcacatgtaccctggaacttaaaataaaagttgatgaaaaataaaataaaatattcttatggcaagtaaaaaaaaagtgtgtgttagacaagtcgttgaattcttcattcactctagaagttccctttttattttgaaataaattcaaggatgttctagtgttttaccaccagccccattattaataaattttgtaatgcagtgtgtcatattagttatttgctttgactaagtgaatatgttacagaattcttattcattgagttaaatttaatttatagtttaactgtgcctatgacaatgtcttattaaaacttacataatgtaaaagaaaaaacctaggtttgtactttcttgaccaagaaaactaaaacgtgcatttataagcataatgttgaactatttttattggaaaaaataaaatcgtatatatcttacaagtagtgaaacaaggttaattcattcttatctgccatactgtccccctcacaatttattactcataaggcatttatatcatttgcttccctgtaatttctctacttgacaacatataataataacaactataataaaattatctgtttccatactaaggtatattaacttctaccttccatgttctgtggaatctcatgccaaaggcttttttgagcaattgggtcttgactgctgcagcttgatgatagattcaacacgatctaatgaagaatgacagctggaaatcagagacagtgtgcaatatagaaaccatctttttctcaatgtcaccatgaattatttatgtaactcaaaatattttatttcacgttcaaaataaataaatctgctttaaaaacaagtttaataagcttattgtatattgtagttatctgacacatttgggtatttatttacgtgtgtaattatcatgaaaatctgagagacgatttattttctagaaattaagcccactgcaatgaaatctccttttaggtgttctaatagttttccttataaacatcttattaccttgcattgatatgttatatcaaattttgaaatgggcatcatcttctaattttattggagcactaaatactctagccactgaaaacaatttatgagaggatttcttttaaaattctgtaaggctgatgcatctaattatctcagcttctttcttttaaaaatgtatttgacacaaagagaaaaaatgaataaaaatgtatatgaaagacaaagacaggtgtcatattttctttactcagaaaaaataacttaaaatgcaaggcaatatcagttaatttagagaaaaggaaggatgaatttagtcaataattagctattttgcctaatgtctttcttatcattgtttaaggcaatatttacctctgcctttagcaatcttagtttcaggaaaaaagagagatacctttacatttatgaaaaatataaattccaatccatttcaagaagctaaatatatgattatccctcacaggtatacattaaaaatttgaaattctgacaattaaaaataaatattagctacatgtcttacgttttgtcggtctgaatatttatgatatgatttttttaatccaatatgcttgtaataaaattgtccattatgtgtaattcggggaacctaagacttccactgtatttttcattcttgttctttttggaaatgactggataaagccttcacattacccaaagctctctggttacacatagccctgacagtgagatatcgacttcgtctctcctgtaattcatctgttgtagtctcaggcacagtttccatcatgtttttgctgccttctttgggaggcttaatgctgttcctggagtcagtggctgattgttccaccatggccttaggaat

SEQ ID NO: 93718 - DNA, 22260 bp, Homo sapiens
gagaaaagaggcagagagaggcagattcaggcagagaggcctggggacagcaggggaacaggtgcaggggtagtagccaggctattccaggcagacctcaggcagacagcctaggcacgagaggaccctagatcttgggggcccccagagggaggcagggagggcatttgtggctgggtggggaatgtggactgtgaactcacactgtccgcaaactgggcgggcactgtagtcctggaccccaccccaagcgtggggtggggcttgtccaagccctgagaagtcccactatctgtctgtccgtctgtcttctatgggagtccgtctgttcactcccctccaggcatatgacaggcatgcctgtcccaggcaagccacgtgtccgctacaggatgtcaggcagggtggacttggggtctgggaccacctcgactgggctgcttgaagcccaggtggacaagaggcctctgtctgggcccctcgcccgcctgcccacccccgacagggaacacagaattcccggaaaggccaggagctggctggggcttcaaagctggcctagatgccctcaccccacccacagttggaggaggacaagggatggggcgtttacttccccacagcgggagagagactcctgcacactcaggaatcgcagctacacaacaggacccatcacagccccatcaaggggctcagatacgggggccaactcgccatcactcacagaggtgcacaaagactcacagccacacaagagaataaagactgacagacatgaacacacacagactcaccactgcacgttaagagcaatggctcatgggacagtcacacacgtggccacacagagtgacgatagtcttacagctatcaataccgacaggctcagagccgctcacagagagcacagactaacacagggataggcttgtgccgatttccagacactcgagactcctgaacctcaccgcccgtggacccacagccatgccaaagacaatcaacaggcaaatcacacacacagattcacagccacacacagagcacacaattacacacagctgatgacattgtgtgtgggtcctgggtctttcccacacacacgatccaggttcagatggccctggatctgaacctgaatccaggttcagatgaccctggaggcaaacttccaggttcaagccctaaaatgatatctctgtgtatgtgaacttgaatgtgcacttgtgaccacatgtaaccacatacagctccagtcacagagagaggcactcataggctgacatgatttttgtacaaacagaaaagccatagtctccttctctctctctctcctctctctctctctctcacacacacacacacacacaactgcatttcagcaaatggctgcacacagccgtgtacacacacagctagtcacaaatcaagtcagaaaagaaacatatagggaaagcatatacctgcacacaaacacaaagcacaggaatgcagagtacgcttactatcgttgcaaagaaaaaatccagaaaccacactgaaagctacacaaggaaaaaacaagagaaccagatagtactcataccatggcaccagaagaaacaccccgagggcacacatacctgcagccactcgctaagaagagacacaaatacagcagcagacacacaaagaaagatacgtgcgcatagatacacatataggagggacaagtactctgacacacttgtcacccacgaccattacaaaggagacaaacacccaagcaacacacacacacaacaacatatagatgaactgcaccgacagacagtaccaatgcacacggttgccaaaaaaaaaaaaaaaaaaaaggtatgagttgggccgggtgcagtggttcatgcctgtaatcccagcactttgggaggccaaggtgagtgaatcatgaggtcagtagttcgagaccagcctggccaacgtggcgaaaccccgtctctactaaaaatacaaaaaaaattagctgggcgtggtggcgggttcctgtaatcccagctactcgggaggctgaggcaagagaattgcttgaacctggaaggcggaggttgcagtgagccaagatcgcgccactgcactccggcccaagcgacagagtgagactccatctcaaaaaaaaaaaaaaaaaaaagcacaagtttggcaggcggccatagacagaacgcagcaccaggcaagttacataggaagacgcaggcacagctcacatacgtgtggctgtggctgagaacgggcaggtgagatacactcagcatattcacacacacgtgcgcacacactcctgcccaacctcctccagcctctgtctcctttcctatctactctgatttctctctcccctcatacccctcccccacccagagccattacacatctgtgctaccagctggccagggaaagagacacctgtcactagaggctttgacccagatggctaaaggtcggggggtgggggggatgcaggtatccatatttcaagtctgaagtgtcccgtccaaataactagcatactttatttggatttaaaaaaaaaaaaaaaagacaacccccctcccctctgcatccattcgccgcctccctgccacagcctcctgctctgattgctccccttccctcccagggcctgcctctactggccttccaacatggaccaacacagggctaccaggcacacagcaggcgctcaacaaaggccacttatctaatgtcgtattattatcattacttttatttctgccaaaggaactcttctacgggagagatgaacctccatccagctctgagaacccgacagctctgctaagtttcagggcactgcagatagcaggtgctcaacataagccggtatggcagcgggaaaacaaagggaatgtgtgatctggctgcttagaggaatttgctttagaaggaacagatgtctttaagcaggaccgaggccttgaggctgtgccagggataagaacactttgttagttcatcaaagtagggctccttctcagggtcatttaaggtttctgttggttcagtaaaccagacccttgtgtgacacatgggagtcccgtgaaatctgttaaaagtcactttgggttatcatcagttctaaggagacatttgatgaaaacagctcacttcccggtagcatccaggggagggagggacacagtgaagcagttaacagcaaaagctttctcagctctgccacttattagctgtgtggctaaacaagcaaattcctaaacctcactgagtctcagcttcctcaagggcctaataacgcctaactcattgggctatcgagacaattgaattaattaacacaggcagagcacttaagacaatgctttacacatagttattgctcaatacatatttgtgggaggaattaatgatttcttctctgcgaaagcaaagtcccacttgctgggctgcatatgggattccaatctgtcctttcatgcaggctccccacggagtaactctttccagtcacttcctttcctcaaagcagcccctgggcagcaaagtcctagtcccctgcccctgggccacccccctcgttccctcacactgctaagatgcccccaccgggaaagagctggcctggcagctcccccttccttgacccctccaggaggccaagggaaggacacctttacactcagtggggtgccgggtgggagctgcaggccgacaccctacttcgggaagagcctggagagttcagagcctggctcctgtcccccaaacccccggtcctgctggaggaagcaagtttctttgctaaaagttaaacatcctcttcgtgagcgacaagaaaacaggacgtgggaagcgtcccacagggtgaacatgggcccccaatgcctggcaccccctcctctcttgtggagcggaggcctggtggctcgaacccttcctttctcacactcgctcgcctctgcaggggagtcatgttcccacagtcccacaatgcccttgagttctgctgacaaagctctggcttcttccctggttctcagagtctctacgcctccacccagggctccatagaaatgcaggacgcaccactggggaaaaaattaaggaacgaagcaacaaaaggatgaattcaaccaacatttattgaacaccaactgtgcgccacccctgttccaggcactgggaggcagcagtgaacatgacagaacaggaatccctgcctggtgaagctcgtgtgctaaggaatcaatcattctgttttttttttttttcttgagacagggtctcactctgtcgcccaagctggagtgcagtagcacgatgtcggctcactgcaacctccacctcccaggttcaagtgatcctcccaccttggcctcctgagtagctgggactagaggtgcgcatcaccacgcccagctaatttttgtatttttagtagagacggggttgcactatgttggccaggctggtctccaactcctgacctcaagtgatccccccgcctcgccctcccaaagttctgggattataggcgtgagccactgcatccagcccttttattttttaaagagacatgggttctcgctatgttgcccagactagattcaaacccctgggctccagggatcctcccacctcagcctctggagtagctgggactaaaggcacatgccgccgcccctggctaatactcatatgcatgttgccaggattaaaatgaatgaacaaagggaaggacatgctggagccaacttatacaggttgggaggagctgttcaattttcagaaattttgcaaactggttgttaaacagctggtttaacaactggttttgtttgtttgttgagacagggtctcactctgtcacccacagtggagtgcagtggcaagatcaaggctcactgcagccttgacctcccaggctcatgcaatcctcccacctcagcctcccaagtagctggaactactcgcacacaccaccacgcccggctatttttattatttgtagagacggggatctcaccatattgcccaggctggtcttgaagtcctggactcaagcgatccttccacctcagccccctaaagttaaacagctatggttaaaaatgaaatgatataaacttactcaaaactggtaacttcctaattttaccacattccactattctctatgctcttgaggtcatttacccccattttatctgtatggtaaaaataatacatgatagtgcactactgcatctcttttaaactccctgttcagtgaccacaggtcggtaccttgaaatctaacaagaagattgtacctaagccatggaaattggtaaatgctagaaaccagcctcccttccccccacccctccccgccaccacccccgccccagccagtggttaaccatttaccagcacaccactgagggcatttagagcctagcacatggtaaacactatgataaacgttttcattatttttccgtttgtccactgggtcaggatgtatagtctttttttgtgtctgggatggaatttaaaatatttgaagatcacagaattacaaaagcccagagagtggctaagctacacctatttaaccctcccaataatgctgttaagtctatactattgattatccccactttccagacagggaaactgaagttctgaggcagtaaaactcaggcagcgccatgcattagctgtagtgcgatctgaaattgcagccgagcagcctccgcgcgctcgcgcacttcaagaacgcattttccttactgtcacgtttatgccccgagtggtaatttcgcttcccggcacgcgaaaaatgaatgggcgccatcttgcgcgtggcatcttgggaaatgtagtttacaggctcaataacaagcacggtccaagaagggaggggcgggggagcaaatcgatcttggcctcggaagaaaaagaacaaagaatcgctggcaacttgcgcgtcgcgtcgctgcagccacgcagtgcgtggattcagccgctttggccgtgcccgttgcatgccgggaaacgcagttcgcgagccccggatacgtcgacaatagatgacggggctcacgttgtacgttcacatcaggtcccggcccgccggaacctgggcgatccacgatgccgagtttgccacgctgcgacagcccataggcttgcccccccgggcattcgggtggactacgaacacaaactgaagccctaggacttgtcgcccgtttgcgctctcgccgaggcacaggctgctcgcggaccaccctgctccgaaaactaaggtgggccctggggcgcggaggacaggaatgcgggcggaggctattgaggcacgcctgcactgtcccgcctgcggggaaaggagggaggtccgccctgggcgccgtagctgtgtatggttcgggcggctggcaccgggtgggttctagacccaaggtttgtctgcagaaggggaccagtagacggggtggattcgaggtggggacatgggacgcagcggtcggagccgcctggaggggtacccggtggtcccgatggagctatcatctttgaggtattgatgaggagggacggggagtgtggtcagaaggctgttttgggaggttgggtggagcgtgagggtggggtgttactggggaatcaatgggggctaataagaatattttagtcgaactgttgttcattgattgattaatgaggggatggcagagtaagcaactagaatataacgagtgatggatgggaaaatgatcccccaggtattgatggaggtatgatattcaacgggttaatggaaagtgatggggcatcgtaatggcaaggatgatggtgrggttgtggggggaataatagatggatggaggtcatgatcaaggggccttggtgaaagaaaagataatgagaggctgatggtgttgtagtcagagtcagtagttgggctatggtggcatgaccgtcgaggaattaggggacagagtgagtaaagagagggcaatagtaaactagggttgggggggttaacttctgttgatacatagtaggtgaatagtaaactgttggagtgtgatcatccagtgatggatccatggagagcagggtggacagtgaggggagaatggggaactgatgtgtgatcagttaacgtgtttgttaatgaaagagttacagggcaggaggctagtgctgtgatctatgaagggtctattggagaaaactgagttaatgggggctgataaatcagtaattgaatgcttaatggggagctaatagaccatgattctccaggcattgttagaggttcataaggatgtagtaataaaggggcctaatcatctaagggattaatggcgaatggggtgaaacgagagagatatagggagtgggaggtacaatgaagtagtattaggataaaggtggaaaacaagggattaatgggggctaataggactatatgaatctaggggcaatggggacaactggggatacagtcagtgagattttaatgggcatgacatgagcagagaagggttgatagtggcagttgcagggtttaatgtgtggagtgtgggtgacagtgatgggaggtggacaggttcacaagtgggccatctatgggatgaatgttgggtttatggggtcttttgtgggaactgtggggtaagtgatgggggcgaggagggtctgtgtgataagcagtggagcctgagagttcagtgattgggtccttcaggccctataaggtcagtggggtcagtgccagggcttcagtcagcccatcttctgtgtgagctgtcatgtgggtcagatgagcccagtttagtttgtgtggttctctccgccctacagagrtaggtggtagcccattcatctggttactgatactggccggcatcagtggactgtcggcaggtccttgagcaactggtgtgtgaaatgggacggacgtcaaaggacaagcgggatgtctactaccgcctggccaaggagaatggctggcgtgctcgcagcgccttcaaactgctacaactggataaggaattccaactcttccaaggtccctgactggtgggcaggtcactgggcggtgaggtgggcacaggaggtaaacaagtaggctgggtctgcagagctccctgtggtaggtgggctgactcagagggtctctggggcagggagacaggcaggaagataggcagaataccggagaggagttgggcacctgggcaatggagatatgtgggtgctccccaggggagaggggtgaattttgcaagggtctccaggttggagaagtgggtgcagctgatcaggatgctttcactatgtatgcccaggcgtgacacgggcagttgacctgtgtgcagccccaggcagctggagccaggtgctgagccagaagatcgggtaagtgtgggggtcccagatgggagacccaggagggcyggctgggtgggaggggcccrggagcgaaactaggctgatgtgggccatgttgtccacaggggccaagggtccggccacgtggtggctgtggacctgcaggctatggctccactaccaggtgtggtacagatccagggggacatcacccaggtaagagcatggctgagggtgttggggtatatcctgggtgaaggcccttacctggggtctatgcagagtggaagagaaacagagaggtgatagaaacagagagagaaagagagtgagagagtaaccatggagaaacagycagcaggtcatcattgcacagacacagcagaaaatgatgatgctgggtccccagaggtggagcccagtcttagagaggcaaagcctgggaatttggctgacccaggggctgtgggccaggaccatgggcaggcgggatctgagggcagcagtggagggccgtggggccactcatcctccctctctccatagctgtccactgccaaggagatcatccagcactttaagggctgccctgcggacctagtggtgtgtgacggggctcctgatggtaaatagcaacagaaagtgggaggccaggcggggccccctgtgtgtgtccttctctgtatctcccaccttggttgacttattcacctcttcagttactcyctgcctctcccttcygcactcagctttctcccacatctggcaacttctccctacctctgctgcctgttctctctctgcctctctcttcctcccacttgcaccccaccctttgagtttcatgtctgttgtctacctttccctgctctcatctctctgcaactgtccaattccgttgcactgttcattcattttcagccagccagccattcaacacacatttactgagcacctattgtgttgggaaaacattcatgaataaaattccattaatctttaacctcatggagctgatgttctagtgggagcaaatgggaaagaaaataaatgattcagctctgtaccattaaaaggggatggggccaggcatggtggcttccacctgtaatcccagtgctttgggaggatgaggtgagaggaacacttgaggcaggagtttgagaccagccttgcaacatagcaagaccctgtcttaaaatattagctggcatggtgatgcatgcccatagtcccagttactcaggaggctgaggtgggaggatcacttgagcccaagaggtcgaggttacagtacactttgatcgcaccactgcactccagcctgggcaacagagtgagaccctctctctaaaaaaacggggtgaggaggccgggcacagtggctcacgcctgtaatcccagcactttgggaggctgaggtggtcagatcacctgaggtcaggagttcgagaccagcctgaccaatatgatgaaaccccatctctactaaaaatacaaaaattagccaggtgtggtggcatgtgcctgtaatcccagctacttgggaggctaagacagaagaatcgcttgaacccgggaggcggaggttgcagtgagctgagatcgcaccattgcactccagcctgagcaacaagagcgaaactccgtctcaaaaaaaaaaggtggggtgggggatgggtaccatagggaaatcattgagcaggaggaaagcaggagtacctgttggaattttaaatcaagtggatggggaaggcctcactgacttaacagcagagactaaaggaggtgggggagtaagctatggatatgtctggaggaagagcaatccaggaaaaattgcagcccgtgcaaaggtcctgaggcaggagggtgcttgctatgtatgagtaatgacaagcagatcactgtggttggaacagagtgagggggggagagtggtaaaaggtaacatcagagaggtaacaggggacagatcctatagggcctcgtgggccatggtgaggctgttggcattttcaccgagatgagagcttggagaaaaccatgagagggttgtgaggagaagaggactgtgctgggcttgggctactatgagctgtgtgagggccaagggcagaagcaggggctccggggtggagtagtccaggcaagtgataatgggtgagggcagtggtggagaggagaagatcaagtcagatcttttgaaagtagatgtgttaatggcttcgatgtgggtgtgaggagaggatgcggggggagcatcagaggtgactaaggttttggatttgaacaattagaaagctcagatgagatggggaggatggtgggaggagcaggtttggggaggtaggtcaggagtttggttgtggatgtattggagatgtagaatctgatttgtgaatctggagttcagaggaacagtctgggctggaggtggaaatgwtaatgatgcttgtgtgtgaggttgttttagaattgaaatgagttcctaagggttaggagctcagaatatgcatccagttggcagacagtaatttgcatctggaaccttagcagtaagacagcctggaaaatgtatttagtgtctgatctgtgtggtacaagaagatgcacagagccagatgggacccccctaacgctgttcctcttgccacagtaaccggtctccatgatgttgatgagtatatgcaggcccagctcctcytagctgtgagtaaccctggccacccctgacccactttggccccctcctggctgtctccacctcagcctcagccrtctgtcctgcccacaggctctgaacattgctacacatgtcctgaagccagggggctgctttgtggccaaggtaagtctcaaggaacttggtggagtagagggaggtcgctgagggccaccctcacccgctgtctttgccttctcaccctgcagatattccgaggccgggatgtgacgctyctctacagccagctgcaggtcttcttctccagcgtgctgtgtgccaagcccaggagcagccggaactctagcatcggtcagtggggtggaggggccaggcaggcagagggggatctctgggacgccgactgcacgaggargaagyggcagtcatgcctcactccaccttccyctggcagaggccttcgctgtctgtcagggctatgaccctcccgagggcttcatcccggacctgagcaaacccctgctggaccattcttacggtgagagctggagcatgggccaccctgggggactctgccacaccttatgcaatctaggtcccatgagggcccacagtctcaccccctgggggaggctctgtcccctcatgggaatttttttcccaaggggatccttagccccattctctgatggaaatcccacccctttatgggtattttgtcccgggaggagcttcagcccaggcagtcctctagtggtaactcttgggcctggtgaaaattccatcccaggaggatcctgagccctgccccagtggagactccacctgcctaaggacattctctcctaggaagatctcagtcatgtcccaggtggaaacctcctcggtgtgaaacttttgccccttaagcctctagcaggaagagacagagcctgcccctgggatgacatttgagtgagggagacgtcatccaggcagcatataatccaatatcaggtggacataaatgcagtgaaaaatagcagggcaccgatgttttagaaggggtgattatggagggcctccccgaggaggtgatctgaaccaaatgaaggatttctggtggggtgggaagagagtagctggtggatatgtggggagggtttggcagccataccgccgcctgtgtcatgactggccccaggcatcctgaccttgtcctcagttgtctccccctgttcctaagacccagatttcaaccagctggatggtcccacccgcatcattgtgccttttgtgacctgtggggacctgagctcctatgattcggaccgcagttacccactggacgtgagtgcccaaccaacagtaggtgggtgggagggaggctgtcctaggttaccaggtcctcaccatctccctacccctctgtccctgcagctagagggcggctcagagtacaagtacactccacccacacagccccccatctcgccaccataccaggaggcctgcacgttgaagaggaaggggcagctggccaaggagatccgcccccaggactgccccatcagcagagtggacacgtttccccagcccctggccgcccctcagtgccacaccctgctggcccctgaggtctggaaatgtgactctcagcctgccttgaccyyttccccgtgtgcctttttytgacccaaatctcatggtttytggggccaaaattccctttcctgcctcccaatagctataaaaaattggtaaagccaagcataatgaatggaaaagtttcgccaaatatgtgagtcacttttctttttcttgggtagatggaagacaatgaaatgagttgttcaccttaacccattacggtaagtttgccttgttatctaagagtttgagtaagggcaacctttaygaaaaacctcagtaaaatttcacctttgaaatttttatgtcaactgataagattttaatcaacaaacccttttctaaacatctgttgttgtatgccaggaactgctttaagcattttacatttgaggcattcagtaaacatttattgagcacatactgtatgtcaggtgttgttctaggtttggagatagagcagggagcaaaacagaaatatcttggctctcacagtacttccagtttggaaaagaggcaacaatcaaaacagtctgtaagtgcaagagtttacatacacayatatactatatagcttgcatttctcaatttacatatcttgcaatatatataatatataagagtaatatgggatataaaaaatagaaaaaagtaaagcagggtgaagagaatcaggaattctaggcatggcagttttcatcttttggtgtttttgttttgagacaaggtctcactctgtcrcccaggctggagttcagtggtgtgatttcccgggctcaaaaaatcctcccacctcagcctctcaagtagctgggactacaggcatgtaccaccatgcctagcaaatttttgtatttttaggggagatggagttttgccatgttgcccaggctggtctcgatctactgggctcgagcgatctgccatcctcggcctcccaaagtaccaggattacaggcatgagccactgcgcccagccagtttgcactttttaaaagggttgtcatagaaggcctcagacattcctcagaggtaatgtttgagcaaagacctgaaggcactgccggagggaagccatgtgtttatctgagggaagagcattctgggtaaaggaaataggcatgtcccaaaggtggaactgcacgtggtatgggaggaaagtttatccatagccaaatgttctaaaaccacgatgttagaggatggccctttctgacaatggcatagcaggttattcagactaagtcagccatcacaaaaagccacctttttttttttcttgagacagagtcttactctgttacccaggctggagtgcagtggcatgatctcagctcacggcaacctccatctaccaagttcaagcgattctcctgcctcagcctcccaaatagctgggattacagtgcccgccactatgcatggctaatttttgtatttttagtagagatggggttttgccatgttgaccagactggtctcaaactcgtgacctcaggtgatccacctgcctcggcctcccaaagtgttgggattacaggtgtgagccaccacacctggccttttttgttttgttttttgttttgttttgagaacagagtctcgctctgtcgcccaggctgggtggagtgcagtggcactatctcagctcactccaacctccgcctcccgggttcaagagattctcctgcctcagcctcctgagtagctgggattacagacgtgtgctcccacctcacccggctaatttttgtatttttagtagagacggggtttcaccatgttggccaggctggtctcaaactcctgacctcacaaaatctgcctgcctcaggcctcccaaagtgctgggattacaggcctgagccaccacacctggccacaagaagccaccttaagaaaaaattgaaacagcaaatcattgtgtgaaagagatttacagtttttaatatttaaagggtcctgtaaatcaataaggaaaaacatgagagtggccagtaagcacatgaaaagctgctcatcaggaaaatacaagtgaaaactcaaaatatcaacaacactaagtatttgaaaggatatgcagcaattgaaagcctcgtacatgctactgggaaggtaaaatggtgcagccactgtggaaacttaggcattacctactaaagctgcatgtgtgccagttccactcctaagaaatgagtcctagaggccgggtgccgtggctcaacgcctgtaatcccagcactttgggaggccgaggtgggtggatcacctgaggtcaggagttcaagaccagcctgaccaacatggcaaaaccccatctctactaaaaatacaaaaattaaccgggcatggtggcgggcacctgtaatcccagctactcaggaggctgaggcaggagaatcacttgaacctgggaggtggaggttgcagtgagctgagatcgtgccactgcactccagcctgggtgacagagtcagactccatctcaaaaaaaaggaaatgagtcctagagtgttgctagcagcactatctatagtatatgcccattaaatcgtggtacattcaccgtggagaactgtacaacaatgacagtgaacatcctgcaattacaccaaataacaccttgtagttattcattaaactgaacatatataggttttatgcattttctatatgtcatggttcaccataaaagtaggaggaaatgtcacaaaaatgttagcagcagagttagctaggtgtggtggcacattcctgcctgtaatcccagctacttgggaggctgaggtgggaggatcacttgagcttgggaggttaaggttgtcgtgagctatgatggagctccactgcactccagcctgggtgacagagcaagaccctgtctctaaaaaaacaaaacaaaacaaaaaaactttctttgacttttggttagctggcaaactgatacaactcagaaactgctcaatgtcaggaaaaccggaacttgttgatgaacttgttttcaaaatatcatctcatcaacgaggcctggacaaacaagccctgaggagggatctgcaacaaccctgaagacaacaaggaaagaaaccatgaaagtctgtctgtactgcagtgggaattcttgagtgaggtcttacctcttctttaaacctcttcaggagtgtcctgattatgtccagaattttccctaaaggcagggattcttaacctggatagaagccaggggtaaccatgaacttgatggaagaaaatgttacatctttattttcagcaatgaaactgaaatttagccttactcccaagttataaatgctggcaacaaatcmcagtagtaaaagcagtacctgggattttcccaccaatacaaaccagttacagcaactgtaatgtaacataaaaagggcatcttgaagtattgttcatatttgtcacctcttggaatgatagcagatcctgtaagttgatgtattaattaaaaagcccatatattactgcatctcaattttgtttcaatttaatatatagtaataattgtaattcaatgtaattggcttccattgtaattgtgtgtgtgtgtatgtgtatgtatatacttttaaaaatattctgtgaaggggttcacagatttaaccagatgccaaagggttctgcagaacaaatttatttatttattttgagacagaatttcgctctgtcacccaggctggagtgcagtggtgtgatcttggctcactgcaacctctgcctcctgggttcaagcgattctcctgcctcagcctcccgagtaactgggattacaggcacccgccaccacacccggctaattttcgtatttttagtagagacggggtttcaccattttgtccaggctggtctcgaactcctgacctcaggtgatccacccacctcggcctcccaaagtgctgggattacatgcgtgaaccaccgcacccagacttcagaacaaattttttaggttaaaaacctgtcttaaagaaacgtcagggccaggcgtggtggctcacgcctgtaatcccagcactttgggaggctgaggcaagcggatcacttgaggtcaggagtttgagaccagtctggccaacatagtgaaacccgtctctaccaaaaatacaaaaattagctgggtgcggtggcacatgcctgtaatcccagctactcaggagactgaggcaggagaatcacctgaacccgggagatgaaggttacagtgagccgaggtcgcgccactgcactccagcctggacgacagagtgagactctgtctcaaaaaaaaaaagcaatgtcagaaagtctacctggactgcagtcctaaatttctataacttaatgaacaggagctgacagaaactccccagctacacgaacagaactgttttctacagcttaatcctgtgtccttagaaattcacgtactctgtgatccaaggactatccacgccacagtccagtgacctcaggagtatccacataccagtctgcgaccccagctgtttccacacctgactgtgactcaccccagttaccatgtgtgaccccaggagtatgcacactcaagtctgggacaaccattgtccaatctccagtcagaaatggtgtttaaattctggagcgtgtgttcataggcatgtctacactccggtctctgaccacgaaaataaccacaccccagtctgtgtgactccaggaatgtccagaccccagtttgtgtcagtctaggagtgtccacaccatggtgacttaacccaggagtcttctcaccgaagtcagtgtgaccacaggaatgcccacaccccaatctgtgaatatgcacagcccaagaatgtatggcggaagtgtccacacaaaaggccgtgtgaccacaggcgtagccacacccattacagtgcaaattcagcagcgttcacacgacagcctgtgagacctcaggagtgtcctcacgccaggttctgtgagtccagcagtggcaatggcttggagtttccatagccatcttagtggtgccataaatgtgtagctcaaacggtgaccacagaggagtccacagctcagtctgtggtgtcctgggagtggttttgccccagtccagccacctcaggagtgtccccacccaagtttttatgacacaagtaatgtccagttcccagcatatgtgaccctggtgttgtccaaaccccatagtctctggctattagtgtgtctatacccatcttgacggcctcaggcaggtgcactcccccatctgtacgaccagaagactatcgactcccctgtcattgtgaccacaggagtgtaaaactccagtgccagtgactactggtgggtccacattccagtctgggtgacccaggggagggcacagccctgtctgtgtgaccataggagtcttcacaccccagtgtctgtaaacacacaggagtcaattccccagtcagtgtgaccagaggaatgttcacaccaaattgtgtgaccacaggagtgtccacacctatctgcatgtcctgagaggtgtctatactccagtgggtatgacaccaacagtgtccacaacaaagtctgtgtgactccaggagtgtccctccccccagtcagtgggagtctagaaggatctacaccaagtcttgggagcccaagggtgtcccttcgccaatctttgtcactcaggggacattcaccccccagtcacacagacgaagcatatccacagctgggtctgtgtgaccccagcagagtctacttcacaagtcgtgtaaccacaggagtgtccccagacgaacctatgggaatccaggagtgtccacatcacagtcacttgaccacagtggtgctgacttcccagtttatgtatccttagccatgtcctttttccagactgtgtgaccctaagtgtccacaccccaaactcggtgatccaagtcactccagtctgcgtgactccagtgttgcccacacaccaatctgtatgaccctaagagaacacatcccggtctgtgatgcttcagcagtggccacaccctactctgtgtgaccccagaagtggctacaccacaatcagcatgacctcaggatttcttactccaaaatctagtaacatcatgagtgtctacaccctcacctgtgtgattccaagaggatccacaccccaggctgtgtgaccctgggaaggtccctatagcagtcagtgtaaacctgggagtgcactcttccctgtcagtgtgagctgggagggtgtatctagaggaagagtgatccagggaaaggcgaagggccggatgtggtggctcacacctgtaatcccaacactttgggaggccaaggtgggtggatcacctgaggtcaggggtttgagaccagcctgggcaacatggtgaaaccccgtctctactaaaaatacaaaaattagccaggcgtggtggcacatacctgtaatcccagctacttgggaggctgaggcaggagaatcacttgaacctgggaggcggaggttgcagtgagctgaggttgtgccactgcactccagcctgggtgataggccaagactctgtctcaaaaaaaagaaagaaaggcaagggccctgaggcaatggccctgaggtgcctggcacatttgaagaacaggccagtggggcaggagcagagtgaacaaggagccagtggcgggcggtgaggtcaaggagggcccggagggcctcgtgggccacggagaggactttggctttttctctgagagagatgagagccatggcagggctccgagcagaggagggccccgggctgacttgggttgcaacaggatccctctggctgctgtggtggcggctactcaactgttattgtttgtcaaaactcagagaactgtatgccaaaagggtgaactttatcgtatgtaaattataactctttacatttaagttataacttttggaaaatgtgcagtactggccaggcatggtggctcatgcctgtaatcccagcactttgggaggctgaggtgggaggatcgttttagcctgggagattgaggcggcagtgagctgagatcatgctgctgccctccagcctggacaacagagcaagaccctgttttgaagaaaaaacaaaaaacaaaacaaaacaaaaaaagtgcagtactttgcaagcaataaagatttctatttctgcaagagaggctgtgctcatgcctgtccttacccctctccttcctgcacaaacacatctcaggaatgcacctgaggaaaaggagggagccggggcctccctcaactgctcaaggtagtgctccctttgttgtctgctgtgaactgaattgtgaattcagcaaattcctttgttgaagctttaatcctcaatgtgactgtatttggagatgggggtaattaagattaaatgaggccataagggcagggtcctaatctgatagaaccggtgtcctcattagagagggaagagatgcctgagctccctccctctctccctgtgggcgcacaaaggaaaagccacatgaggacagagaaagaaggtggctgtctacgagccagaaagagaagcctcaccagaaaccaaccctaccggcaccttgatcttgaacttccagcctccagaactgtgagaaaataaacgtctgtggtttaagccacccagtctgaggtattttgttaaggcagtctgagcagctaattggctctcagtttcaaggctgatttcaagagactcgtgttggccaggtatgaggggagccagtgctcaagtgaaggaaggaaaattcagcacatcctcctcgtctagctgaagggggctctggagcagcaggaggggcccagggcaagcctggaatgaaatccgtggcactcctgcaggttctgggggcggtgtccatggaatatcctctgccacataacaaaatgactaataattgcttggggagctttcagaactgccccaaggcttcctctaacactccacccacacctggttcatgccaggttgctcgatgccttggttcgggagaataggtgtggtgtcatctcaggcttggtggcagcccaagggaaggggcaagtgttctgagtctctctagatgacacaggagctgaggaaagctggagtgaattatgagtcacagcccgtacctcacaagaaagttctgcccgatgccagagctgggagccatcaccagttatgcagggttggtggagaagagcctcgggataattggtatgcatgcccgcacataggtgtgtgcgtaccagtacgtgtgaagttatgcaggagtgcgtggtgtgcttatgcccgtgtgtgtgcacattagtccttttgtgcatgcatgcatacatggcacatgtgtgtgcattcatgctttgctgttttgaatgcaggtatggttataagtgcatatgggcaacagaagttcaagtgtgaattctcatggagatgctagggtgtagcaggcacatggggacctgttccctgacaggggtgtttgtgaaaagcaactgtgcatatgtgtgagggtgtacttatatatgagattctatgtgcaaagccctatgtccgtgggtgctagcctgagtgtttgtgtctgtgtatatacatgtgtatgccagcgtgcacatgcatggctgtgtgtgagtgcgtaagtgaaggggagcacattggcccaagctggtaagtctagtatctatgcatgtatacccctgggcaccgccccccccgccccgtgcaagtgtgagtgaacaggtacacaagggcctgggcgtagatgtctgtgcacatgtacgtgggcatgctgtatgcatggctgcagggatttcccacgtgtgtgtgtgcacagatgcacaagtgcccaggaacctagattgtggtgtctgtacacatgtacctctgggcaccatgcatgtgtgtgtgcaaaagtgcaagtgtgcctatgggctcaggtctggctgtctgtgtacatataccccctggatgcccataaaggtgtgagtgtgtactgcaggtgcatatttgtccgtgggcctcagtctgggtatttgtgaacatataacctgtgtgaacgtgcatgggtgtgtggatgtgatcaggtgtgcccatggacccaggcctcggtgtctgtgtacaggtacctcagggtgcccgtgtgtgtgtgtgtgtgtgtgtgtgtgtgcgcgtgtgtgtgtgcatgtgcatgtgtgtatgtgtgcatgtgtaactctggaggtccatgcatgtgtgtgcgcatggcttcaagtgtgtccaaggacctgggtctgggcatgtgtgtacatgtatccctaggaacccatgcatgagtatgctcacgtgttcagcggtgccaatggccttggatcttggtgtctgtgtatgtgtacccttgggggaccacagatggcattcatgcatgcatatgtagcaccatggagggatctgtgtgcagatttacctctacctacacctggctggggatcataaagaaaatcaagggatgcgctacctccatgaatccaggtttcagcagagctaagg

SEQ ID NO: 93719 - DNA, 116001 bp, Homo sapiens
tttgttttgctgttaggttttaagaatttttaagaaatatatatatatttcttaaatatgtatttcttaaaaaaataagaaaatatttcttaaatattttcttaaatatttatatatttcttaaatatacataaatttatatatatataactgattgactcttttgcagagctaaatttttttttgcttttgttttgttttgtttcttgttttgagacggagtctcagtcttttgcccaggctagagtgcagtggtgcaatcttggctcactgcaacctctgcctcctgggttcaggcgattctcctgcctcagcctctcgagtagctgggattataggcgcctgccaccatgcccagctaatttttgtatttttagtagagatggggtttcaccatgttggccaggatggtctcgaactcctgacctcaagtaatccgctcatcttggcctcccaaagtgctgggattacaggagtgagccacagcacctggccttttttttttcttgacaaggtttaatttatccgtttttccctttataaataatgcttttttagtccttcaacataaataaggtaaaaaaataacgcttttggtgtcaagactattcctaggtcctggagattttatcctatttttttctgaaagttttatggttttacacgtaactgtgtattccatcctgactttactgtaaaaatctgtgagacttaggttgaggttcatttttgtttgactacagatgtccaactgtattagtaccatttgttgaaaagactatctttccttcattgaattgctttcgcacccttgccaaaagtcagatgcattttttaaaacctatgatgggctagactctgggctatattctttacataaattctcttctcctcttcacaatggcctgttaaatagttattgtctccatattttttatagttgaactatcccaagggtattcagccagactcaggattcagtccagtcttcttccacagtggctgctgcttattgatctagctaacttttatttagcatttgttatgtgccaacactgtgctaagcttgaggaaataagagttgaacaaggcttcctagaatacttcacagaggaagagacaaaagctacaccttagaggatgaacataagcttgcaaagaaaaggtagagcagggagagcattctagactgaaggaaaagcatgcgaaaggcaaggaagtatggaattgctccatacattcaagaaacatccagtgttttgctacagctaaaaggagggtagtagagaattttctcatgtttggcttgaaatgtttgtggatatctcaagggcaatgaccagcaggcagttggctgcaagagtctggagcttaggagagaggtctgggctagagattgagctttgggagtggtcctagcacaagtaacattgtacacagagaaagtattagagttaatagcagagagggccaagggaacattagaaacgtgcacatttaagtggtaaaataattgagaatgagctgggtgtggtggcgcacacttgtaatcccagctactttgggagtctgaggcaggcagatcactggaggccaggagttcaagaccagcctgtccaacatggtgaaaccccatctatcaaaaatacaaaatcagccaggtgtggtggtggtcacctgtaatcccagctacttgggaggctgaggcaggagaatcacttgaacccatgaggcagaggttgcagtgagctgaagtcaccccactgcactgcagcctgggctacagagtgagactgtttcaaaaaaaaaaaaagaaaagaaaaagaaaaagaaagaattgataataaatggtaggaggagaggagataggagagtataacgaaccagtggaggtgagatattctggtttttatttttctattatgggtaacatgtagcataaaaaaagatcttcaaagagatgatgctttgcaaaacttatattaaattagaacttttaatcaaatgcaaaatttaaaaagtgaagtattataaaaatgttaagcgtgttaaagcaaactaaatatggcctgagaaagactccgtacttctatatttgagtctttgtggatgaactgtaatctaacttaataagcaaaattgaaaacctgacttaataactatgcacctgtaacaggagctgagtggtggccaatcccagcagccatacttcaaccactcatagactactgaatgttcaaactgcattcaaataaggcaaatgctgagctgtaaccaatctcactgtttctgtacctcatttccaattcctgtacctcactttaccttttttgtctataaatttgttctgaccacaagacacccctggagtctctgtgaatctgctgtgattctgggggctgcccgattcatgaatggttcattgctcaattaaactcctttaaatttaatttggctgaagttcttttatcaagtactattatggggttttataatcaagtagtttgataatggtgataaatatatgatatatagaaattgcaggaaaagttcaattaggttgagtgcttattaaaccagtaaaccgggtatataactaaggaaatttttccccaattattaatacaaaatgactttcacctgaatttccctcaaataatttggattttcactttaaactcaataactggcaaatccatccctcttcaaaaaacaaagaaacttccccccaaagacccccaaaaccctctttacagtgtgttacccttaaacacacagaatgcccatgtagtgggctgaatagtgttccccctcaaagtatctgtgtccgcctttatttggaaatacaggcttcgtagatgtaattagtcaaggatctcaagacagaaaccatcctggacttagggtggtccttaagaccactgactggtatctttataagagagaggagagggaggtttggacacaggcacatagagaagaaggcaatgtgaagatggaggcagagattggctgcatttataagccaaggaacaccaaggactgccaacaaccaacagaagctctggcagaggcatgggatggtttctccctcaatgcttccagaaagaatccaccctgccaaccccttcattttgggcttctgacctccagaactgtgatagaaatgatttctgttgttttcagccacccagtttgtggtaatttcttacagcagccgtaggaaactaacatagcttctactcctcaccagcttcccagaccccctaaactatgattacacagataatttttttttttttttttgagatggagtttcactctagtcactcaggctggagtgcaatgtgatcttggctcactgcaacctccacctcctgaattcaagtgattgtcctgcctcagcctcccaagtagctggggtttcaggtttcaggcacctgccaccatgcccagctaatttttgtatttttagtagagatggggtttcaccctattggccaggctggtctcgaactcctgacctcaggcaatccgcctgccttggccacaaagtgctgggattacaggcatgagccaccgcgcccggccaattttttatattgatttaaaaacccataggtttttgtaattggtacttacatgaatatgcaaaggacaatattcacagtagtatgccatgagctagttttttaaatgctcacagaaatttcaaatgcaaactggttttacttatgtagcttaaacaaatgccaattgttgaactttgtgctggctctttaatatcagttctcttttttcttccagttaatgttgattagcatcagctcatttagtcagttaacatttatttcctaaaatcaaacactcttgattggtcagcctgggagaagagggctaagattaaggttagtgatggttcccttaaaacctgtcgagtgtctgcattgttagacacactgaaatctaagaatcccatctctctggggctgttcactttactaataattatttataaaagggaagctgagacaataaattgccaataaccatgtaacataataaccacaatgaaaagacattaaagctaccttttctgtagcctgattttacctagatggtgggttttggtaacaagccatcactagaggtcagtttttgattacatgtcttctcaggttcagcctatgttttgatttttggctactgggcacctctctggtttttaggctttaaagcagatccaaatgttatattatagtcttgtaaatgtttcatcctttttgcttctgatagattagaactctaattattaaaaactatttttaagcatttgtgactacaaaaactcctaaacttcaaatggtttaaattttgatgtttattttaattttaaaatattttaaaaattattcaataatagaacaatctgtaatgaaaacttacacatatgtgagaggtactattttaagatgagagtttgcaggtcaaattagtcagggaggaaagagtagaagtcagagtgggaaaggcccttaaaacttaatagggaatatcaaatctctacaaaaattttattcaagacagtgtctaagacttagaagcaactaacttaaaagcaaacttttggaacttaatcctattttcattggggactccgtttatgaataatatgctgtaattatacgtagaagcttaaggactgaaacagagcattccaaatgacaaatgttttctcctgaagaaatggcacccaaattatgttgtacaagtaagcggaataaaataatcatatgcttgttattaaaattatcatatgcctaacattcatgattttcaaaagtgaaaaacagtatgttatctttgagtttgttttcatgtgatataaatttataagcaagtcaaaattaaataatgtactgagcattaatttaagccaggatttttcagcctcagcactattgacatttggggctggataatgcttcgtcgtgaggggctgtgtagtgtgaggtgttcagtaatatccctggccccaacccattagataggtcccctctccaattgtgacaaccaaaatgtctctagacattgccaaatatccctcggaactaaattgtccccagttgggaaccacgaattattaatccctaaaagacaaagcagcaactcctgacccctacaaaaagttttaaatcaataacttagtttaaaatccttactaagtgggatcattactaatctcacttcattgtaccttcagtatctggaaaccgtccctatggtcacacttaccacggctcattattattttaaaacatggggctgtgtcatttcctgtctgtgagtttggactgcagtgggaatccattagttgaatgaccttctgtgtaggttaatcacaagacaagttctcaaactaagggtttccctgcggctcatttctttttaaagttatggaatacctgttctgcttataccttttagattcataattatttttcttgtatcaaaatttcaattaatagaaataaatgacgttactgacacttcatgatgattaagttttgggcaagtgaaccattttacactctattttttattcctcccacttttagtcagaatacacctgcagaataagtaacagaactgtgtgaaaagaacgactaggtcattacggttaatagttttagaaaaacagccgaggcctggtctggaaagctcacaacctccacccagatgctttccagcctcggggatattcgtactagcagtgacactagccagcttcctctaggctggctctgatgttggaagacaagcacgcagatgtgtgttacttttcaagcctggacatcgtttctgaggaatttaactccacctctcctgccagaatggaaaatcaacgccccccattcccgcccttcaccaacccctctccgcctgcccctttcccttgggtcctctctgttacagaagttctgatttttcctagcgagctggaggaaaggcaggtacccggagtggagttatattacctgtttctttgttctgatgggaccccagagaggacatcacgctttgtaactggttcttcaaggggagaagcaaatgtgtccctgaaaacttcagctgccgcgtttggcaccaggtttgattgacaaggactggcggagggaaagcgcggaggctgggctgggggccgcaggccgaggcagagacaaagaggtttcgcctgtccccgagagtggaagggcccctgggggtaactagcctttgagctcaaaggggcatttcgtgaggtcgccttttggttcggagagcgcgcggcgatcgggtggagggggcctggcgggaagaaagctggggcggggaaggggcgcgggccgaggtgggagcggagctgcagtcacgtggccgcccgccgccgcggagttggggctgttcttccgggttggaggcgcagcgccgcggggcccaagcccgggtctgccagcgcgacgtcctctcgcggccctcagggcacagcccaaggctgtcagcctcccggcccaggtgagcgcgacggcactggcgggtgcgggcagccggggcgcgcgcctagggcgcagctgggaaaggggctcgggcctttcctgaagaccacggccctcgccgggagagagacctgtcaaagagcaaagcggggcggggtcggcggtgtcccgggcgcagggtgcattggggtgtccgcaggccgcaggcttaggtggggaagaagcaccgtgcctcttggtgtccctttctcgtctcctgctggggcgatgtcgaagggagtgggctggtggatttgggaactgggtccccgaagagggcagggaatgaggcgrcagctgtgcaggtgcagatatttgcagctttgggggacagcgagagtcgtacggggtcatttcggccctcaagatcgggggtggtggagagggaggtcatagaggactttcgatgggcggttcatccagagaggtggcagctggatgcccttgaggtatgcttgacccttgagggagttcggagagggtgtccggctggggacataggagattgcgagcacaaattgtgagtgtgagttggggcggtctggcggtggtgggtacaagtttctggggcctaggctggtgaggaggaagagacagcggagagggcgacctgggcagagctagttcaaactcaacagccggaatgactatttgcagccgtggccaatcggcttcctagggaggttataaatagcggtctcgtgcagatgccagcgggtggcagttagttgccgagcaagggacggcaccggtggcagtagccgtgacaccagtggctttgggtgaggtcacggcgcctgccagccgaagctggctcagtagggtattgtgtccttgctggtatgtctcgcttttaaaagcgtgacttgtttatggttgccggtgtcctttattcaccctgtggcgccggccagtccttaggtggtctgtttgtcaggagtcttgtaggacagacttattcggagaagcgcgtggggcttaggtgcctacctactcttcttatttaaagtgtgccccttttcttcattgcaccccttttatttgtaaaccttgactttttattaacagacagtttaggatygccttctttccagcaggtgcgcttaggctgcttaccttggtgatagaatcagttttccacaaggctacacaaacatttccttttcaaaggaaattttccgaaaatccttggaaaatgtgctcaataggtacttaggcttaaggtcacctagccctattcattcagtcaaaaatactgacttcctctgtgttgtgcaaagcactgggggagagtaataccaaagtgaatataacagctgataaggatattctcagtcctggcaacaaccctgagaggtaggtgctgttattttattttttcaagtctcgctctgttgtccaagctggagtacagtggcacaatcacggcttactgcagcctggaactcctgggctcaagtgattctcccacctcagactcccaagtagctgggacttcaggcttgcaccaccatgccctgctaattaattttttttttttagcaatgggggtctcactgtgttggccaggctagtcttgaattcttggcctcaagcagtcctccccactagcctcccaaagagatggcattataggcgtgagccaccaccctgggtgggtgctattattccccattttaaagatgaggaaattaagtacagggaagttaagtgacttcccaaggtcacacagccaataagttgcagagtggggcttccaatccgcagatccagagctgactctcttaaatatctgtggtatcctccctctttaggttgggtgctttccctcaaggattttaatatctaataggggaaataacccatataagttacattaaacatacatatgaaagcaatgcttaaaaagttgtgcttttgggccgggcrcggtggctcacgcctgtaatcccagcactttgggaggccgaggcgggtggatcatgaggtcaggagatcgagaccatcctggctaacaaggtgaaaccccgtctctactaaaaatacaaaaaattagccgggcgcggtggcgggcgcctgtagtcccagctactcgggaggctgaggcaggagaatggcgtgaacccgggaagcggagcttgcagtgagccgagattgcgccactgcagtccgcagtccggcctgggcgacagagcgagactccgtctcaaaaaaaaaaaaaaaaaaaaaaaaaaaaagttgtgcttttttcccctaattttgagttataaagtttttttcttattgcttcaaagccacaggaacacatggataaatgagagctttacagtgaagatggaggaaaatgtgatgattaggatggagtattatcttttgtataaacctgtacaggtcaatgataagatagtttaaatattctctatctttcagggccatttgtatttggtttagacttagtgatatgtattgcttttgccaagaaatgacctcctgatctctgccctgtatgttcacagttgaatcaagtgaaatttttcacagaaatgggcctatgaaggctttggccctactgatgtctgatgcccctgccaaggatctgctgaacatcaaattaccattttccaagtagaaggaacaaattttccagatttcaggccatgaaataggacttcagttttatagcattacaaagtctcatctaatcataaaatttctagagactaaaatggcctttgaaacctgtgctttttttatagttgagctaactgaggcagggggaggttcaggtcgaacagtaagtgagtggcagatttggacaatacaggactctattaaagctcagttcactcttttgctgatgaggtctgggaactctttgtcagccccataaaaatggtggttgttggggagttgggatgatccaagaagagaaacttgggtaagtggggaggttgggataggagtaggtcactcagtaatggtggggaaaaaaaatctcactcaagacaagaataatcttttacacatctttgcaactcccttagttcttggcatagattcggtaggggttttgaatgtgtagctgaatttcgaactaattttctctttattctcagccatgataactctagatgtgacccatgaatgaatgagtagggtatttatgagacttgagaatactttaggactgaaatgaaatgacatgatatgtggaaacactttgaacatgtaaagctgtctgtccaaatgcaaataattattcatacatatttttaattgcatgccaaaacacatcttgcattctttcttccttagctatttttcatttgattctcttcatctcaaacggctttcccttccttttctgagctctaaaagaggacacaatctcattctttgatccttcaaaggactctgagcttgtgttactctgttactctactttgtagtgttattatttgttgacttcttatctccaggaaaattccagtttgattctacaagtgcttcttaatggcaaaactctgcccttggtatatatttgttgaattaaggggcatcttatgaataaatatgctccctggattaaaaatttccattaccaatgctgctttctggtattttaaagatgtttcttcaaggagttgtggcagcaggttttttttgttttttgtttttttgttttttttttgagacagagtcttgctctctcgcccaggctggcaggctggcaggctggagtgtagtggcatgatctcggctcactgcaasctttgcctcccaagttcaagcgattctggtgcctcagcttcatgagtagctgggactacaggtgcgcaccatcactcctgtcaggactctgagcccaagctaagccatcataacccctgtgatctgcacgtatacatccagatggcctgaagcaactgaagaaccacaaaagaagtgaaaatggccagttcctgccttaactgatgacattccaccattgtgatttgtttgtgcccaaccctaactgatcaattgaccttgtgacattccttctcctggacaatgagtctcaggagctccccactgagcaccttgtgacccccaccactgtctgcaagagaaaacctcccttaactgtaattttccaccacctacccaaatcctataaaactgccccacccctatctgtctttgctgactctcttttcggactcagcccacttgcacccaagtgaaaataaacagccttgttgctcacacaaagcctgtttggtggtctcttcacacggacgtgcataacaacgcccggctaattttttgtatttttagtagagacgaggttttgccatgttgcccaggctggtcttgaactgctgaactcaggcaacgcctcccaaagtgctaggattacaggcatgagccaccaagcctggccagtggcagcagttctgaaattaaaaatgagctaagtctttctccctctggagtctggaagaacatttacggagcctgctaggatcagatgctcagtcccgtgagggtccacatgatacagcagaacttacaggcagagttagcagtgttagctgagtttggctgataaaattctaagtccttggctgctttctattctttttttttttgagayggtgtctcactctgtcacccaggctggagtgcagtggtgcaatcttggctcactgcatcctccacctcccaggttcaaccaattctcctgcttcagcctcctgagtagccaggattacaggtgccagctaccagggccggctaatttttatatttttagtagaaacggggtttcaccatgttggtcaggctggtctcgaactcctgacctcgtgatctgctcaccttggcctcccaaagtgctgggattacaggcataagccactgcgcctggcttctttccattcttgaaagaaagaagagaaaggtatggaggatcattgggaattatggggacagtgggagtgcctttcatgcatccctggggatctactgaggaatgtggtggaggtagttcctgaaaccttagtaacagcaaaacccagtgacacttcacgcagcctggtgagaactcgcaaaaagtggccatttgtgagaaccactgacaaaacagttcatagttatggccacatcagcaagcacaagcctatttgataaagatactatggaatttttctttctttcttctttcttagagtcatgtgtcatgcatgtttaattttcttgagaggtgcacttggcaaacatgaatcttttgttcactcagtcagcctcagttcagaggtctcagtggataagcatcctgctgcactgaacaggatgtcagagtatttggtatgacctggtggctaaatgtaagtcaccattatactgtacagtattttaggtaatttaagggaaattcaaaggtaactgaattacatgcactttttgctggacatgctgacttagaagataactttcatgtaagatacaacttgattctgtagcaatatgtgtgtgtattaaagctttctagctacattaaggatcaaataggttatatgacctaggcttggaattgaatagtgagtttagaactccaattttagtgggaaaatggattccaagttttaaatgtctgaactggaaaacgaattttgagcatcttctataagtaaggaacttggcaaataaattctttatagatgtctacatgtaactgttatatttcaagctctttagattagtatttttaaaatgtttttcatgtttaaaagacaaatagtttttttcttggcatatatacatcctattttcttttttcttagtgatttgccttcaaggaaactggggagycagaaaattgggaactcatatcaacatggcaaacctattgaaaacagtggtgactggctgctcgtgtcctytacttagcaatttggggtcctgtaagggtctacrtgtgaagaaggattttttacgaacattttatactcaccaagaactgtggtgtaaagcgcctgtaaaaccaggtaaagtctcacttcagtgattgtaaatgaaaccttcaagtcataggaactaatagatctgatgattgataaaaggaaaagccatgtagttttatggcctggtgcttgtgagtgatcattttaaacaaacaacaagtaagtgctatcttgtattttccatgtactatagacgttcctgatttccagcgctaacagagaagacaaggtaatagaaaaaacaaacaaacaaaaaagataaaccagttgagttgtccctggagcctattgctcataataaccatttctcctagaagcccttcctaattccttgttagtatttgagaattgtaccatatacagctcatctatgctcaggaattaggaattaagtatattaattggtctacattaatgctttccaatttagttagtagcaatttgattgcagttgctcaggtcagaaaccctggagtcattctacatcctcctagtaggtataggtcagctccatctcatatctacaaactgtcctcttcttgccattgctacttttatcatcttggtccaagccatcgtcatctgtcacctgtactgatgcaccagtcttctaaatgtctctgtgctttttacctctgccccctacagtctgttctgcacaggacagtgagaataatctttttaaaatgtacagtcatgtcactcctcaattcaaaatttgccacttgcttcctagctcttacagaggaagatctgaagtcttccagtggcctacaaggccttccctgatagaatgtctccttgcttctgttctggggtacaggccagaaggaggagaggctaaaaaggggcccttctaaaccaagtcaactgtctgtcttttttttttttttttttttttaagcagcagcaagatttattgcaaagagcgaaagaacaaagcttccacagaatggaaggggacccgagcaggttgycccccaagtcaactctctttcatcagtcttgcccaaagatcatcccagtacttctgtcacttcacctcactgtccaraactcagacatgtagctgtaagggagacttggacattttgctgtaagggagacttggacattttgtcttttattctagatggcaatgtacccagctaaaaatggcattttcttattaaggtgaaggaacaggatggatattttggggggcaacctttgtcacctagaataatgccctcttttgttttttaagtttgtaggactgtttgtsgattcattaaggacctctaaactgctaggtgttttgagatcttatgtctgccttgaatagattttatagcctcttttcttgttctcagatgacaagtcacaattggcagggtatctgtccctacaagcctccaactttatcttcagatgctttcttttaaattgctctggaaagccagattatcctggtgataaaattgtgtataaaataaaggtaaataactgttgaagacatgaaaactgtccttgtgagtaaatccatggacatcaagatctctatattgattatgtataagacatttttgtttaatttctggttcttcactatttcctaattatttttatctctgaaagataagaagtctattttttccttaatataaccataagttcattaccatattgaaaagtgtagtaagtaattccagctacagtcagtattcatattttttcaattgctttcttgcttctttccttccttctttccttcctccctccctccctccctgcctccctccctccctccctctttttctttacagttggcttgttcaaagagtgatccaaacagggtccacacattgtatttgctatgtctcttttgtctctttttatctataagttcccctctctttattccttttaatatactgaagaatttcattgttgctctgtagaattaacaacattctaggtttggctgattgaatcctcttggtattgtttagccagtttctctgtcccttgtatgtgcttaaattatctcttatttggtcagtggaagccctttcaaattggcttctaaatccttttgacatggcttcagtcatctttggtagcttccttgcttttgccatgtagagcctgacaatttgaggttgtcagctaagtgaacttgagatgagtgtatgtgattgagctttgtatgtcaatccaaatatttgccagctttctattattttcctccttctccttccagtaaggagtaagattcagcattatttgcctttcgtgtactgtaaattattactatataggtagtgtggaatctaagacagtgttcaaattcaggtctaggttgacttaatttctctaaggtcttacttaataagttactttgtagggataatttcattcattttgaaattatacatattcagatcttaggttgcaagaatgggtttcctaagctttaataaaccttatatagaaacagatactcttcattaaaaaatgtttatgctgcatattaagtaaamcatcaggagaaactgatgtcctgtagctaaagatggtctgaaccatatctaaatataagattgtactatataggcttttttgggttgcaaggaacagaatcacatcagattatattttgtgatgagggtttgctatgtggattcttggcaagtgtgagagcccagaaaccccccatctactccttggataagtggaatgttatttgtagaattcatggctgtgacccatcttctctctttaaatatctrctactgatgtttctatcactgttactgctgacctccctttgattacctcatagctgtgcttacaaataatatttgcactgatctactctccttgtccctctctgtgggtctcccatttaaactccttgagagagaacccagtgggttgagtagtcactggccaacatagagcgtccttggacagagttcctgtctaagtcatcttataaggtgcagctgctagttttccttgtctgccctgtagatgattgtccttgacacagttgctgatcccttgtctaagtggctgagtgtgtagagtcttaagatacaacacttagaaatttatgaggcattgtgtgtggccaaattgcctggaagggaactttgagtgtggcaggccatcaaagtgtctaggatacagttgttcttcaaaatagctaattacttccatttttgttaaaagtaagggcaaggagaccataaccttgcccttagtttgaagaatggagtcagcatgtggagggatctctaaacccatttttttttctcctacaaatcaactaagcttgttatattccttgaagaaagccaattgattaaataaaatatttagaagtttcagaagagtaggcataaaagtttcttataatctaccacaaaagtcaaagaattataagtatgaatcaggaacatcattctgaacagcagcttgcatgtgtggtatattttgaagaaaagattgctcctttcaattttctgaaatctgtttttaaacattttttgtttgtttttttaccaaatatatattttttttgcctttgcttgtttctaggaattccatataagcaactgactgttggagtccccaragagatattccaaaatgagaagcgagtggcattgtctcctgctggtgttcagaacttggtcaagcagggttttaatgttgtcgtggaatcgggtgcgggcgaagcttccaagttctcagatgatcactatagagtggcaggtgcccaaatccaaggggcaaaggaagtgctggcttctgatttggtggtcaaagtaattattcctttttcctctcccatttacagcatgctgactttttgaaatcttttcatagaaaaattaaattactttatctggagttacaccttttcctattttcaaacagtgtatttttctcaaagaaatgactgcatgtcgtcatattcttcatgctccagtaaaacttttatcagacaatatgatctatgtttaaccatgaggagagaaaaagtgatcttcatttttacatttgctatatggacattttcttttaattggctaggaaaaatttgttctacatggtccatatatatccagagtacccacacgtgaacatttactgctagaatggaaagaaggtatggaacttagtctgggactaaatgttcagtgatcttctgacacctgaaggcgcaatgacttacactgacatacgtgctatttctagagagggcatgactattttggagaaagcagctttgggctgagtggcgagtagctttacctactctaaaataagttcttaaggtaatatataacagaaatctatatactaaatgacttgagaattaaaatattaaataaaaaatcctttagagaaagggggagagactgtatcaagggtctagcacagatgataactagagttgagcattaaattaaatgctaagcctcctgcaaccaaagcaaacagggaagtaactcattttttcaggagatacagcttttttctacattaatttctatgaggtatcaatcacatagtttttttatttccttacataaagcccactgaataacttgacaggatcctaacacttgacaggtggtttttgctaaagttacaaaaccaatttttgctattgaaagttaatagtaaaatttgtggcatgggggttaactgtaactcagctaaagctttttaaaggtttaagtttacaaatacttggtgatatagctagatatatagtaaaattacttagagaaaaaagaagagtataattcattctcatatatattctagggatcatcttttgagatgtcttgaaaaagccctataagggtgtgcttacattttggaagtgctatgtgttccttttagggattcacaatgtatataagcagttaatggtgtgctcagaaatcctataacatagaatattgtatgactttatacagtactagcattaacaaacttcttgatcttgggggcctctcatttgagccaagtctgttaatatcctgaggagcgcattcagggaaacattctattggcttgacttactcagatgacagcggtctcagctgagcatttgataggggccagtagaatcaattcagagttgttttctaacttttactaaatctatgttatagattttcttggaggaaaagtagaccttgtcagagagccttaattaaagtccagaacctagaaacatatgcatcaccagatcaacaactgaaatgggaatagcagacaaaggtgtctcataggtaaattgaggtgaaatgctgtgagataaacttattgacccaatgtttgtgtttgtatttaaaacataagtcccagaggctgtgttttctgtgtttacttgcctaaaagcactattgctaactaggaactaatgaaatgggatattttatttgaaggttgattttaaacttggatataaaacattttaaaatacatttaaaatacagttttaaaaatttggctttaaaaaatggatggccgggcgcrgtggctcacgcctgtaatcccagcactttgggaggccgaggcrggtggatcatgaggtcaggagatcgagaccatcctggctaacaaggtgaaaccccgtctctactaaaaatacaaaaaattagccgggcgcggtggcgggcgcctgtagtcccagctactcgggaggctgaggcaggagaatggcgtgaacccgggaagcggagcttgcagtgagccgagattgcgccactgcagtccgcagtccggcctgggcgacagagcgagactccgtctcaaaaaacaaaaaaaaataaataaaataaaaaataaaataaaaaatggatattggaaactttcaagcatatggagtgtatattcattgacttagttgatacttcttaatgtaacagaatatattgtagcttttggcttaaacccaattcagcaaggttactagtgtgaattgtgttcatctaataaatagtcatctggaattttaaagtgacataaatctatacttagttttagtttatgatgttcttaatgtctcatcactccaattattcatgcttgccaaaattagcaaggactgaatcttgcttgaaggattgaacacacaacaaaacttcctgtctgtttattctaatatctgttaattttaccagggtaataagttttggggactgcaggtttgctgtagagcttccatatattttttcacctctctgcagttaattgtcaaaccagtctcagtattttgtatttcccaggtgtgtgtgccctttactcagagcagtccacaggtcattaggcaggggatagatggtatacctctgtgtgtgccttatattgcttaagaatttagtcagaaattattgatggaagatttatttctggagtattatttcagtcatggcatattatctaagttttcctgtttgcttaaaaatatgattaaagtatttatatttataatctgtgacttgattttttccccaggtgcgagcccctatggttaatccaacattaggtgttcatgaagctgaccttttaaagacatcaggaacgctgattagttttatttacccagcccaaaatccagagttgctaaataaactttcccaaagaaaaactacagttctggcaatggaccaggttccaagagtcacaattgctcagggatatgatgcgctaagctccatggccaacattgcggggtaggttcttttccatttcaattgaacaaaagcgcaatagtgctacagaaaccttcacactgtagctcttctgtcttacagtgattttatttgtaattattgttggagattacagccttttgagagtgcatttaaattatttttgactcattttattgttttacagtaattagataggaaatgaactctatttatattcctttttaatcttaatgagtagaagagtagtaatgtttccattcaccaaagcaaatagctgtcagattatttgtatgaggaacacactgtatttcataaatgtgtgtgtacatgtatatgtaaggttgaagttactgtttttataggtcaaaaatggtagaatagtgacaatttcatgtggttaaattaatatgcatatattagtggatttgctgtcttaattaggttttgcttaggtaaatttataaaatatttaaagaataggaaaaaggtctggactagargaagtttcatctgatgtcaaaacccatattgataactgagggctatgtcttckacctttaaggtcaagatggtaataagcttcatttgcccaatagcactaatacattctmtgttgattgcctggagtactatgttgagaaggattctaaggcccattctgcttggaggaatgtggctatgattgagtaatcatgcctgccatgggtgagggacaggaatagctacatgaaagcagtgtactgctgactttgccttaaagggtgggaacaatctggaaatgggataaggcttatgaatcaacttctctaagaaactaattaaattagattttaatcatgaaaactattagtagttgagaatttgctaatattaatgaggcacaaagaaaataacctttttaaaaaaacagtgcataaaaagacactaacatgactaacatgaataaagccttctatagcctgacacctaagcagaaagttttcttaggttttatattttagcataggaaatatgtcatagattctactttgtgttttagctgcacacttttaaatttatttagcctgtaagggagttatattatgcaatgtgtgacttaaaattttatctagaaaatgtataatgtaaagttttaagggtgctgttgattctgaaatacacatatgtgaaagaatatcaaaaccagtcgctctagatcaagtggttttagctgttgaatcttttgagcaaatgaaatattatgagacaatataaataaatccartaagagctgagtagctttgggtacactgagtatggcaggattgtgcagaaacattcctactctccatctcatccactatggccccagatttgtctgaagtttaaaccttcagggacccagggatcacaatttgaggaatcactcttctatgtcctgagctgatatatgcagagagcatagtgtgaaaggaatcatctagtatacatatccatacaatgtatgataaatcattayccgtctcattcatacacacagccatattacagtgaagatgtgctacttccacttcattactgttcattctgaacttttttgctgtcatgaagaaaatgtccaatttattacttttttcactatcaatgtttcctcgtacatttcctgtgtaatctccttttattatttatttttcagaatagcaactgaatcttttagagcattaattccacaattaatttcttacagtggcctttgaatctttgtcatatttgcccattaaaaattgctgtcatttgaattcaggagagcaacagatactgtaatctctaaagtattgttttttgctccagtgtgattaacttaataatggtgactttatatgtttttgcatcaattattgtatcaagtattattatgtaaaaatatgatcagggagaagattttcttgtcacctagcaggggagttttaatagttgctttataatattgagccagtgtatatattaccaagtaagaatgcaaaagtgccttttacatataaattgctatgaaaatgaaattagtgtagcatgttaaaaatatcctgttaaagaaaagatgatgcatattatttgatttattaaatagtttgtttctttggctaaaacacttaatattcactgagcattttctatgtgacaggctttatgcgaagtgtttcacctgcgttatctcatttagtcctcacgaccctaaaagatagatgctttttgtccttactttatagatgaggaaaccaaggtttagaaaattttaaaaatttgcccaaggtcacaaaggtaatcagtcagagaactaggacatgaactaaggtcagtatatcggaaaatcccatactttgaaccattagagatcaagggaagtgtttcttctgttctccgaggttgaaatcttattttgtacaagcctatggctgacctaattttttttattttaaggattttccccccattacctaagcactacccagtcatcaaacaatatttggactatatagtaaagtaagtgtgaaggatgtatagtcctagtacccaaagaaaaccattgttagtattttcctatctttctttcattacattttctattatgttctacagtacttgttatgaagagggtgggtgcataatggataagagagtgcctctgtaggcagactgcctgtgttagacttctggctctaccatttactagctgagtgaccttaggcaagtctctcagtctgtatctcagttttctcacctatgggatgaagacagtaattgtacctttccataggcttgttgtgcaaattaaaggagcaagtgtatatacaacacttagaactgtttttgacacatagtacatactacataaatattagctattattctttgacaaaacttcattgatgacttatgatgatatgtgagtctgagatctctccttttatggaattatttatttatttatttatttatttttaaagttataaggctgttgtcctagcagcaaatcattttggacgtttttttactggtcagatcacagctgctggaaaagttcctccagctaaggtaggtacaacttttaatgtttctttataatatgcattgattaaaggaaagggtatgtatagtcttaaaatacagttatttaaaaatttttatatgttaacctcactgatgactttttggtgtgtataaatatttcacgaaacctcaaagcttaacgtttaagattgctagaaaaaaatgaactttgactttctgaaagttctagtcttttctgttttttgactttactaatttgaatttttaaaagaattttggataacttgttctctgtagcctatatattattaatttttwaaaaaaactttcaagataccattcagcagattctgggtttctcaatttttgcaacattttggcacatatacaaggtatttttggtttcttcacttcttgtyaatttttggatcaagaagacaggaaatgggaggtggtgtaatcagagtatttggcagagagaaatggtgccagtttctttaatccacactgaaagcagagaggagcagttaacgatgagaggtgacgatggcttgctgaaagaataggaggtcatattgtgatccttcaatcctatgtacactcagtaacaatggaaaccctgaggctaggtgtcttagtccattttgtgttactaaaagagaatacctgagactgggtaatttattttaaaaaagaggtttatttggctcataattctggtagctggaattcaagatttggcagctgcatctggtgagggcctmaaggctgcttcaactcatggtggacagtgtaaagggagcaggcgtgtgcaaaaaagatcacatggtgagagaggaatcaagagagagaaactgagggagccaggctcttctattaacccccagagtgagaactcagccccccactcccagggagggcattaatctgttcatgggagatccactcccatgacccaaacacctcccactaggccccacctcccaatattgccacatttgggatcaaatgtcaacatgagttttcgtgggaacaaagcacatccaaaccacagcactaggtacaggaaacctgactttaaatgtgatcatttacctacctgtaggttacaggttaactggtgcttcctgctctttttttttgagacggagtctcactctgtcacccagactggagtgcagtggcatgatctcggctcactgcaagctccacctcccgggttcatgccattctcctgcctcagcctcctgagtagctgggactatgggcgccggccaccatgcccggttaatttttttgtatttttagtagagacggggtttcaccatgttggcgaggatggtctcgaactcttgaccttgtgatccgcccgccttggcctcccraagtgctgggattacaggcttgagccaccatgcccggctgcttcctgctcttaagtactttgttatataaagcccagagttctcacacaaaataaatctcctggaaaaaaattaaaacaaaagcaaatagtagctttgagaaattatattgttttgaaaaacaggccaggtgaaaaaaatggcaggctgtttaagtgtaggccagaatacttagcaagaaagtgtgagcaaacaacacagacgtgagatgtaaaatgattaaattttgacttctttctcaggatcatacaaaaatgtctggcatgcatagtggccagaagttcgatgctgttcttaaattgactgaatgctttgatgcacaagtctactactaattttggttataatctttctagatatatgtggaagttgagagaaaagctgtgaataaaagatattaaaaagtgaaacaaaagaggcttaaagaaaagagaatcagcctttaaaaggtggaaaagtgactatctttattgaaaatttaaattgcrgcttaagggactttggttacatgacagaaatagttttctgaaattgaaggcactggtatagctcattaaggtggattgcataatactgtcttttatttggatttcctttaaacatggagggttcttacctgtctagaacaagtttgttcaagccgcagcctgtgggccacaagtggcccaggacggttttgaatgcggcccaacacaaatttgttaactttcttaaaacattatgtgatttttgttgccattttatttttttggctcatcagcaattgttggtgttagctagtgtattttatatgtggaccaagacaattcttgttccagtgttgctcagggaagccaaaagattggcccctggcctagattgaatgaaaatcaatcagttgaaggcttatgatatgcgaggcattgttctaggagctggggatatggcatgaacaagacaaaattcctgctgcataaaacttacactccagtgggggtcatagtgaggagacaaaagatcaaataaatacctgagataattttattattattattatttttgacttggttttttttttggaggcagggtctcactctgcctggagttttcactccaggctgatctggaactcctgagctcaaacaatcttcctgtcttggcctcccaaaattttgggattacaggcatgagccactgcacctggccatgagataatttcacacaggaaaaaaaatgaaccggatgatgtgacagtaatgggcacaggccactttagtagagtgatggggaagcttcctctgacctttgaggtgagatttgaagcatggaagaaggaaacaggagtttaaggattccaagcatttaggattccagtatttaggttctggaaaaataaagaataccattggtcttggagtgtggtgaacaagatgaagagtgatctgagatcatgttggaaaggaaggtctaggctggatcatgtgggtcctctcttctaggtcatgttatagactttggattctcctgcaggtgagggaaatgtttggtttaggatttaaaaaaatcatgtggctgttctgtgggggaatggatagtagggtgaaggcaagatctgtcagcaattggttgcacctgggacgatggcggcaccagaaatgtagagaaaggtgaaggattttatctggattagggatgatctttgggagttaaaaccagtactacttgttgatgaactggaaatggaaatatgtgcaaagggaggagttgatgaattccccattttggcttaaacaattgtgcatagttactgcctttactcagatggggaaggccagaggaggggmaggttatatgagtgaacacgagcattgttcctaaagttatttcctttctcctgccctttcccatactatttctttttttaaaaaagtttttatttcttaytttttaatagagacaggatctcactatgttgcttaggctggtcttgagctccaaagctcaagcgatcctcctgtcttggcctcccaaagcgctgggatcacaggcctgagccacctgcctggccccgtactatttcttgagcatatgcctacggtgtaacagttagcagtaagtgcttcggttagattccattgtttaatataacaacagtctgagaaggcactttgattgctgtattgcagatgataagcagcttgccgaagatcacccagaactagttagtaacagagtcaggattttgacctaagctctctgactcttactcactgtgtctttttctttactccatgctttagagagaaaaagtaaatttcgatagtaagatctgctgcttttgtgcgattctgcttttttaaattatggtttttttttttttttgttatgtcttgattcaggataacttggccaagtcctgtgacttttacttatttttatttactttttctttctttctttttttctttctttaagtggtgatggagcttctgtgtggaagagtttggtgctttgaagcctagagcctgcttattccctctggtcactctttgccccatttcctatagacttacccctgtccccaaacacagcaccaaacaccccattatcaagatcaattcacatgacctctgagacactgcccagagctcactggagcacagtctgactagcctagtctttgtaaaggcagaaggacatgtgggcatgatgggtgggtggcaatttgtaagcttcactgattctgtgggtggcattttttttctacaggaacaaagtgttgctttcaattgactgtttatgggatatataacaggactttactctggaaggcccgttccagactggagacaatgttcttactttgtttcttagaaggcgggggtagggggagacttgtttctgaggaattytttggttctcttgttgctgatccttccatgattagggacattagttacattgcttcagacttacggagagttgctcaaaatggttcagaattgtggttgctcatcagctgttcctttcagaagcattttggctgaaaatagaggttggggtagatgtttcaccaatgttgtacccatctttgaaatgtgttttgatgtttgatgaacaaagaaaaaccttataatttgatagggtaaaggtagttagaatgccacactgggacttttagtagaaggaacttttagacagtggaaaagaatctgttaatcttcaacatacgtaatgctgatcatgcttaggtagttttacacggatattctgattattaggctatttttagtgaattgttgttggcctttgctagcagttgtttctttgataaaatttcaagatcagtggtggttcagttaaaraatagtctatgtactccatacagttactaagggctgatcatcattatcaccatctgcaccgccatttattgatgctaaacttatactaggcaccaataattgttagctgatgatttttcattattagttgataatgagccttaacacataactgggtctgtcttctagattctgatagttggtggtggtgttgctgggcttgcttctgcaggcgcagcaaagtcgatgggtgcaattgttcgaggatttgacacaaggtgagtgctttactagtgactgatgttaaggtaaaaacattttgtttcaggggcatattatgattgccttaaaacttgtaaattgaagtagcacattgcaactggtctataagctctttccatttaaaaatgtttccactttttaaaagttaatgcaaagtgaaaatgtattacttaaactaacaactcacagctctgttttyttgggtggattgacagtgggaccagaattctttctatcctgagtttytaacatgttgctttacctatttctgttcagaatgcttttaggcactagttagggcataaacaaagatgtttgtgaatytgaagaaagagtaaaatagcaggctgagttgggggcatgccctaccgtgaatgaatagaagcaaataaagctgactggcacttcacctgactagcaacgcatgaattatttatgctgcattatttatgctttctgtgttttatgttaagatagagctgcatatatttttctgataatttttgagcccctgggtgaaagtacttggttatgtatactgtgtatttctttaatgcagacatatacacattttcctagattgtctttaaagagaagtttgattaaaattcttcttcatttcagaagacactagacactggattttattaaatgtcagtcgagtacagttaatatgtgttttaataatttttgaggttgaaaaatgtagtcatttattatcagctgagggtactggaggaataatactactgttaatcttgaacatagaatgatcaaaaaagaaaaaagcaaccattcaaagttggaagaatgtgacttttcagagtaaagaatgttccatagaatatggttaatagtctttatctagagttaaagtgatatactgataaaaagctgtcctgctgaaatgagaaaataaggcatttccaaagtaaccaggacacaaaccaaggatagctagagttaagcatgccattgatcctgtcattttatttttactgtttgttgatgtgaagttttctcaagacctccaagcccatagaaagccggtcgtttaagttttcattgtagtggacagtagtattaaaatggaaatgtatgtatttgacttaaaggtgatttgaaacttggtggtgggtgaactactgagaatttagtatattgatgtcattttttagattgtgtacagaatcaacagctagaatatggctgttgcttatattagaaaaatacaaaaactcaatttttctttataatttattaagtttgttatacgggtatctcaagtgtacaatgaagaaagatgtggctgaagtgatttaatacttttctaagaattatagctcattagttactctagtcactattttgagatgggtttggtttcatattataaatatgaaatccaaatgtattggaaaacatacttgattttaaattcttgttggaagattgagtggtatgtattttcagttaaatatcctaaaaacttacagacagctcattgcccaatggtatttaaatggtctgatttttgaattctttcaaacaataactaggagatacccctcttagcaatagtgattatcttgcctaatgcytgtatcacaaagtttaaatatataaaatccttgctttctttcctatcataaaatagtacatgattattcttccaattcggaaaaatgtgaaaaagcacaagaacagaaaataaaataccttaaagtctcactgcctagagattttttttatgtgtttcctcatctacacattaattaaaaatgtaattttactgttccatttatcttttttcaattaacagtagatcatgaagatctttccttacctataaatatttttagtggctgcagaagattccattgtatagagaagtacagcaatttatttaactaggcctcattttttgctatatttaaacaatactctgtaggtcaatatacatatacatgtacatacagtaagccctctatccatgttctattatctgtgggttcaaccagatcaaaaatattcagaaaaaatgattgtgtttgtactgagctagtaccaatttcatttttcttgtcattattctctaaacaatatggtataacaactatttacataacatttacatttattaggcattataaataatctagagatgatttaaactatttgggaagatgtatgtaggctacgtgcaaatactacactgtcttttataaggggcttgatcatccgtggattttgatatctcagggggatcatggaaccaattccccatggatactgagggatgactttatatctgagaacatacatttatggagatatctcattatttccttagataaattctaaggaaatattggaatcaaaagatatacacattttaaatgctaatatgttataatgtttttaaattatgagattattttatgggcaaagatataactacaaagatttagaaatagcttatatttctaatgatgcatattcattattgaaaaatagagagaaacataaggatgaaagtgaaaataccttttattattctatcagccagatataattgctagtgatattttggtgtaatttcttatagaaattatatatatataactttagaacaaaatttggattattttatatacatatatgtatgtgtatatatatgtatatgtgtatatataatatatatgtctgtgtatacacacatatacacacatatatgtatgtgtgtatatatataacatataaatacaaatataacattttgaattcatctaattcttattaatattggtagacaattctgaagctttttaaagaactatatccctatggctgccacaaatggaacaccaactcagattggcttaaaccattagaaaatgtattatttcttctaactgagaatccaggggaatgacttccttytcacattagagtgagatgctcctccgtgctatcaaggaccagtttctgtcactcctctctgctgtccttggctttgtcttcctcctaaggctgattccacttgtggttgcaactttacctccagggggcaatctgggctaccagattccttgctcaagccagcagagggagaacctcttgctcaaccatggactgtatgtcctaccctttatgcatactcttgaacatgatggttgctagggatttattggctcagatcacggtttcccaaacttccctgatgacaaggatgaactgcagctcttgctaaaaataatatagtgtctggcctgcttgctggagattataattcactgggtctgggaaggggcctgggaatttgaatttttaacaagtaccctgagtgattattgtcattaggggggtttgagatttaccatagtggaatggatattgatgagttacatgcacgtccaccacagaactgaggtgtttgttggctgtggttttccaaccaggagacagtacttgggtagcatttatttatttatttaaaactgaatttatttttatataatttaaatgtgttggcttttcatattttaccctttactactatttataggttactttttgcaaacacaatttaataaggactggttggggggtaaaaatcactttattagaataattttacatataaagagttatttttgtgggaaaggtctctagtaagaacaaattcagaatatttacaagtgaaaaacctcatcctgagtgatttgaatgatatcaawtcctgatgtatatgaggtatcacatcatcatccacatcggggtcataaggaacataattgattactggagttggcaattgtgaaatcgcttttgcaacttaactaagtagaagttggaattctcagtagttttttttctttcagaaaagaatattctcataaatatgttacttgcctttagaaaaaaattggaacaattaagtacgaaatcaaagggactgttgacttttgaatatatagtttgttgttcttaaaaaggtatatgtaaatgatgatcttgacttctttattagggcctgaaataactactctttccactttaacaatcaccctagagctgcagctttggaacagttcaagtctcttggtgctgagcccttggaggtggacttgaaggaatctggtgagggacaaggaggatatgcaaaagagatgtccaaagagttcattgaagctgaaatgaaactctttgctcaacaatgcaaggaggtagacatccttatcagcacagcacttattccaggtatgccattaagtaaacggttattttaaaagcacttttactctttttttttaaaaaaaagcgagagtgaatgattgcttaacatttgaatttctttaaggaaggatctagtactttctattataaaagtactagaaaacgagaaaatatatgacaaaattcatagtcattaataatttccttcaagtattttttctgtgaaaaaattttttttttgagatgaagtcttgctcttgttgcccaggctggagtgcggtggcatggtctcagctcactgcaacctccgtctcctgggttcaggcgattcttctgcctcagcctcccaagtaactgggattacaggtgtccaccaccacgtctggttaatctttatgtttttagtagagtcggggttttgccatgttggccaggctggtctcaaactcctgacctcaggtgatccgcccgccttggtctcccaaagtgctgggattacaggcgtgagttaccacgcctagcccttttgtgaatttttatataaattcatagattatactgtgtgtacaatgtttttttttttttccgaagaataaaacgccatttatttagaaaagattattattactattattttctctgcaacttaaacaacttcaatagcttttggggagcaggtggtgtttggttgcatagaaaagttctttagtggtgatttctgagattttggtgcacctgtcacctgagcagtatacactgtacacaatgtttagtcttttatycctcacccmccctcccactcttaacccctgagtccccaaagcccattatatcatagcttagcttccacttttaacaatgtttagtttttaattcctgagttacttcacttagaataatggtctctaactccatccaagtttctgtgaatgccattattttgttcctttttgtggctgagtggtattccatggtgtgtgtatatatgtatatgtatgtttatctactcgttggttgatgcgcatttaggctggtttcatatttttgcaactgtgaattgtgctgctataaacatgtgtatgcaatgtcttttctatataatgacttcttttcctctgggtagataccaagtagtgagactgctgaatcaaatggtagttctactttagttctttaaggaatctccatgctgctttccatagtggttgtactagtttacattcccactagcagtgtaaaagtgttcccttttcactacatccatgccaacatcagttattttttgatttttaaattatggccattcttgcaggagtaaggtggtatctcattgtagttttgatttgcatttccatgatcattagtgatgttgagcattttttcatatgttcgttggccatttgtatatcttcttttgataattgtctattcatgtcctttgtccactttttgatgggattatttatttttttcttgctgatttgtttgagttccttgtagattctggatattagtcatttgtcagatgcatagtttgtgaaaattttctcccatcctgggttgtctgtttactctgattatttcttttactgtgcaaaagctttttagtttaactaagtgccatctatttgtcttggtttttgttacatttgctttctggttcttggtcatgaactctttgcccaagccagtgtctagaagagtttttctgatgttatgttctagaatttttatcgtttcaggtcttagatttaagtgtttgatccatttttgagttaatttttgtataaggtgaggggtgaggatccagcttcattcttctgcatgtggcttgccaattatcccagcaccattgcttgatgtatgtacaatattatattcataagcaggttcctctgctcaaacccttgataaattgattgttaatttatttacattttctttgttaagatactaccttctccttgtaggaaattcaaactgtggtgataaataagaaaaaaaatacagatcatttgaagttctaccagagagatgactgttattaatattttgatcatatttttctatatatgtgagagagaggggactttgtatgtatatgtatttatggaattttcagtgtatatttttacttatgggaatgaccctttgtcagttttaaattatttcctttgacatgttttcagccaaattgtgagctttttgatggtaggaattactttctagtccctttacaaatctccttctaaagagtattttgtactcagtgcatgactgatgtcaaaccaataagtgtttattaatcagtaagcagtagcttgatctaacaagatttgggagtgaagaaactgtcyaccttttatagtctcacctcttctcttcacctatcctttccttttgttattgaataatgaatamcatactgactctaattttttcctttctgaaagaaagtgggtcatataatgagagcttaaagggttcttggttgcttatgttagatcctagtgaaggagcctcactttctctgaggtactgtggagaattagaatttgctttgtcatgaggctatgaaagaggagaaactctcctccagtagcttcccccacaacaaaaaacctggctaatataaacccaaggacaaagaattgattggcatcagatctgtgagcttgttggggaaaacaagccttccaaatgtgtttttctttctgtcctctgttaacccaggtgataggtgagctcgtctctccagataaccgcatccccccagagcggctagatgaagcagacaggtaggagtctgatatgggggtttcggcagggctcaggcaatgggagcatctgtaagtgtaggaatgaggcctgtggttggtttctggaggtgcatgcagatcagacaaaccccggacccaggatagtgtttgtgaaatctgtcagtgaagacataactcaggcacaagcagtgtcaggagagcacttcaggattcatcctttccttgtgtggcagtggctcctggctcagctgtttcacaggtggttctgaggaaggaatggggtgacatatgctgcagccaccatctgacctctgagaggcagctgcgcattagcggggaagttatgagaggattagatgtaacaagtggccagtagagggtgctaaaacatttactcatggagtaagccatgtggataggaagctagttttatttagtcaactcatactctaaagagctagggataatttgaatagagtatatagatttattattgattacagagctagatgtcagtgatagtactcaagatttattttataaacacatactgactttcagggccttcccctctccccataatattttattttttataagtagtttatagttagcatactttagtaaaaggtcagactgtatgacagtcttgaagactagttgaagaagttttattaatctgttccactaagcctttcttgttttctgaagccacgatctgaagattaatgtgaacattaaatttacagaaagtccttgatcagtacctcagcccagagctcaccctcaaaaggctggctgaaaaaggccttcagtttcttttgggaaaaaaaaaaaaaaaaaaagggaagaaagaaaaaagtgaattagaatattatatggaagaaggtgatttttctaaagatctttcctatctctggggcactgaaaacggaaagcatgagcatttaacaaaaatgactgaaagagtacatgaaggtacaaatgccctttggaaaacaatatccttggcattatacctttactggtttatgtcctgagcctttgcctgggtcccctgatgatgtatctgactcttgaatgaccctcagagcagaaattgttctgaagttttccttgagtggattcaaaggggattaagtcaaatgtcagaaattctctaagctaagatttatagactgagatccctggaaggctggactgaaggcctggtgtggataagaatgttgagaggcagacacaggtaagtaactagtttcagggagcaactttacggagttagtaaatttttattgtcctaggtatacgtcacttggtggtcttgaaaaaacaatgaacttgtacttacgtagattgtatgtggaatgagatagttctgtagctagctagttgttatgctgcctgatatcttaaaccgtcatctcacccccctattgggttgagtgatgggttaaaggtgagaatttcacttaatgcaggtaacttgaggatggggccaagctgacagmcccgctttgtggtgctgtgcacacaaagaaaagctctctactttcctgtccagctcgttgacctttggggctaccattaaaaagtaaggcagccctgctgtctggtaatgttcaggctgtgctcataatcttttctgctaagccttttgagacacaggattttttagcatccctagtgatctgaaacccttttagagaaacttttcatagacatagaatagttaatcaggaagggactgaatcaggttgaaaatctgataagtacgttggggaggggagtatggtgtgggrtgagaaggaatcatggtgattttgcactgactgtgtcttgggcaaatttcacctaagttccaatgagaatgaagagaactatggagcacatgctaagtcctataccttcccagctctcccgtttcccacctcaggtctagtccttactaatttaggggaaccatagctattctaaggcctgggtttttgtttagcaatgatgacagtagcttgggcgacttgggttcccagcatcattagatgaaacaagccatctaaactgaayagagttggatcatagtctcccactccccaattacctgtggtataaagtttgcattccttggaggtatttcttggctttcattatctggtcctgatttagcttttgggtctggtgttaaactaatatcttattctctgggcctgatttcagccrtgttgactgctattatctcctcaaatgggccaagatacttttttgcctttgcacatattgctccttctctttggaatactatccttgcccttccctgctttttgaaatcctactcaactcaattactacatcctccatagtttctattgcctcctgctcagcagtagtgttcttttttcttttttctgcactcaaagaactttgcttgttcttcctattacagcagtgcttagtcccatcattcctcagttatcttgtctcccrgtgagtgcagcaggagtctttgatttatgccagcgcttggcatagtggtttgtacacaatggtggcttagcaaatgttgctgaactaataattctggataccttccttaggtcttggttggtacagttcctttcatttttttcagtgctgtccccaaattcttatagaacactctgttggttcacttttggataggaacattgcagaggctaatttaagcttgggaacttaactttcttaaattattcaaaactggarcacatgcccagtctgcagtttgaggtggctggctagctagacctctcaggagatagaattaggaagtagtggaagggctgtttgggaattagaaagtgtcctgtcagagaggaaggaacatattcattgcttgattgtaaattaaaataccttatgccatatgtacttgtgtctctttttaggcacaatccagattagggtggccatactttttgtttttatctatacttgttaggatctgtaaaatacacccctcaaaggatgtggacttctgtggtaattttccatgtctctggagaattgggtgggaggtgttttcctccaatatgcaagttccttacatatatgaacctgagatgttgctttgttctccatctgtcttgttaaatttatctttcatatggagtggaaatatagcgcaaaagaatgactttccatagtaattgttgaaacctgtgctttcgggcaagagagtgattgatacaagaataactatactctctagttgtgtaattccacaaagaaatattgtttttgatgactaaagtttttcccaaaagtaaggatttattattcattttcttattctgtatgcattatgatcataaaggacaaaactatatgctatagatcagttattcccaattcttttatattactttttttgttatctgattcatgttcggtaattccttcccttcaatgtattttatgattatatagacttttgtaatattgttatataaagtttcatttgttttgaggatattgaagacattttgaagaacagagagaaacttaagtgttgcaacatcaagggttggtaaccacaggctgtctacacacctcttcgtagctttcaatgcagatagagcaacttgtcctcaagtggaagatgccaaaactgtgaagttttccattgctatttatcagtcttgttcttagggtgtatttgagcacactttgtgagtgactgggccagatttaacaaatgttctgttaggaaaatttatggcatcgttatactttggtttggtttgttatttctccaaaagcatgttgcaatattggtatgcattatgcttccttcctggctttccctgggttgtaaaggattgggagactgaggctgtctttggcaaagcagcacaaatagcgttactgctaatgtactagtacttccctaccatatgcattgctgtatctccttccttccattttccttatagtttcttgtgcttcagtattagttagggtggtctagccctaaatctatgagttttgctataacagattaatccaacaatgcataatggctctgatgttacagaaattaacatcttgcttagtaatagataggttcacatattgatgggcagctctttttcatatggtcatttgggattcgggttaggacagtgttgccatcatcattatgaggctatgaaggttgctctgggactgtctctatttaagccagctatagggaaagtgggatggaggagtgtgcatggaaggccaggaagtggtacacatcaytcttgctttgcattcttttgctaagacttagtcatgtggccaaacttaactgtgaaggaagctgggaattgtctagctctgtgcccaggaataagagaacattgtattagtgtgctagggctgccataacaaaataccacagacctagtggcttaaccaacagaaatttattttcccagagttctggaggatagatgtataaggtcaatgtgtctgtggggttagtttcctctgagcctctctccttggcttgtggttggctgccctcttgctgtgtcctcacatggtctttcctctgtgtgtgtgcattccttgtttctctttttatgcttcaatttcctctccttttaaggacaccagtcagattgtcctagggcccaccctaatagactcattttaacgtaatcacctctttaaaggccctgtctctaaatacagccatattctgaggtattgggggttagggcgtcaacataggaattttgcagtggccacaattcagcccataacaaatgtagatttttgtgcacagctaacagcctctttcctcttctctactttgtaattttatgtgttaatgtttaatctgttcattggaaaacagaggaagggtcatagatttagagccagatagagtagattaaaattctggttccactacttaacagctgatttgtctctctgaatatcagattccttatctctgaaatgtggataaaaatttctaccttgcaaagttgttttgaggaatgaagaaaaagcccagtgtagggctgggcatagagaacattattgtaattctttcttccattggcgatgcctcgtcttctggatggtacccaggacacaaatcttactgacttttgcaataaaagtccagacattctcaaggattatgtggaccattgaagatggtgcctcatgaatccacccatgaagttacataaccagtatttattggatggcaatgtggcatgggtttccctggggagaaacatgacttaattgtttttgatatgaatttgctgaagatatccattttattaaggctgttttcccagttaacctcattctgacctaagttgaaagacgtgagaaagaaaataagcagtactgtttctattttttaaaacacttttaaattcttttgtagtaacaaaataataacatcagaatgcgtaatacaattttattgcttcaatttttaaaggattttggtagctaatgtacatctatacatatgttggagagaattcaaagaatgctatagtttctatgagaatgtatatttccttatttgtgctaccatttaagtttggagaattcctgtaacctgtgaaaccatggtaaaatcttgactaattttgctttttatttatacagaattttgcagctatgagaggtaaattattaagttaatcctttcaaaatttttataaacatgttcttyaattatgaggtaaaagcttgtgtttaggtttcttctttaaatagatctttaggaatttttctaattttctaaaatatgctgttgactaatcatatttcagaagtattacatttagaaatatctcaaggggtccagtttgtaaaagccaactatttgccagcctgactttctgtctggttccttatacaaataattatgcagacaaagttttcctgtggttccagggataaagctcacatataaagtactctgcttgactrtttaagcttgggccagaatctctttaggctcatgaacacagctttcatatctgtgataaacagagtagaggggttgctgtatgtactatggagccagctaaatcagagactcattagataatggatcagtggattagatgttcagcactttcttgccatattctatattttacataatctatcatttcttattctcacatgcatacatatatgtataaaaacccttttgttatcattggtaacattttaaaagcttaagactcagtactttaaccccatcagtgattttgaaatgctaaaagagattttggtatggatccattaggatgcctttagctgccagaaacagaaattctaatacaacctgccttaaggtaggtgatttcttgggttctgttaacagaacgtagtccagttatagctgtggataggtgtgggctgggacactctgactgtgctccttcatgctytcctctctgagttggcttcatcctcagtgctgtgcagaaggcagcaacaatttcaggctccagtgtgtacaacacaatatctagaggaggtagtccagtgctgatggcaccctcttgaagagcaaaaagaaggaaacttctttttcagaaatccttagcacattttccctcatttatattaaccttgattgatttatgaccatttctgaaccaatccttgtaggtagggcaatgagatgcacctcggcttacacctggatttctgaaccagtcactaataaggtgataagattacccttaggccttccaggcctgcctctggagtggtgatatgatttggttgtgcccccacccaaatctcatcttgaattgttgttcccataatccccacgtatcacgggaaggaccaggtrgagagaattgaaccaagggggcagtttcccccatcctgttctcgtgatagcgagctagttctcatgagatctgatggttttataaggagcttcccccttcactgggcactcatttctttctgcttctgccatgtgaagaacatgtttgcttccctttctgccatgattgtaagtttcctcaagtctccccagccttgcagaactgtgagtcaattaaacccctttcatttataaatcacccagtctcggccagcaatttatagcagcgtgagatcagactaatacaagtggtttctgaagtcatgtctcctgaagcttgtggactgggtggaaaaatgaaaatcagcatagtgataaaaggaggaaatggatactgagtagatactaacaatactcagtgcaacattatgttgttataatgaaggttcttactgtgtaaatgataaagttcagcctatctttctttacctgctctattttacatttagtcaatatagagactacattacattaaaaactgtccttgtctgcctagtacttgttcatgagaaatctattttggtttggattaatagattctataattcatattatttatttgctactgtggagctaaatatctcatgtttttgttaaagcagaaagttttgtttttttttttttttagaccctctaatttgatgccttacaggtcaggaagttaggaatttccccatctgattacatgctgttgagtaattccagtaaatgatgctgaatgctccttggaatcattataaaattttgtggtaaacccatttcatcttcatgtcttgttattttaaatatttttagtggtttcttcttaattaattaattaattttttctttttggtatgattagagtgtgagggcttggttcttttcccattaagatagaatctgggaatttattgatttcagatgatcatgttaggcctgattcattcaaaaagatacaatatattacagaattttctggtaaatctttagtctttggtatttaatttaagctgtgtgactctttttgaatttagtgctgtaaagaagccaatgatatattcttttgctacatagcaatgagttgttaaagccatttttagaaattagtaattttttctccagtcacagatgagaaaaaacaaaaaagcagaacttagtttttctagcagctccttattttaatactttcaaaattgcatcttagtattcatttattgagaaaatacatggttgagaaaagatactgtgaattcagtaacatttaaaaatgaatttacgtgaatcacagccatatgtgcatatatcaataaatagaacacatgcatgaggcagtttttcagtctacagtcaattcatggtgcacatggagattcaaggatgccttacactaacctgtggtacacttattcactccaaataactgccaaccaattgggaaactataattcaaatttttacatgagtgctttaaatatccaactcttctagtaataaaattgttgaccaacctttgaatgcagccacttttagttgtaaaatattagactctagagcctaagtaaaatttttcttcctccatccaccctgcatatgggaggcactaaataagtattaattatgtcaatgaatgaatgaatatttgaatgatgactgtgagagcttgatgtcctacagttttcttggcaaaagtgtggaaataagtccctctgagagggaactgagtaacccttccaggggaacttaatgtccatgaaccagaagggagcaagaaatatttcataaagttggatatcatgccaaatccttcacccacagttggtattgtgtcagaaaatatttcttaaaattttctctccttgttaattttattctgtcacagtgactgattttttttttaagcgggctggtttaggaaatataatgatctttttgtgtatctcatcttttgcagataaatgataaaattaatagaaaagttaaagcccaattgggctttaaaaatgcctctcatctgccttcttttattaattttcctgtttcttttgcaattatgtctaaaaatacctgatgtgctcattattattttcttttttatcagcctttgtcagaaagatgtgcttattttctcttttatatctaggtctttcaccaagctgtctctggggtgtagagggcatctctttatatttgaagaatttgtaaacattggatatattcatttccatgttatacatgtacaaaatccggacacatcttcctgtttgtattccatgtttagttatgcccatgtctccctttattgtgttttggtacactccttgaaagactgccctaaccgcatagcttcatttgttgtagaagggagggcaggtgactttgagccaggcttttcaattggtaagtaagtaggttggggtttttctaaattcttctagttctcctagtaccaacttttaaactgccacttcttgacttaaaggagaaactggttgtgattatccaggagtactttattttatctttaaaataaaaatgatatgtggtttttttggagatgctgtaaagtacaaagtagaaaataaagatcacctgtgatctctccacatcatactaagagtgaactttttttttatttgtttttactgtttttattgaattttccatttgtatttgtttttcacttatctataggattatagtgttttgtttttattgaaatttctgtgagcttttcatcaatttttgtctgagaattgtaatatatacatttttcatatatatcatatatacacatatataatatatacattttcatatacatcatatatatctatattttcatatctattgatgttttcttttgtaattttcttcattgctttaaatttaggaagtgcttttttatccacagactggagagatattccccaaggcttccttttttgtcttttctttcattttatggattgattctcttcttttacaattaattcttatctttctagagtttaacttatggtattaggtttgggtagatattttttacccagatacctaactaatcatcatattacttttgttcttcattgtgtaatgctgcatttattatgcattatactttattatattaggctaccagggtaaggtagtattctgaaattgtcttctcagtctttctctctctggacttattcttttggggttttgcttatctggagcttttatttactattctgcttcttttttggctttatttttttcccttctgttttcaatttttatttctgcactttccagaattttcaaaaaattaatccacatgtgagtgcttgaaggcagctgcactgttacattcatgactgtattccctgtagcccttattaaaaacgtttaattttaaaattaaaacattttggagataaggaaaagcacagagaagaaaatagtctcaccactcaaatataccctgattttgttaaattttatatgatatagaatttactacaaactgtatcatatatgtattgtattatgtaatattaatctatgtatatataaatgagaaacattcatgtatataaatatatatctaaactgacatactattttgttatgtgctttttacttataataattccatgtctttaaattttcttgtgtgacttaagtaaaattttaaacttgttatagtgatacccttcagtctgtacaccaaataagttaacctatgtgaaagaatatgctattgttttaaaagtgattgaatttctgagcaataatagggacaaaacacccaacktatctctgttaagatgcaaacatgtccatgtgtttttcaaagttgtgttagccactgtacagttgttctgtggaggttgaatgagtgaaatcagaggasataaatgggttgtatattttgatgtttctagggagcctaaaaatggttttggacacttgatgtcttgcaaagtggtagcatacagtccagggactgatccttagctatggatgtctcaggagaaagaaggagtctcacatatctagggcaggagaaattagttagatgccaaatcaaatatgtgcaatcattggccaaagttgggtacaaataaggtgggaggaaaagctgtgctaaacaacagctgataaatagagaagaggctctggccctagagggtggggatggtgatgacagtaaatacctggaaagtacaggtagccctttaaatgcgcccctctatgttgaggcggccatatgatccatagctttaagtcactggagagccgagcagcatgacctttattttgggaatagtcctcagatggatgtggtttgcttcctcaaattctcatggttgagtaaagtttagttaagtattcaaggtgcctttgttagattacagtacggagggtagaggaaaggaatacttttggagaattttgagaagtggtgaaactaccagcacttcagggtattgtctctgggcaaaatgtctcttgattcttgctctttcttggaaactcaaaagaaagaacaagagatcttataacaaatcatgtggcagcgagcccagtgtggctgaaatagaagaaggtccaatggtgcagttttgagagggcatgttagaaaaagcacttcacccagggtgagaggcatttagtcccaggagccttaggatttggactttatctcaaaactatacagtttgtagcaaaaagaaggaagtactacataaacacttcacttgtatcttcacaaccttttatttccacatgtactacaaatgttatttttcctttttgaatcaaattctgtaaacacagaattgaaagctttcagaagaactaaagataatcaggctactaatgctctgctttctttttataaaaaatatgtatattttaaagagatggagtttcactctgttgtcccggctggagtgcagtggtgcaaaaatagctcactgcatcctcgagttcctgggctcaagtgatcctcctttctcagactcctgggtggttaggactataggcatgtgccaccacgtccagmtaagtttttttatttttgtagagatggggtcttgctatgtgctggtttggaactcctgggctcaagtgatcctccccacctcagcctcccaaattgttgggcttacaggcttgagccactgcacccagccatgctctacttccatactactaacattacaagtttatttccgttatcttttgatttaggtatttccattgttttatgaaatgtgaacacgatagtatgctgacagtataagcccctgttgaacatattgatgtatattagctcgaaaagtcctaaggtctgggttttcatcttctatgtaagaattagtgaacttcttaaaaagacattgtgaatttaaaatgtgaactattaaatgaggagaatgcacaccatgagaacaaggactttttttgtttatttaccactgtattcccagcaccaggcatagatagggcttgactcactgtagacaccaatacatagttgttgagtgggaataaaagtgtatgagggaactcctaaaccttttggagttgtaggattccactgttttgatttattggcattttcctgtctctcctcaaagttttctgtgttaaattaaggtaggttaatatgatgtgttagaaaatctggtgacatatgttaagataattggcaatgttctgttttgtaattcataaattagtattaactgtactcttgacattggtgacctttacgaattgttcaatttgggtgcatatagtttccatagtggtttattattaggcattttttaaaaaacagtcaaactgtttatctgttcatgaatgctgtggtgtataaaccgggtagggagagcagtgctgagattctcatgctgagcagatggcagggcctgcttgccagccacatggcttcctcctgcacactgcctttgctgctcacactcatcatatatttttctgaatgcccagtctcacccatgctatggtctttaggggtctcttggaaagagttaaaatttcagatgttaaattcctgaatgcccagagactactgtaataattagactttaaggtgttagaaaatgataatacaaattgtgctgctttctttgattttattaggtaaaaaagctccagttttatttaataaagaaatgattgagtcaatgaaggaaggttcagttgttgtggatttagctgctgaggctggtggaaactttgaaaccactaagccaggagaactctacattcataaggtatagcaagatgcrtyttctatctgtgatcacttctcatgtcttgagttatgrgggggtgtttatttctttaaatatttagagacattaaggcttgaaattttaaaattaaaaataggcatatttaaagctccygttgaaatatgtatttgtttatgggtatgtatgtatattcataaagatatataattacaaaacttagcattgaatatgaatgataattgttctagaatgaatgtgaacatagggtgatagacctttttgactataattttgttcatttagggaattactcacataggctacacagacctgcccagccgaatggccactcaggccagcaccctatattccaacaacatcaccaaactcctgaaggccatcagcccggacaaagataatttttattttgatgtgaaagatgactttgactttggtacgatgggtcatgtcattagaggaactgtagtgatgaaagtaagtaaagagatctattccttcctttgcttttaatgtaaatttgttttagaatttctgtttatggaagaattctattttggaattgagacatattttaataaggtattggtatgccagctttatgctgataaaaattatttgtaaatgcagaatgatttaaagaaaaatatttcaaagacttaaaagtacatgacttaaccaaaaatatacactccttttgaaaaacggagatgaacaaacaaattgaataaagtaaaaattaaacattccccccacttatctgctttcaagggtttaatttgcactcttgcttatatggtcctgtacacatacaaattacatatatatgattgtatatgtaacatggatattagtatttgtataygtatgtgacatatttatgtaaaatgatgttacaaattatatgaatttatatatttacataaaattatatttaaaagaacagggttttaaaaaatagtatattccttaagcaattttkaaatgctggattgactttttaatacgtactattttttaatgtctattaggatggtaaagtgattttcccagctcccacaccgaaaaatattcctcaaggtgccccagtaaaacagaagacagtggctgagctggaagctgaaaaagcagctaccattacacccttcaggaagacaatgtcaacggcttctgcatatacagcaggtgaggataccatttaccagggtttagtcttgattgtttgattttgcaagttatatatatatatatctatagatatatgtgtagctatatatacgtatatatagatatatatacacatatatatctacacatctatctatctatctctctctctctctctctctctctctmtmtmtatatatatatatatatatatatatattyttttttttttttttttttttgagacggagtctcgctctgtcgcccaggctggagtgcagtggcgcgatcttggcttactgcaagctccccctcccgggttgatgccattctcctgcctcagcctcccaagtagctgggactataggcacccaccaccacccctgggtaatttttgtatttttagtagagacggggtttcactgtgttaaccaggatggtctcgatctcctgacctcgtgatctgcccgcctcagcctcccaaagtgctgagattacaggcgtgagccactgcacccggcctgcaagtaatatattaattgtcaaaattagtaaatgaaatgctgttgtcttttttggattccattagtaatcgggcctgacagacttggtttttcagcaacatgttacttgtcccacctctacggaattggagattacatttattgactcagtaaatagaggcactgtgctaaatactggaatgaaagcatgtgaaataatatgcagacaataaacatttttcctgttatagaaagcattttaaatgcagtcatttatatatatactaaaaatatacatatatgtatttttgagacagaatctttttttgttgctcaggtaggagtgcagtggtgtgattayggctcaccatagcctcaacttcctggggttgaggaaggaagcttctcacttcagcctcctgagtagctgggactacaggcgcatgccaccacgcccagctaatttttgtatttttttttttttttgtagagacggggcttcaccgtgttgcccaggctggtcttgaactcctgagctcaagtgatcctcctgccttggcctcccacagtgctgagattacttttatctacatcaaatgtattgagaagtgatgtatgccatattgtgctggtgttaaatgcgtataaatataattacgtttttttctgttttttatttttatttttgtgaaatatcagttgtgattatctgcacacatgggtaggacaagggaagcaaagtttgccttaaagaataaatactacaatataggctatagcccctgaacatttgactaacattttaagttactcaacttgtaaacaaattcaacattttcatttagatctctttctttgtaatttaacataaattctttttttaaaattcatctttacaaaaacactaaataatttattgtaaagtgatgattaatattcattctggctatgcattgttggaggctgaaatacggatatttgattttaaattggtttctgtctcaaagaatgaattaaaaatgtttagatctattcagagccaaaacaaaaacaaaacaaaagcaaactataaagaattaaggaccagcaccaggcgcatagaattcttgtagagtcatcattctccaaattcccatgtgagtccagatrttttaaagctaaacatgtaactctccttgaataaagagtaagtctcagcaaaatgactgaaaaagcctctagtggtgaacactgtgagtagataaagcagtgtccctacttgcacttatttgttaaaaaaacaaaagaaatgaggttattgtgttgtacatggaacatattatgagtaggattgtaaatttccatttctctttcagattcataaggaaatgtagcaaggcacatataatgatttatttttctcagtttctcttatatttcttgaatcagggcatattgcttcttaatatatatgacagtggcatattccagtgaatgaaaggatgaacttatatgtgtttttctttatcttgaactccctctttcatattaaaaataagtatttttcttttatatgtatcaggaatgtatttgaacagcattcttcaaagaatgtgatttgctttctcttctttygtcagcctttctcttcctctgttatacagatatagaaatatagtctgacatacgttactaaatatattatagaaaatacattagtttattgaatagttgataagaaaaccttcaggtgtatgatgtaatttttatcatagatgcctaacacaaaagactgtggattgtgataaggtagtgcttcttgactaatgtggtcatgataatagctagcatttagtgactcctaggcattgtgctaaatacttcacatgtcttagctcatttattttttacaagaattcagcagtgggtatattattattttctcttccagatgaagacagagagggttgataattttacctatgaagacactgaagcacagagaggttaagtaacttgcctgagatgacacagctagggagcagcagaaccaggattcaaaccagactgacttaagaaaacatattcttattcacaaccctatgcaacttctctaatttttaactggaagacaaaatagtgttgtatctaactctctcaccagatggttaatgggctatgcactggaactttggatacatgatatgtgggtaggaaaataaattaaaactacagtcatattgaatgatttaatgtaaaattaatgtcaatccctagatattccrgtggtgccacttccaaagtaatagtttacatcaaggaaaaaggtaccttattcaggaaagttaacttctagttccctggtcacccactgtcattttctttttactgaccactaggtaacactttcttctgttgcagaacaactgtccacatgtttgctatcaaggaaggcgataattaaagatgtatgttcagagctgtttgtattctgcacattcttaatttaatttgtattttttttccttttgtttgtaaaatcctgtttgctgacttggtgttgaggctggagctgactgccctggccaacagtccagtccagattcaggagcaattgcaaaayttgtgtcccgggtgggtggaagccatatgttttggggaggtgctggagtgaatgaaattcttcctactcttttaaaacccctattcctcagccaaatctgagagtgacataaaattgccttcataaaagtcttgtcttataaaggttgtgtcttgcccaagtagaaaatgctttggtagatcctctgtaggcctgtaatcgggaataaaaatgcttatataaacacatgtggcattgttaataaaagttaaaacagggaagaggacaaactacacagaggaaaatgtgcaaattgttattagtgtgactcataaatattactagatctttatagcttattttgkgggggtggtcagaaagttgggttttgtccacagtattcctccatccccccacttctcaactgtcaaatgtctaaaaaatctgctcattactggcaagggagtggaatttaaaagcattggctattccacatatttatgtatgtgcttttaatcttactgagataactggatgtcagctcaaacacactctttactctctttctctaggtctcacagggatactgggtttgggcattgcggctcccaatctagccttttctcagatggtgaccacttttggcttggctggcattgtggggtatcataccgtctggggagtgacccctgctctccactcaccactgatgtctgtgacaaatgcaatctcaggtttgttcctctcttgtttttcctcatctcaggttttcatagggttactcagctctaggaggactatcaatgccgtttataaagtgtgttttcaagttgttttgcttggcatctgagtcatctgctttggtgatctaagggctcccagastctgagagggtatgggatatgggcctgcagagtaagaggccgtgggagtgtgtcagctctttgggctgctcccatttcaagcagtgcagagccactgttatttcttccaagtttgatcctttttttttttttttaaagaaaaggattccactgataaaatttgaaaaccagtgttccacagaatcatagctgcaacatcctatagggctctccttggattcarctcagcattcagcctagcaaggctacaataggccccatgtggcatcaggttcaccatgaagctatgggacaggaaaacacagctttccagtgaggtggcatcaggcatttctctttggtgccrgtcttttcagcagttcatgcagcagtccatgtggttgcccaggatctattctctttgtcccctagcaatgggtcagatatgagagaatgagtcctacattggacaagcataggagctgtcctggcttgaaagcctcagggccaatagtcatcttttataacattgccataggcacagcttcgaggatctctgcagggaacatgtctagctccaagaggtgctgtagtcaggaaaacccaaagctaggcatccccagcaggcatttacagttcatgaatactttcttccagtttacatgcaaattatctaccagggtcactttttaaccataagcaatgttgtctataacactggtggatttatatctgtattagaggaacatcgctagaaagttaaaagaaagtccaattccaatgcagaaggagaaaaagttttgttaacccttttcccacagtagtaatttcagtgagaatgatgtgaagatgtgttgtcaacagtctgcataagcaaaattgtttatttcattttaatgagggtgtaagaaagctgccttgttttttaatattgagaactttaccctctatgaatctatgtatgtgaggtacttcagctatgatatttgatttggtggtgtcactatcactattaaccatgttaatgctttctttctagggctgactgcagttggtgggttggcactgatgggaggacatttgtatccttccacaacttctcagggccttgctgctcttgctgcattcatatcctctgtcaacattgcaggtatgatgtcagtgaaaggtctcagtactattttcaatggagacatacaaagcaaatataaatccatataaaatagacataattgtgccttcaaaaaatgtttcactctgaccgtaaatgctctttttgcaggaaaattagttattttgcccatctgtaatttttagaaactcttgataaaagaacaacccccagatccccaaaacaaacaaacaaaatgatgtcttgctacaagttaactggaaagttattgaatgcatagttttgaagttgggttagagctatcaccgtaacatctataaattagtataattttagataaaattttagtcttttgccttatcccagccagggtttgttactggaaactgaaagcctagcacatcactcatgtgtgagactcatttgatgctattttgtagctaacaattctttaatgtgtccaagaaacctggtgcctgttgatatggtatttttttcttttataatttattatagggttttacaaatgtaacaacctactaggaaaagataccaatctttgatctttcacattctcaagctttttgaatggcttttttttccttttagtcatgcagaaatagttttgcattctgatagcaagttttcttcctgaatatatttagtgttttttcccccacctctctaatggaactggcttgagtaatagaatgactttaaattttggctgggcacggtggctcacacctgtgatcccagcactttgggaggtcaaggcgggtagatcacctgaggtcaggagttcgagaccagcctggccaacacgatgaaacccccctctctactaaaaatacaaaaattagcccagcatagtggcgcgagcctataatcccagccactcggggggctgaggcaggagaatagcttgaacctgggaggcggagattgcagtgagccaagatcgtgtcactgcaccctagcctggtcaacagagtgagactccatctcaaaaaaaaaaatttgaggttgcaaaatgttactttaaattatatttgttcctaggtgataaagatgtgcttaaaacagaaaaattgtagcactttaaaaaatcatgttgctcagtgagctcaaagaggtactatgttttttatttcctttggtttgctaaggtggctttctggtgactcagagaatgctggacatgttcaagcgtcccactgaccccccagaatacaactacctgtacctgctccctgccggcacctttgttggtggatatttagctgccctctacagtggttataacattgaacaggtaagatgctctttgtaagtttttatatttaccacaatattttcttctctattagatttaacattgttagttatcctaattcaaaktatcgagcaaatacaactctgtcaagcaaatacaacaataaccctagaaacatcttggtcaaactgagcattctcttcccctaaggatcaggaccctggattctagagacagatttttctggtaactgagtttaaatatgggtttatgtctttgttttgatacatttttccacatgtaagaggagttaaggttatcagtatcttcattatgtatctagctagattgcggtggatttataatgaaacaatacaaaatttgaaaaattattattaagtactattagttcttttcctattcttcctctacaaatccagcacatcatctcttgctactaagagatgttatatattcataaaaaaatccataaagaaaaggatagtttaaacttaatgttgtatagaaaaacagaaataatccagctggactttgaaagttccaacttgtaatataacagaccttcagctttgttctgaactctgtattttctatttcttttcaatggctgtcttttagtttcttctrtgtttccaacctgcagtatttattgaatgaacaattttttttttttttttgagaagagttggagcagtgagtcagaaagaccttagtctgaattccagatttccaatttattgatcatttgccttggagaaaatatgcaacttctttaagctttgattctgtcttttgcaaaatgaggataatgatttttccctcttgtggatctcatgacactgtgacaacacaaataaaacatgtggcaaagcccctggcacttacctcaggggttggctcttttacagcatttggtcaggtttagtatttttagatccagtaatgactccatttaaatttaggtacttttatgtgtatttgtgcatgatagcaaatccagaaaaaatcaatttatataaatggtataagtgcaaatacaatataagtatttaatatgttaatattcctaattggcaggaaaatatattgaaatctctaagctaatagaccaaaggttttaataatctctctctcacttttcctttgaaaagatcatgtacctaggctcgggtttgtgctgtgtcggtgccttggctggcctctccacccagggaacagcacgtcttggcaatgcactgggcatgattggggttgctggaggactggcagccaccctcggagtcctaaaaccgggcccagaattactagctcagatgtctggagcgatggctttgggtggtaccattggtaagcacttgtgggcttctgccttcatgtgaactccagtttctcaatatatatttctaaggtccatattgatgaaataattaaattttgttcatggaagttgcttcagttaatattattttggtgaaaattcattccagttggtgtaattctcattcaaatacattttagaacactgaataaatgcatcaactgagtcaaaatatcctatactcaattcttatcttcctttactgactgtgtcccgttagctgataatggaatgggggattggaatccttatgtatgtactatacataagctaacttttgttctgctgggtataaataacagccaaagattctgcttcatagacctgttaaaaatgaaaaaaaaaaaaaaaaacatgtgccagcagaaaaactactgttttaattttattcagttgtttgctggattgttaaattttcaggaatttttaggctgggcatggtggctcagactgtaatcccagcactttgggaggctgatgtgggtggatcacttgaggccaggagtttgaaactggcctggccaacatggtgaaaccccgtcgctattaaatatacaaaaattagttgggcatggtggcgtacaactgtaatcccagcttcttgggtggctgaagcatgataatcgcttgaacctgggatgtggaggttgcagtgagctgtgatcatgctgctgcactccagcctgggtgacaaagcgagactctgtctcaaaaaaaaaaaaaaaattttttttccaggaatttttaaagttgattgttaaacacagccattattaaatactaaattacataaacttaaatgaatcagaaacaaagttaataatattaaaaactcgtaactttctaattaatttactaggttttattgtctatgctcttgaggttacttatgtctattgtatgtgtatagaagaaatactatgtatcagtgggctgtggtacatctctttccaattctacattcaatgacatcacattggtagattgaaatttgacttggtagcagtattgcagtgtggaaataagcaaacgctacaaatctgggcttgatttattgttttgtttattgtccagacgtgagaaagtgatggagaaaatgttaatgatgcagcttaaacttgagatgttttgactgtagctgtgacattgtgaatagcacaaataattgagcaaataatcttccagtatttgaaaactattatcagattcagcaataaagtcattcatatggttgataaatgagtgaagttctcgcatacattctgttgttttactttcgtcttacttattaaagcaaataaaaatatcaaacaatgttcctgttggaagtatgcttgttcatcagttgcaaacactaggttggctacagatgtaagagtttagcaaagatccataaaaacattctttgaaagtcaatttgtctacatggaattttcagtaaagagcactatttcttattatttgaaaattgtgtgctagccacctttatatcagttaaagctcatgtatttgtatgtgcatgtatttttttcccctggaactggttattaaatgtttcccagtggaacactggctttaggcctccttttatacttcctcaggaaagctttgactcttttcttgataatctctggggaaagggacttgaaggaaaatgtttgctctgtaggttcatggcaggaaaacctttagacatgatcttagcaaatattctgagccccactccttctgtatcacctacctatagccatgcagttccttcagaggctcctaatttgggtatttactgcccagatttttgcatttctttaccttgggactttgctcccacctacccacctgaaaaccaaggtcttcttcatgttccaggtgtttcttatgtgctcaggagaaagcactggctatagagaagagggcctgggttgcaatggggagaatataagggaatttgattagagatttaggtagtctgaagaagtgttggctaggggaaggttgggagtttgtgacgggaagaggcacgcattgatgctgggtgttcattggagttgggtcgtgcttaggtgtgtggagaaaaactgctgttttgaaagggtatacaagttgagcatctttaatccgaaaatccaaaatgctccaaaatccaaaactttttgagtgctgacatgacatcacaagtggtgaattccacacataaatacttaacacaaactttgtttcaagcacaaaataatttaaaatgttgtttaaaattactttcaggctatatatatatgaaacataaatgaattttgtgtttagacctgggtcccattcccaagatatcttattatgtatatgaaaatattccaaaattaaaaaaaattaaaatctgaaacacttctggtcccaagcatatcagataagggatactcaacctgtatacaactagtgcccttaccttctgtacagcccctgtagagaatatttagcccrtactaggaactagataatatttatttgtgacaatggtggaaatccttaagggtgatctttgttgtggttacttctcaaaagtttgtcaagttttaatttatttttgacctttcataacaggattgacaattgccaaacgcatccagatttctgatttacctcaattagttgctgcttttcacagtttagtgggtttggcagcygtacttacttgcatagctgagtacattatagaatatccacattttgctacggatgcagcagcaaatctcaccaagattgtggcctacctcggcacttacattggtggcgtcacctttagtgggtctctcattgcctatggaaaattgcagggtaagtgattcagcataacatagaggtaaatatctactgtttagggcatttagggatccattttaatttcagaaaatacattaacagggctgggcgcaatggctcatgcctgcaatccagcactttgggaggctgaggtgggaggctctyaagcscaggagttcaagaccagcctgggcaacatagcgagaccctatctctactttttataaaaaataaaatattactactaataaaaaagattaaaaaaaatgccttaacagtaaaactgttaggtgaagagtattcgtatagcactcagaaattgtaagagtttttttcccctcatccttcccctttattgatacttagtaagtctcataaagctttgaagctgtttcatttgcagacagctaatggaggaaattagtgaacagaaatttgcatggagggactagttgacttttgataatatatgtgaactaaacagcatcctcataatccttggttagagatgactgtgtagaattcacagaaatgaactttatgtattttcttacaacacattctgaattgtaactactatgtgcttggctctaggtctcctgaaatctgcccctctcctactgcctggaaggcacttactcaatgcaggcttactggctgctagtgtgggcgggataatcccattcatggtggacccaagctttactactggcatcacctgtctgggttcagtgtctgctctctctgctgtcatggtaagaagtcagagattgaaaagtacatatttggtgaagaactgggaatattttgttagattaaagtgtaatcatatttttatctcttcaagaaccttgatggaataaaaatgttttaaaattacgtcacatgtgcatctttttagaatctggaaaacatagaagagtgtaggaagaacattattctttcttgcaacttaattgttcattttaaagttgtcacatgagacacctttattgctctggagtcttttcaccggatcaatgtgttggtgaacaggagcttaaaaaggccaagggtttcaatgtattaggtgcctactatatgacaagccctacaaaatagtgcttcggggtttatacaatacaagtaagatagtctctgcccaccagttgctcttacatcattggaagatatgacacgaaatcaaataagtataaaatgaaatgcagttaaaaaaccctgtatgctcagtgagagtattcagtgaaggcttttatgataggtttggctttcttctttctctgcaatttttatatttagtgtattgaaacacacagtagtttttagttgtctatgtgacagtctggcatcttatatcaatgtatgatgctgttttatgcagcgctatttactgttattcactgttactcatgttctttcagtgtgtaatccgtagacaaggtttatatttaagttaaaaaaattatctacagtaactaacacaaagttagacacatagcaattgcttatgaaatacttactggctccttgattgagaaacacctaatttatagtgtaaaaatgatacttatttttgtgtgatcatggcagttaggtcatgattttaacacagaaattttagaacactgaaaagtaaattaaaatctcatctttatattcacactcatggtctaattttattctggcttattgcactggtttttgttttaaacaaaagaaaaataattttgatatttttaatctaataaagcagaataggttgatgaagtctcaaaataaaagatatacaaatgtgattgggtgaggtggctcatgactgtaatcccagcactttgggaggccgaggtgggtggatcacctgaggtcaggagtttgtgactagcctggccagcatggtgaaaccccgtctctactaaaaatacaaaaataagccgggtgtggtagtctgcgcctgtattcccagctgctcgggagactgaggcaggagaatcgcttgaacctgggaggcggaggttgcagtgagccgagatcatgctattgcactccagcctgggtgacaaagcaagactctgtctcaaaaaaaaagaaagaaaaaaagatatacaaatctaaaactttaagaattgttgtttttgggaagcagtgactatgatatttaaaggatttattggttctatgagaatgtctgactaagacaaagtattttttgaatttattttattgcttttggcttaaatgagtaatacatgaatatgctctcattgtaacaaacaaaaaaaggtaaaaacatgtgaaataaaaagcaaaaagctttttcctttcmtgtgtttagtaatttcgagttgtatcacggacattgttaatgatacattatagacattttggatgttatgttatattccttcaaagggtattgattattattatttatttatgtgtttttgtagccagctaacttggctaaactcaaattccaaattttgactcccttatggtgggtggtggggggcagctgaaatctattgttattttatccttaacaggattgcttggagtctgtctcacatatgtgtagttcaagagtcatccagagatttgagtagaatttataaacagaaactgggactccttccctctagcctgcttctttgtgggattccccttattactttccagctgccttagtcatctcaaatgctatcttcaggatcttcaagtcagtaagactgtgggcttatattttataatttccttaactggtaccaacaggggattgccctcagtctaaagccataaaaactgggaaattcacttagtgtcattgtatttttccaaatgtagacgcttctccagtttctgcctgcttttcatcactgaaaagtgtttttttaaaatgtagggatttttttttaggggggtgggtggctcagtgtttatagttgttatacctgtggaagtgttggtcagatgggagacacttattaccggaagtggaacttatatgtaaatatattaatgggaaaactagaataattaaggagcaaaatgttaaatgtcagaggttttatttttatgttattaattttgagttctgatttgattgttgttctagggtgtgactttgacagctgctattgggggtgctgacatgcccgtcgttatcactgtgctgaacagctactcaggctgggccctgtgtgcagagggcttcctgctcaacaacaatctgctgaccatcgtgggtgcactcataggctcgtctggtgctatcctgtcatacatcatgtgtgtggtaagaaacaacacatacatgaaacaaaaggaaatggcttcctgaaaacatggatgtgcatgtcatttcttttattacccataaaaatgaatattgtaggctgggcatggtagctcacrcctgtaatcccagcactttaggaggccaaggcaggtggatcacgagctcaggagttcaagaccagcctgcccaagatagtaaaaccctgtctctactaaaaatacaaaaattagccaggcgtggtggtgggtgcctgtaatcccagctacttggtaggctgaggcagagaattgcttgaacccaggaggcagaggttgcagtgactgagatcatgccactgtactccagcctgggtgacatagcgagactccatctcaaaagaaaaaaaaaagagtatggtagctttgaattctcttcagcagacatagcagagtatttcatttgcataaatttccaagactgcctttaaggtacccaactgtaaataattaggaaaattaaatagaaagatgaaaatcttctagtgcctctctccatctggagataaacaggtaagattttggtttatttccttatgtatggcatatctgtgtatttacttgtctgatcgtgttgtatattgtcctacatttaaaaaaacttatatactatattgttgactttttgtcattaaaaattcttttaaaatattattttaagagactttatcgtgatccatcatatggatatacaaaatttatttaatttgcccttaatgctatacatatgaagttgtttgattttgatttctctttgtacatatctttgacatttcagatttttgtcttaagatagattcctagaatttataggctcattatacttatagccatgtttctggaaaggttgttctaatttacactcctgttggtcatctgtgagagtttctaccttagaagttttgtggtcagcatgatggttttttaaaaaaagaacagaaaaaagtaacaacactaatacttcctagcttttctgtttgtttcaagttctcttcttgatggcaagaagatgttctgcaaatattataattaaaggtttgagtagaactttttttttcaaattatggatgttattttctaaataataatgaaactaaatgaaagcagaacgtgattttacactgataaataatttagacaagaaagggatctgtattagtccattctcacactgctgtaaagaactacctcagactgggtaatttatgaagtaaagaggtttaattgactcacagctccacaggcttaacaggaagcatgactgtgaggccacaggaagcttacaatcatggcagaaggtgaatgggaagcaagcacatcttaccatagcggagaaggggagagagtgaagggggatgtgccacacacttttaaagcascagatctcgtgagaactcactagcataagaacagcaaggcggaagtcagcccccataatccatcaccttccaccaggtccccccgtggcatgtggggattacaattcgacatgagatttgggtagggactcagagccaaaccatatcagatacttactctaccttcattcttttattataatattttaaaaaactcgcttattttacaactcaggatttttcttatgatttaactgaaaatctcattgtaatttggaaggctgaagtatcttttcatagtaaaaaatatttttgtttcttaggctatattgcaaaacaaaggatttgatagcccaaattcaaaacaagctaaggggttttaaaattaaatagcctaaattacctggggaatttggaaaggtgaaggtttatgtatcctatttgaaaagtgtcaggctttgtgacagaaagaagaaacatttgtgaagaagaaatgtttatgaaattgtactagaaatacagttttctgtaaaagtaaacttttaacccttagtttgattttgcttcagttgatgaatttgaatgaccagcagggggcagcagattttcattattacttaaacttgcggtttgtcagaaagtggcttttatttatttatttatttatttatttatttttattatactttaagttttagggtacatgtgcacattgtgcaggttagttacatatgtatacatgtgctatgctggtgcgctgcacccactaactcgtcatctagcattaggtatatctcccaatgctatccctcccccctgccccccaccccaccacagtccccagagtgtgatattccccttcctgtgtccatgtgatctcattgttcaattcccacctatgagtgagaacattcggtgtttggttttttgttcttgtgatagtttactgagaatgatgatttccaatttcatccatgtccctacgaaggacatgaactcatcattttttatggctgcatagtattccatggtgtatatgtgccacattttcttaatccagtctatcattggtggacatttgggttggttccaagtctttgctattgtgaatagtgccgcaataaacataygtgtgcatgtgtctttatagcagcatgatttataatcctgtgggtatataccccagtaatgggatggctgggtcaaatggtatttctagttctagatccctgaggaatcagaaagtggcttttaaagttaaatgggaggatttgaaggatttgaatgttaacaaagcctatggcatgctgatatggggagaggagggaagaagacttgtttctagttcttgaaatgtcagcatgggtaatttctcattttatcctttttwaaaaatggttttctttaggtttttaaatttataaagagtattccccacatttctgtctgtgtctctcttattactctctttttccttcttcacttagtgtcttttattattattagttatagcaaccatagtaagtcttacagtaactcttctgtaacactagaataaggtagtaagaggtacttgttgaaagtactctcttctacgtgttctgcaattatatcatctttctcttatttttcttactcttttatttttttgatatgttttctctaggtcttctatttcttttctttccatttcactgccacaggcatgccacttaccatcagcattccatagatattttgtactcctattctgtatatagaactaccaaattattccgatagctgcctgagaccataaatatcatattgggtcagattaataattcggattcaagaacagtttaagttttaattaaaaaaaaaattctggccaggcgccgtggctcatgcctgtaattctagcactttgggaggctaaggcaggtggatcaattgagtccaggagttcaagaccaacctgggcaacatgataaaaccctgtctctacaaaaaatataaaagttagctgggcatggtggcacatgcctatagtcccagctacttggggggctgaggcaggaggatgacctgaacctggggaggttgaggctgcaatgagctgtgattgtaccactggactgcagcctaggagacagagtgagaccctgtctcaaaaaaaaaaaaaaaaaaattccaattagttaaagatgtttaatgtaggaaatttggaagaatcagaaaaggataaataaaaaaataaaatcacctaaacttccattaccacttaactattaacattctagtcttttttatatgaatgtttaaatacattctatttaatatattatgtaattgtctaaccttaattttaattaaggtttaattaatgtttaattttctaataatttttagctcctagtattatagcaaacagatattaccatagtctatttattcaaattcatattagttgtttttaactttctttttttcttggttgcagttttccttcttctacatccttgattatttccttaggtccagtttttataagtgcaattacatggtcaaagggagtaagaactttttgttggcttttgatattactaaattgatcttcacaaaggattcaccagtcaaagctcttacttgtgatgtgcaatgtgtttgtcttactgtatgatctctactcctaggcattgttacaaaacaagtcagaaaccaacaaatacaagcctgtcatatttttcgattttgaagatggaaattatcttttcttctacaattttctgatttctcactttttacattaaccttcgttgataaaccttctttatgcttctttattataggaaattataggagatttattcagtttcttcatggctgtgcttagcggctctaggtagatcggtataatcataaaaatgaaatagctacttaaaattggccattagtgcaacgtagcaggcattatgctgggtgctttacaaaatatagctcatttaatccccgcacaaattctggaggtaggaaatattattctcattttactgagaaagtattgtaaggcaccatttattattcacctttgtgtttgtggagtttggccaagtacctggcacattcacacaaattggtttgttaaatgaacattagagaaatattttatttgttaacttatttcatgttttagaatcttctccagatagactatgatagcagatatagcagagttaatatggtaccagtatgttgaccttcactcttatttattgaaggaaacacacaagtccaaactagaacagggtgattttattatgtgtgagggaatggaatgcaccccaagtggctaaccagcaatccctaaaattgaatttttgttctgttgggtgtcctctgagctcagtgctatggttacacaatacccaagattataaaaactgaaaaatgttgtcagtgtccaaacaaccaattcaaatgaatgatatccaaatatcatatagacattaacctctttatgattttacagtttctttgtttgtgatagtatccagattgcctcagaaatagaggtcttacaaaaattgaacarcattttcagatcgaattttctgatttttgcactttgctgcttggttccaaataaaaatagaacagaatgaagtggatcaaaagccaaatcaaaaatattttttcctttgtgattaattaattagtatctacaaagcattgaaatgagagatgctagtaaatggtatatatgttattattgctttggctttgtcagttttatgacctttctttggctttcagatttatttcttacagtgtattcagaattatgtgaattaggattctctttaatgtagaatgcaattttaattattggcttaatagcttaaaatgaacagtcttaaacagtcttgcaaattctttgtcttggaagctgggaactgttcaatctctggaacagtggtcataggatagtctcattaatcatttaagccggcaaaaaaagaaaaaagaaaaaaagagaaagaaccaaaacaaaaccataaatgctaaacatttgttgagaatgtgatgttgcaatggtaaatttagagataaaaataatttcgtttttaagagaccacatggaattgttatagcttaatggtgatgtaattgtggatacatgtttaacaagttgactatgatggttaaactactgtgtggttccttttttttctccctaagatgccatcagaagtgggtacccattaattaaatgtcctcagagattctttccttcttcttcattcagttttataggaggaaataatggttccttttaagccgagttagaataaaatggtttatttatccctctcctctgtccctctacatctgtacagcggtacatctactgctgtgatcttctgcaggactgtgtaataagggtgatgaaacctctttgttcactggatttttttttctggtattttatttatttatttattattattattattattattttttagtatttattgatcattcttgggtgtttctcggagagggggatttggcagggtcataggacaatagtggagggaaggtcagcagataaacatgtgaacaaaggtctctggttttcctaggcagagggccctgccgccttccacagtgtttgtgtccctgggtacttgagattagggagtggtgatgactcttaacgagcatgctgccttcaagcatctgtttaacaaagcacatcttgcaccgcccttaatccatttaacccttagtggacacagcacatgtttcagaaagcaccgggttgggggcaaggtcatagatttacagcatcccaaggcagaagaatttttcttagtacagaacaaaatggagtctcctatgtctacttcttcctatatagacacagtaacaatctgatctctcttttccccacatttcccccttttctattcgacaaaaccgccatcgtcatcatggcccgttctcaaggagctgttgggtacacctcccagacggggtggtggccgggcagaggggctcacttcccagacggggcagccaggcagaggcgcaccccacctcctggacggggtggctggccgggcaggggctgccccccatctcctggacggggcggctgccgggcggagatgctcctcacttcccggacggggtggcggcggggcaaagacgctcctcagttcccagacggggtcgcgccccggcagaggcgctcttcacatctcagacggggcagcggggcagaggcgctccccacatcccagacgatgggcggccgggcagagacgctcctcacttcctagaccggatgacggccgggaagaggcgctcctcacttcccggactgggcggccgggcagaggggctcctcacatcccagacgatgggcggccaggcagagacactcctcacttcctagacggggtggtggcagggcagaggctgcaatctcggcactttgggaggccaaggcaggcggctgggagggggaggttgtagccagccgagagcatgccactgcactccagcctgggcaacattgagcactgagtgagcgagactccgtctgcaaccccggcaccttgggaggccgaggctgtcagatcacttgcggtcaggagctggagaccagcccggccaacacggcgaaaccccgtctccaccaaaaaatacgaaaaccagtcaggcgtggcagcgcgcgcctgcaatcccaggcactcagcagcctgaggcaggagaatcaggcagggaggttgcagtgagccgagatggcgacagtacagtccagcctcagctcggcatcagggggagaccgagcagagagggagggggagggggagggagagaagragagggagagggagatctatttttttttttcctgcctcaggtttatttgtacaaatagcacaggaggaccccagccccatgcagatggtagcccagggacgggggtggggggtcgcaccagtccttctgtcctcacgttggcagagatatctactctgaaggctttgtaggggcctcggtacctttgggagcctgagctggaactgaagctggagctgcagcctgggccttggtttgatccttggccttggcctttggccagcacagcctgggccccttggcaatacaggcacaaacacgcttcccaagcttggggtgggcaatgtaggcaagtggatcgagcttgcggctgacaccctttgggatcttgggcttaacctccttgggctttacgagggccttgatagcctgggcacgtgcactcatggccttggcattgttggcctgcatcttctttaggcccttcttgttgtgcttcttggcaaagtgcatgttcctcaggaacttggggtccacccccttaagagattcgtatctttgtgatcggggtttcttgataccatttctgtgccattttcgggactggttgtgtgtagtgtggttcttggacttggccatgtctgcaccttaagctgccggtcccgaagtgcctagaaccctattttttattattatactttaagttctagggtacatgtgcacaacgtgcaggtttgttacatatgtatacatgcgccatgttggtgtgctgcacccattaactatttacattaggtatatctcctaatgctatccctccccactccccccaccccacgacaggccctggtgtgtgatgtttcccttcctgtgtccatgtgttctcattgttcaattcccacctatgagtgagaacatgcagtgtttggttttttgttcttgcgatagtttgctgagaatgatggtttccagctttatccatgtccctacaaaggacatgaactcatccttttttatggctgcatagtattccatggtgtatatgtgccacattttcttaatccagtctatcattggtggacatttgggttggttccaagtctttgctattgtgaatagtgccgcaataaacatacgtgtgcatgtgtctttatagcagcatgatttataatcccgtgggtatataccccagtaatgggatggctgggtcaaatggtatttctagttctagatccttgaggaatcgccacactgtcttcctcaatggttgaactagtttacagtcccaccaacagtgcaaaagtgttcctatttctccacatcctcaccagcacctgttgtttcctgactttttactgatcgccattctaactggtgtgagatggtatctcattgtggttttgatttacatttctctgatggccagtgatgatgaacattttttcatgtgtcttttggctgcataaatgtcttcttttgagaagtgtctgttcatatcctttgcccacttgttgatgggattgtttgtttttttcttgtaaatttgtttggtttagttctttgtagattctggatattagccctttgtcagatgagtagattgcaaaaattttctcccattctgtaggttgcctattcactctgatggtggtttttttttttttttgctgtgcagtagctctttagtttaattagatcccatttgtcaattttggcttttgttgccattgcttttggagttttatacatgaagtccttgccatgcctatgtcctgaatggtattgcctaggttttcttctggggtttttatgattttaggtctaacatttaagtctttaatccatcttgagttaatttttgtataaggtgtaaggaagggatccaatttcagctttcttcatatgtctagccagttttcccagcaccatttattaaatagggaatcctttccccatttcttgtttttgtcagatttgtcaaagatcagatggttgtagatgtgtggtattatttctgagggctctgttctgttccattggtctatatctctgttttggtaccagtaccatgctgttttggttactgtagccttgtaggatagtttgaagtcaggtagcatgatgcctccagctttgttcttttggcttaggattgacctggcaatgtgagctcttttttggttccatatgaactttaaagtagttttttccaattctgtgaagaaagtcattggtaacttgatggggatggcattsaatctataaattaccttgggcagaatgaccattttcacgatattgattcttcctatccatgagcatggaatgttcttccatttgtttgtgtcctcttttatttcgttgagcastggtttgtagttctccttgaagaggtccttcacatcccttgtaaggtggattcctaggtattttattctctttgaagcaattgtgaatgggagttcagtcatgatttggctctctgtttgtctgttattggtgtataagactgcttgtgatttttgcacattgattttgtatcctgagactttgctgaagttgcttatcagcttaaggagattttgggctgagacaatggggttttctagatatacaatcatgtcatctgcaaacagggacaatttgacttcctcttttcctaattgaataccctttatttctttctcctgcctgattgccctggccagaacttccaacactatgttgaataggagtggtgagagagggcatccctgtcttgtgccagttttcaaagggaatgcttccagtttttgcccattcagtataatattggctgtgggtttgtcatagatagctctgattatttggagatacgtcccatcaatacctaatttattgagagtttttagcatgaagagttgttgaattttgtcaaaggccttttctgcatctattgagataatcatgtggtttttgtcattggttctgtttatatgctagattacgtttattgatttgtgtatgttgaaccagccttgcatcccagggatgaagcccacttgatcatggtggataagctttttgatgtactgctggatttggtttgtgagtgttttattgaggatttttgcatcgatgttcatcaaggatattggtctaaaattctctttttttgttgtgtctctgtcaggctttggtatcaggatgatgctggcctcataaaatgagttagggaggattccctctttttctattgattggaatagtttcagaaggaatggtaccagctccttcttgtacctctggtagaattcagctgtgaatccatctggtcctggactttttttggttggtaggctattaattattgcctcaatttcagagcctgttattggtctattcagggattcagcttcttcctggtttagtcttgggagggtgtatgtgtccaggaatttatccatttcttctagattttctggcttatttgcatagaggtgtttatagtattctctgatggtagtttgtatttctgtgggattggtggtgatattctccttatcattttttattgcgtctatttgattcttgtctcttttcttatttattagtcttgctagtggtctatcaattttgttgatgttttcaaaaaaccagctcctggattcattgattttttgaatggttttttgtttgtctatctcctccagttctgctctgatcttagttatttctagactcctgtaggcttttgaatgtgtttgctcttgcttctctagttcttttaattgtgatgttagggtgtcaattttagatctttyctgctttctcttgtgggcatttagtgctataaatttccctctacgcactgctttgaatgtgtcccagagattctggtatgttgtgtctytgttctcattggtttcaaagaacatctttatttctgccttcatttcattatgtacccagtagtcattcaggagcaggttgctcagtttccatgtagttgagtggttttcagtgagtttcttaatcctgagttctagtgtgattgcactgtggtctgagagagagtttgttataatttctgttcttttacatttgctgaggagtgctttacttgcacgtatgtggtcaattttggaataagtgcagtgtggtgctgagaagaatgtgtattctgttgatttggggtggagacattctgtagatgtctattaggtcctgttggtgcagagtcgcgttaaactcctggatatccttgttaactttctgtctcattgagctgtctaatgttgacagtggggtgttaaagtcttccgttattattgtatgggagtctaagtctctttgtaggtctctaaggacttgctttatgaatccgggtgcccctgtattgggtgcatatatatttaggatagttagctcttcttgttgaattgatccctttaccattatgtaatggccttctttgtctcttttgatatttgttggtttaaagtctgttttatcagcgactaggattgtaacccctgcttttttttgctttccatttgcttggtaggtcttcctccatcyctttattttgagcctatgcgtgtctctgcatgtgagatgagtcttgtgaatacagcacactgatgggtcttgactctttatccaatttgccagtctgtgtcttttaattggagcatttagcccatttacatttaaggttaatattgttatgtgtgaatttgatcctgttattatgatgttagctggttattttgctcgttagttgatgcagtttcttcctagcctcgatggtctttacaatttggcatgtttttgcagtagstggtactggttgttcctttccatgtgtagtgcttccttcaggagctcttgtaaggcaggcctggyggtgacaaaatctctcagcatttgctttkctgtaaaggattttatttctccttsacttatgaagcttagtttggctggatatgaaattctgggttgaaaattcttttctttaagaatgttgaatattggcccccactstcttctggcttgtagagtttctgctgagagatcagctgttagtctgatgggcttccctttgtgggtaacccgacctttctttctggctgcccttaacattttttccttcatttcaactttggygaatgtgacaattatgtgtcttggagttgctcttcttgaggagtatctctgtggtattctctgtatttcctgaatttgaatgttggcctgccttgctaggttggggaagttctcccggataatatcctgcagagtgttttccaacttggttccattctcctcatcactttcaggtacaccartgagacgtagatttggtcttttcacatagtcccatatttcttggaggctttcttcatttctttttactattttttctctaaacttctcttctcgcttcatttcattcattcgatcttcaatcactgataccctttcttccagatgatcgaattggctactgaaacttgtgcattcatcacgtagtttttgtgccatggttttcagctccatcaggtcatttaagtacttctctacactgtttattctagttagccattcgtcttaatattttttcaaggtttttagctttttgtgatgggttcaaacttcctcctttagcttggagaagttggatcgtctgaagccttcttctctcaacttgtcaaagtcattctccatccagctttgttccattgctggcgaggagctgcgttcctttggaggggggagaggcgctctgatttttagaattttcagcttttctgctctgtattttccccatctttgtggttttatctacctttggtctttgatgatggtgacgtacagatgaggttttggtgtggatgtcctttctgtttgttagttttccttctaacagtcaggaccctcagctgcaggtctgttggagtttgctggaggtccactccagaccgtgtttgcctgggtatcagcagtggaggctgcagaaccgcgaatattgctgaaaagcaatgttgctgcctgatcgttcctctggaagcttcgtctcagaggggtacccagccatgtgaggtgtcagtctgcccctactggagggtgcctcccagttaggctactcaggggtcagggacccacttgaggaggcagtctgtccgttttcagatctcaaactccatgctgggagaaccactactctcttcaaagctgtcagacagggacatgtaagtctgcagaggtttctgctgccttttgttcggctatgccctgcccccagaggtggagtctacagaggtaggcaggcttccttgagctgcggtgggctccacccagttcgagcttcccagctgctttatttacctactcaaggctcagcaatggtgggcgtccctcccccagccttgctgccaccttgcagttcgatctcaggctgctgtgctagcaatgagcgaggctctgtgggcatgggaccctctgagccaggcatgggctataatctggtgtgccatttgctaagaccattggaaaagcgcagtagtattagggtgggagtgacctgattttccgggtgccctccatcaccgcttcccttggctaggaaagggtattccctgaccccttgtgcttcccaggtgaggcaatgcctcgccctgctttggctcacgcttggtggactgcacccactgtcttgcccacactgtccgacaagccccagcgtgatgaacccggtacctcagttggaaatgcagaaatcacccgtcttctgcgtctctcatgctggtagctgtagactggagctcttcctattcggccatcttggaacccaatcctcactggactctttttttaaaaaagttatctatgacagaaatatcttaatgtcyraaatagtcctttaaatcaattttaagggcaaaaatttggtagaacatatattttgataacaatttcagaactgtataattcaaaactagaaaggattaatctagatcaatgagttgaatgtttgggacgtctcagatgtggctatttgtgtttccattaaacgttggttttaaatatgggaggaatgtgttaggaatttaaaacaccatgtcagctagggattgtgaacttaattaaaagcatttctttagctgggcactgtggctcattcatgtaatcccagcactttgggaggccgaggcaggcagatcacttgtggtcaggagtttgagacyagcctggccaacatggtgaaaccacatttctaccaaatatataaaaagttagccaggtgtggtggcatgcacctgtaatccccactactctggaggctgaggcaggaaaatctcttgaacccaggaggcggaggttgcagtgagctgagatcattccactgcactccagcctgggtgacagagcaagactccatctcaaaaaaaaaaaaaaaagacatcactttaattctttcaccctcttatcctttaataatacacgtaaagacatttcaggttttattttgtatgtaacaatcttagacaaatttgtcagactttgggctctgtaaaatgtcaatgttgygtctgataaacgagtttagattgaaagaacaattacaattctggcaacattttgattcatcatctttgaaatttacgttatttaggctttattaaagtatggcttcttgcttatcttctgtgtaccttttcctccctgcctttgtctgggccctactcagcataatggaaatgtctccaccaagctggtagcaggctgagccatcattgtgtggggtggccatagttgtctcgatgtggtacttatcattgaagatcttggtgcttttttacctttttaatactaaagtgttgtatttttaaaaaaagcaatagattgacacttatatagcctttaagttgtataacgaagcaataatatatttattacagcacttaaaatagagttcagtaagtttttggaaatttgttctgaagtgataaagtcagttatgattatgtagaatgacagtttcaatcacatgcagtgatttgaattcttaaaatgcatttgattactcagaacaactagttttttttyccctttcttttactaccccacctccagaggtctacaaatgaactgttttcaaaaccagahcagttactgtaacatatttcagcagtggcattcctatggtacattcttgagtgattataaatgagcatgagaagttcatttattttatttttcttttgagattatttttctagttaaaagagtgagtataaattttaaagagtatataaccttattcttctacctatttggaagtgaaatattttagagtcctaatgatgaacccagttacttctattaaaacttaggtatggggctttgtggagctataattgatttggaaaataagacagtatcaacccccatatttctattttcttgatgacagagggcagcaaaattctagatgaaatggatctttactgttttgattcttaccagttgcttcttcacagctggtatctgtgaagatggaatctgtagcagaattcagctgagagataaaattgttcaatcagcattcagacagtaataaatagatgtgattttttcattagtttattaattttattgataattttttcttgrtttctattttttttactgaaaatatatcagtgtgcaattgatttgatagggaaaaagataatgtggttctcagatatcttctgtcatttcaatttttgaagtgrttttcagaaaccagctgaaatttatctgattaaartgttttaaatgatcaaataaacmttttaaaatgattccaaatatcatatacacaacatttgtactattctcacaaagttatgtgtgttaaactctcacagctgataatttggctttctaggcaatgaatcgctccctggctaatgtgattcttggaggctatggcaccacttcaacagctggtggaaaacccatggaaatttctggcacacatacggaaatcaaccttgacaatgcaattgacatgattcgagaagctaatagcattattattacaccaggtaaagaaaaaaagcaaaagcaaataacctataatagctgttataattgatgacattaaaatttcttataataggaaagtagaattgaaacttctttagttttgaaaatataatggaaacaatagcaaatctatgattactaagtgaaaaatactgagaattctcagtttaaattaatattttggagatcacatggaaattctataaattcttacagtgggttctagccatrtctttctgtgattatgtgtacatgtttacatcattttcgagtcttttttcttctcattggtaatttttgggcccgttgtcaagattaaattagatatagtatatgaaagtctttagctcactcattagagttgcttaataaatgttgttttttcaaaaatgattatttaaaaaatgatcaagaatcatgtggttttcaacaaaatgaggcaatgtggcctagtagaaagagcttggtatggagtcacgatacctcacttttgttcttaattttgcctctaacaatctatgtgacattgcccaagtcatttaatctctccaggcctcaattttccagttttctgagttttagctcagttcttcttcactgttatcacaggatgctgtggtattatgagtcatacattggtttcagattaagattttaactctatcatgttatcaaatgagttttctgtaaataaaatctactgatttgacatgtgagtagtttactagttagttatgtactgaagtaaaaataggagacattagctgaattgagtgttaaagtgtaagccttctcaacttgggacaatatcactttttaggggcatttgaaataggtggatttgggtttttggttgtccaaagatgggamtgctactgtcaattagtggatggaagcagataaatgaaatgtactgtaacgtgtgggacactgctgcataatgaatcatcacacccaaagtagcattggtcttacctattgagcaatgctgttctggagtgtaaaggtgtaaagatgtagaggacacaatctatttcctctaggcactttccatctagtgattaagtcagataggtagatcagtaatgcaaggtgggttatgataagggctaaactgaactatgtagacagtttttcaatcacaagaaacctatgaaggtttgtagggaggcgacgatttgtttttaggacttagagaatagatggtgttgggatgggagaagccaacgggaatagcttgagcagagacttggcatttgaaaaaatggggatagaaaagtggggacagatgtgagattcattgtgcaggtagaatggacagaaaggagggtgaagatgactgaagttcttggttatacctgtaataacatcagaaatatggaaacagtttttagagtgtggggtggggggaaattttgagttctttttttgagacattaaatttgaggtgaagatgggacaagagccatgttatactggcgctcaaatgacaggtcaagcctgcagacagattgggaatcatcagatggttgttgaaaccatgagaggagctgagattttcaaggagaatgtgaggggcaaagttaaagccctttggaaacttatataagcggagaaaagaaggagaaaaactattcaaggaactagagaaagaataataacaaagttaggctgggacaggggaccgcagtgtcgtcaaagccaagtatgaagagagtttaaaaacatgagagagagagagagagagagagagagacagagacagagaaagagacaagagagggaacacccaaggttgtgtgcagtgtcgggggtggggttgcacagcagcatgagacactacagaagattgaggagcaatcattacattttcaatttcaaatttagggcaatatttttaaaagcccagcttataaatttgctttcatttctagtcctgttaaatgattgcctctgttggcataaacatgtgttttcatcaagagagaagttgtacttcatgtaatttcaaaataaaaaacacattcttctgtgttcttaatgttccttgcaggctatggtctctgtgcagccaaagctcaataccccattgctgatttggtaaagatgctcactgagcaaggcaaaaaagtcaggtaagcgtttgcagtggagaggcttgcactatgtgtaaagatgtgtgtgtggagaaaaggaaatacagtggacccttgaacaatgtaggggttagggcactgacccgcccatacaattaaaaatccatatataacttttgactctccaaaaacttacctactaatggcctactgctgatcagaatgcttactgataacataaacaaaatatgtatcaattaacaaattttgtatattatatgtattaaatagtagagaaaggaaaatgttactaagaaaatcataaggaagagaaagtatatttactattccttaagtggaagtggatcatcataaaggttttcatccttgtctttacgttgagtgagatgagaagaaggaggaagaggagttgttggtcttgctctcatgagtggcagcggtagaagaaaatctgtggataagtggaccctctcagctcaaacccatgttgttcaagggtcagctgtatatggcttctgaaaaagatgactgtttcttaaagtggtgttttacatgtgtaatcctaggtaaagaagttaagttgttaatgaacaagccatattctggtcttagtcttactatttagattttgctgttcctggattagcgtcaactcaaatattatcgactcattttagaaaaggaaaatgtgttattccaaattcttggagatttattaatggggaaatcggatgtcttgtttctctgtggtttgatttgaggaaagaggtcaagcgaagcattttaactacatcaagttgtatctttttggtttccggtcacactgaataaaaacaaaaggtcttaaaagagaggccttgaagagcaagaccaagtaataaacctgtgccctggttactgttttgctgagttagctgagttagccagtcagagtacttgtgctggactggatgcagaatcttaatctctggctggaatgtcccagctactagtagtggtgaaagaaacttagatgatgaaatcagggggctaccttaattgtattagtgtcggcagttaattgtattagtgtcagctgcactttatttcttccttcctttgtttcctacacttcctttcttgtctcactccttctccactccttcctccaatctatagtctgtgtttgtcaaatatatagaatcaaaatactattttgtggtgggaccagcatttctgtgacaagattttcatgtttattgagagtcttagatgaattgaaggtagaagatgagaaaagtcattgactttatttttaaatttttgtataagaagtctactttttagttacttattccaatttttacataggatattaagctgtgctttttaaagccatcattttgctgctgagaacatttgtaggcctgcaagtgaaaatgatatgttaaacaacgttttatgattttcctaaaaagaaactgttttctctatttagtccagatgtgaaaaagtgtaatgtattcgtaatgccctctttcaccacataaatatttaggagatgggtggcaatcataatagagaaagaaaaatgcctttcatgtcttaattatccttagggaagggaaggattaatttggcatacctctcttgttacctgttgatcagcctaggttaaccagacatcttggaaaatcagtccagtgttaaataggtggatgtggagtgaagaacatcgtgactgtagtgtagcttgaaggaaggcagcatcttaagggaaatgtcaaaggaaataagagagatgggaaaaatgatctgaaaggaaaaaggataagacaaatgaattttttgtttctgatctgattaaaattagaattttatctatgaggacatgatataaactactgttgtaggatgatttctgtgacagtgcttgggaagagtaattatttgatgaaaggtttaagagaaatatttaattatacatatatgaatagtttttcagttctacattttttattgaagtaattgtgtgaataggaccaaagccttttcatgagagagcttttcattgcttcacataattattaacatagttcaaataattttataaatttattaataatttattatgtaggatcagaataagattattaattcagtctagtttctctatttgtaagttatttatagtcatctttctttcatattaaaggtaaaatatattaatatattgtagtttttttttactatagtatgttgaattttcaacatgaactttgtaacaaattatgtaaatcttccatttgaattaaatggaagaggactattcttgctaaaattatgacagyagatcatcatatttttctgtgtgaattttttttattgaaagagatttgtagaaactttgtgattttgctttgtgcgtgtgttagcttttcacaggagaaatgcaaattttctttacgaagttaggaatatgtatatacatagatgctagcttttttccttttttttttaaagggcaaacgtctgtttgaacaagagatggctgcagcagttacctcatattttaatgaaataaatctgtatttacagtttgcagtaatttagtcctttcatcactctgtggagctcccacggtgttcattgagtacagctgctgggcctctggagttagcaggtctttgtgcctcaggaccccagcatgcctagcatccagatgtggtgacatattcacacacatcccctgtggaaatgtgccagtgtggacatatgattgtcatcaattagttatrcccaagtggtgccaagaaaaatcgcatctgtcatacagtctgtctggcttcatggcccatgattgatttagagacactcctgttttcctttactttgcccatagtcataatatgctcacgagctaagattatataatgaagcacatgacatttcatgacaagaactcattttagaatgtcatgaaagttcactggcttagacttttgttagtggccaagatatcatttgcttcccagtagcccagaatgcctgtatagcttacctaacttctgcttgatgtctaaaaggattttatgacaacaatcttacgacgtaagagccacagatattttgtctttttccttcccaatttttggactgattatatgataggcttttcattataaggcagagatartgttcccattgagtaattagggaggggtagaatatgcctgtaatcccagcactttgggaggctgaggcaggcagaccaagaggtcaggagatcaagaccatcctagctaacattgtgaaaccccgtctctactaaaaatacaaaagattagccaggcatggtggcgggcacctgtagtcccagctactcgggagggtgaggcaggagaatggcgtgaacccaggaggcggagctcgcagtgagccaagatcgtgccattgcactccagcctgggtgacagagcgaggctccttctcaaaaaaaaaaaaaaaaaaaaagaaaggggtagaatttttttattataattactgcttgattttctttctataaatcattgcttgaattatcacagaagtcatttgaatttattgaacaactttcaacttattttttttaattattattttgtttttgagatggagtttcactcttgtcacccaggctggagggcagtggcatgatttcagctcactgcaacctctgcctcccgggttcaaagcaattctcctgcctcagcctgccaagtagctgggactacaggcgcataccaccacacctggctaatttttgtatttttggtagagacggggtttcgccacgttggccaggctggtcttgaactcctcacctcaagtaaactgcttgcctcagcctcccaaagtgctgggattacaggcgtgagccaccgcacccggcctcaacttctttgattgactagctgatgttatgtattgctttcatgttaatgttctgctatatccttctactaataacttactgagaaatttattgctaggtactgagcatacaaggatgcgtaagtccagtcctcaaaagtttatagttatgaagaaatctctattaacagatcaatcaatgaatgaattccatttaatgtgatagtatgctaagacaagtagagtagtagtaagaatgcaaggagtagttagctgtccaggagatattttaaactttttacaacctgaaatatcttgcatgtttttaaaaataaatattttcatttattttttatgtactgtctaaacacatctagctgcctgtggtatttgcagtctaataatgttttacagtcttgtgtaatatggctataagtttaaatacatattatttttacttagaaattgattctttgaagacacttgaaaatataaaatattttgtccatctaactgtctaactggattcttttttttttttttttttttttgttggaatcttgctctgtcacctagcttggagttcagtggtgtgatctcggctcactgcaacctccgcctcctaggtttaagcgattctcccacctcagcctcccaagtagctgggattacaggcatgcgccaccacgcctgactaatttttgtatttttagtggaaatgggatttcatcatgttggccaggctggtctcaaactcctgacctcaggtgatctgcccaccttggcttcccagagtgctgggattacaggcgtgagccaccacactcaggcaggattttcctgtttttcatggataagtatgattcagataaacaaagtccagccttcttggatttgttatgtttttgggtggaggaagagtcaaggcttgcaaattggtaaagcaataaagtcatgtatttctgacgagaatagaaactaggccagttaaaattatcttgtatagtatttgagtaacgaaatagacattatttagcagtttcatgtcagctttgtaatacttttataaaataaagataccactattcatatccataaccattcattgaacaaataattataatatatactactctttcctaagctactgttgtaggtccaggggatacctcagtgaagacaacagctgaaaattcctggtcttatggaatttacattagttaattaattgattaattaataggcttcaagataatctgacttggagattataagcccatttgtctcccaatttcaatgctacttgaaacaccagagaacagctgtaacataggttattgtatcagagtttcaaagttatagctgccactatttggccttgaattagccagcgcttttggttttctcaaagaatgtggtgtgtttctttgcactttgcattggggctgccttctcgaaaaacatggtggcaggatagtgggtatgggttattcgtgtaactggtcaaatgagtgaaactttgatggaagagaggaaaaccaaagaaagtatgtgcattcactcacatctatgttcaacctattgtgtggagttgctagtaatctcccagatcaaaggtgtctgttatgctcctagaaagtggccaccttcatcccagattggctttatcttgtccacagcatattggtatggtggaaagaasagaagactgcattaaagcctgtgctttaggtgctttgtaaagcctcttttggtcataccactctaggatgcattccttataaactcttgtcacaggcattcctgtgatctgaggaaaaaactttcactgttgatgaaatcattgtcactgaccatcagggtgatttttggcttctggttttagtattagttacaggaaactctttgagctgagtttttacaatgaagttcatgtgaacaaataaataaggatcttgcttataaataattttcattttattgagctcattagccattkcattccagcagccatttaatagcatcataaaaattattcagacagaaagatgaaattatgtataattttaactaaatctctataatatgccagaatgtaatattcaagagttagttgcaaattgaattttttttttctggtatcattcttcataatcttgttgcctattttaaaatcaaaacagtgtcagtagtcatacagtttctattctgggcctggtagttggatttggttaagcgatgggaaagccagatttgggcacaatctataattactctcctcaggatggaaaaggtagttttgggacatggttttatagaggactgcgttgatgtttgcaccagaccatctgagctgatccttcttaggtgacagctcatctctttgggtggcctcagtgtcacaggccacatgtacagatggaaaatgtgactgtagcctgtcaaatatttcctgattcacattcataagacaaggtctattattctgcattagaaaaattgttcccctgagatattttcgtaagctttctttcataattttttttttttttctgaagaagggaaggccatggatgaacaacagaattcagaaacagagtagcagttcagcccttatttgccttcaaaaaaagaaaagtacaaagtgttctctaattctggcttttagaaagttctaggaagttaaatgaacacttttttttcactatgaattatatgagtgaattcatcagaacggctgcttctaagaaggattttggtggttttagaaaggtaggtgtttattcctttgcctgggaagcctcaccagagatgttgactctacaacccatctcattcgttagtttttgtggacagcagttgcctcatcgggaatttttttttttcacttccttaccatgtttcccttcggatggatagactagcccgacccagttggtccaggccttttcactaccaaggataatttatctaacaggaacaattaccctgctgacaccatgatttggaaatttttattcagaactgattcactaaaatgattgcttaaaaaaaaaaccttttccttgtagttttaataagtatgatttataactgtcaccagaagttctgatcagcatgtgataaaccaaagaaacttgccttttcagggagtctatcatatttttcacaggtgaaatgcataattaaatgtaaaaaaatactgaatatagtaatgaatcatttgattacctccagagaccctcctcagaatgtaacactgccacatacaaacaaaattccaaaggtccttgagctatagcccatactacggactttttattgtatccacagtggaatttccagcctgtttttgggacaaaacagtgtgcaaacatttttggtataatttctaaatgaagagttcctaccttaagaagcagttggattggaagatctttaagttctatttaaaccattaaggttttatagatttataaatatttatagttttaaaacaggagaagttagtagatgtttaacaaatgagccttctttttattttctgtttatgtattttgcctaatttgtcaacctcctagaaggttatcattaacatatttagaaaaattgtgggatgatagtattgggaaggcagaattccaaaatgctatcagtgtacattgccctatatccagcttgattttaaaatgtaaaacagagtaaaataagggaaagtaactgaacatttggagtatggacataaattttgcatggtgactcacaaaacatgtaagcaaatagttgaaggttgtaaagagcttakttttttwaaaaaaatctgttgatccttgtcactatttataatagcaagaagctgaaaaatggaaaaagcactctaaatagtttagaaaggggcccaattgtacttacagtttctttgtgtaactgttgaattgggatgcttgatttaattaaacattcttaatagtttattgctgaactaggtctggatatttccataatacaagaagcaaaacatagtttatttgaacagttgtggtaggacccatgtggtgaatgttttatattcttcaatagcctcacatgcccaagaaaactgctgctgtgtactctggtaggacatattgtctccatggtctgtgatcatggaaacttctgttgttgtgtcccctttaaaacatgtggtatctgaaatctaatgtgaagttgtgaaaaactctaaagaatgaggttcatgtcaccatatattataaaagaggcttttaaaaaatagtactttttgaattgcttcttyttcatattttaccaagtatactcagtattcgtgaatagttcttgtatacacttatattagtttttattcttccttggttaatttaaaaggttctgaagatcaggttgtttcatttgagtagattattctactttttttgaactgtgcctgggtctattcttaattgatgactgaagcctgagcttttttattatctaatgttccatgaaaggctctattgttttcatatttgagagaggaaaataacaaatactgttgaattttttttttttttgcttcaagatattgaagagattatcctaatttgatgacatttgttgtatctgtcaaccaaggaaacaacatttttgcctaatcatatctgttaaatggttaaaaatggccttttgaaatttgactgtatcaaaataaatgtgtatttgaatgttagttttgttcaagtttccagggagcccaacgtttataattattggcctcaatctagattgactatacagttttttagtatttttgatgtagctgcaaatacaaataatttctggcttttattggactttattgatttttactggcattacaagataaaaattagaaaagcaacccagtaagtgttgacattaaatcaacatttgttttaatgtgaaaatgtatgcttctttgtattaagtgattattaaaaatatrcatttatttgaaaaacagatgaacatttatattattatacaaaaatgtatttgaacaggataattgctgtgtacatttattgaacaattgtgtctgccaggtgttggcctaaagcactttgtatgaaaagctttttatacaaactacatcacttaaatccctcagtagtcctctgaggagattttattatcaatcccatggtacacatgaaagaatggaggtacacagaagtaaattgttcaaatgctttgaacctggcagtggcaatctagaactcttaactgctaccctatactgcttttctaaatcctttctctaaaaagagacatagatagtgtataaatcagtatactttattgggcacactgtgttgtttaaaaccccttctctccttctctctcttgaatggagtccttgcaatagagtggcaggaactggtaaataagacatggtttgttcctattctcaaggaactcttaggagagcacagtcatgtcaaccagttatgttattgtatagtaagaagtagatgcataaaggaagaattctgaaagcctgcaagatctttctatgacctcattttagttattttcctctgtagaatcttgtcatggtcagggatagctcattcttttttaagcatatacataataaaagataatgttcatagttgaaagagaagaactaaaaggttggtaggctttgcatgttgaaattctggatattcttcatgtgatgatggaatatcgatgagctttggccatcagttccgggaaattgctcattatggccaaccagtgtctgatataattaattttaatacatactttggggattagcctgttacattgtgccagaattttttataaactcacattgactcatcagtgtgcatatatatctctacacatttgactgtattctgttattcttctcaaaacattggcattctcttgtaataatcttgcacgtgtttttctctgactttagagtcataaagtttagtgtaataaattactgtgcaagtagatataaaatgataggtcctttgggatattaggcataacatgatggttatgttggtaattatttaccctttacaactagctcaacaaaaacattgtctttatgcagtctgcagctaatcaaggcatcaaaatgagaacaaatatattyagaggtccttaatttctaatttggtccaagatacctcagttaaagcctcaagatggtagccagatggattaatttaaagatgacaaaaacagtattaaaaacaaataaaattaaacaaaataagctagaatcaaggaaggatataaaattgaaatccaaaagtaatcacaacgtatatattgggttatttagctaaaatagaagtcctagttcactgaatttcaggactggagagctttgtggtaggcagaatagtggycttccaaagtgtctatatctgaatccccagaacctaatgactattttaccttacatggcaaaagggactttgtagatttgatgaaggtgaggattttgagatggggagattttcttggatcattgggtggctcagtgtaatcactagggtcattataagagggaggcaggaggatcagagttagagaaggacatgtgacagtggaagcagaagttggggtgatgtagcccccccaccaaggaaagagggaagactgcagaagctggaaaaggcatggaatggagtttgccctagaatctccagaaggaatttttaaaattttttttcaatttcaataggtttttggggaataggtgtttggttgcatggaaaaattctttagtggtgatttctgagattttggtgcacccatcacccaaggagtgtacactgtacccaatgtgtactcttttatcccttgccacccccaccctttcctctgagtccctaaagttcaatgtattgttcttatgcctttgtgccctgatagcttagctcccacttatgagtgagaacatataattttccatttggttttccattcctgagttacttcacttagaataatagtctccagttccattcaggttgctgtgaatgccattgtttcattcctttttatggctgagataccacattttctttatccacttattgattgatgggcatttgggccggttccatatttttgcaatcgcaaattgtgctgctataaacgtgtgtgcaaatatcttttttgtataatgaattcttttcctctgggtagatacctagcagtgggattgctgaatcaaatggtagatctactttcagttctttaaagaatcttcacactgtttaccatagtgtattgtactagtttacattcccaccagctgtgtaaaaatgtttccttttcactacatccccaccaacctttattattttttgattatgttcattcttgcaggattgaggtggtattgcattgaggtttggttttcatttccttgataattagtgatattgagcatttttccatatcctagtcggacatttgtatatcttctttgagagttgtctattcatgtccttaggccacttttagatgggatcgtttgttttattcttgctgatttgcttgagttctttgtagattctggacattagtcttttgtcagatgtatagattttgaagattttctcccactctgtgggttgtctgtgaatgaactctgttgattattattatttttgctgtgcagaagctttttagcttaattaagtcccatctgtttatctttgtttttgttgcatttgcctttgggtttttggtcatgaaatcctcacctaagccaatgtctagaagggtttttctcatattatcttatagaatctttatggtttcaggtcttagatttaagtctttgatccatctcgagttgatttttgtataaggtgagagatgaggattcagtttcattatttcgcgtgtggcttacaattatcccagcaccatttgttgaacagggtgtcctttccagacaaaatctctgaattgccagaaaaagaattcagaaggccgattattaagctaatcaaggaggcaccagagaaaggcgaagtccaagtcaaagaaatcaaaaacatgatgcaggatatgaaaggaaacatcttttgtgaaatagaaagtataaataaaaagcaatcacaacctctggaaattaaggacacagatagagaaatgtaaaatgctttgagtgtttcagcaatagaatcgaacaaacagaagaaagaacttcagagatcaaagataagccttttgaattaacccaatccgtcaaagacaaagaaaaaagcattaaaaaaaaatgaacaaagcctccaagaagtttggaactatattaaacatctaaaactaagaataattggtgttcctgaggaagaagagaaatctagaaatttggaaaacatgtttgagggaataatcgaggaaaacccccctggccttgctagagatcgacacatccaaataacacctagtaaaactcaaagaacacctggagaattcatcacaaaacaatccagaaggaattaagccttctcgatatcttgatttttttttttttagtccagggaaactgattttggacttctgaccttcagcccttaagtgataacaaatttgtgttgtttgaaggcactgaatttgtggtagtttgttacagcagcaatatgaaactaatacagattttaaatgtcatgtagaacaacgattcttagtcttaagttctcatcagtcaggttttgggaagagcagtgggcctggtgggcctgggggaattaggagatgcttattggtgatctggattgagaaattaggaaacatttttggtgtccaatattacttttaatacctcaaaagagcacacatgattaatttgagaggcagttagtactgtaggattgagctagggcaacatcatgtagttattctggaaatcctgggctccctctaagctgcttcttgctcttactagtggttaagaccattggttgaaatccctcccccaccttccataaataaaaggctgtcccagcttccataatggtcttgatcatgcccactgccaaccgtcctttgagttatatgtaaaatactcttggattcattttggattgaactgggggttatgcatgagggcagattaatgagcctctctccctctgacccacaaaaaagaagcctgaaatttcctagataaggcatttgttttaaattgttaacaaaaagcttttttttagtaaaaaagattttaaattctttcttttgcatttgaatattttcttctcttctgtgcaaataagaaatatttggtcattttctgtggtttatttgaaaatcacagttttgcctttttttctggccaactgatccagaatttttttgagagagtgtgtgtgtgtgtgtgtgtgtgtgtgtgtgtgtgtgtgtgtgtgttttgagatggagtctcgctctgtcacccaggctggagtgcagtggcgcaatcttggctcactgcaacctccgcctcctgggttcaagcgattctcccaactctgcctcccgagttagctgggactataggcatgtgccatcatgcccagctaatttttgtattttttaaaatagagaaaagatttcaccatgttggccaggctggtcttgaactcctgacctcaggtgatccgcccatctcggcctcttaaagtgctcggattacaggtgtgagccaccatgcccggccagagtgtgttattttttaagttgttagctattttgtctttctcttgaaccttatccaagtgccctctgatcttttaaatctgtagttctatgagctaaatctagttatttagtttcatcattgggtttagtcagtgatagaagagtacctttggtaactgggggaaaaagtctctgagttaatttgaaatgttgatttgaaattgataacagttgaaatacaacttggcattaactttgaaagaaaatcagctgattaataatgcaatgtgatactttagatatattactaagcatctctgttaaagtgaaatgactttttcaatctaaaactttttattttaagatacattcttttggaaatgattttcttccattattattcaaaaataatcacacgctagggctctagaatttaattataggatctctgcctttgttggagcacaatctctgtgcctttctttggttcataaaatagaacattgagttaaaatattgtcagtacctgtgtctaccaaacagtgcattaaaatacatattaataaactatagtttcaatgtaagttcttcttggcagagatttggatgttaaacttggtaaaatctattttgttaggtatttacaaggaattattatctggggagaaaacaaaaatatggactctgtccacataattaaatgcccattcagcaaagtgtacaggtggttaatatttctagcaactactgtctgattatagatcagttttcattgacgtagttatcaaataaagcattaaaagttttaattttttttttctttctcagttgaggttagagtaagggaacaggggcaaactgctttgagctctctttaagaccatgcaaatatcttgctcttcatcaaacttaactccctagactgaacatgtgctgatttttttttctttttcttttgagatggagttttgctttctcgcccaggctggagtgcagtggcgcgatcccagctcactgccacctccgcctcccgggttcaagcaattatcttgtctcagcttcccaagtagctggggttacaggcacccaccaccatgcccagctaatttttgtatttttagtagagacagggtttcaccatgttggccaggctggtctcgaactcctgacctcaggtgatccatccgccttggcctcccaaagtgctagaattacaggcgtgagccactgagcctggccatgctgatgatttttacggtaccaatctttattatgatgattgcaaaatggtgatgtaaaaaccccatcacatttatcagttcatggtctaccactgtaagggagagtgcttctttctttctttgtttatttcttactgacttatgaatctgttatcagtattgattcctggtttcccactttctgcagtgggttataatctcttactatcctttccattttgatgttcaaataactttcttatttttaaacactttgtgtcatatgtgcctttaaagccatgtgtttgtgtcaatctcatgtgcattttgctttgtttgcatccttctttctcacatactcaaagattacacaaattcagccctttcctctttttaaaaaaatttgaattgttattatacttaagtaagctttatttattttttttttctggatctgttatctttttcctagttcttcttttattgtccctgaacctgagggattattcagctatctccaccgtagaagacaaggttaaaagtctggaacttgatgaaaacagtgatggttatttgtaaactcaggcaccttggaaacttccattcatcatgtcttttctcaaattcctggtgatcagtagtcttgggagtatattttggttatttcaatataatgcattttctttctaaatctatttttaattttcatgcttaaacctkcatatgaaaagatatttatgtttagagctgaggtttagaaaaatacctcttatttaatgagcatgcactttgattgctggagaaatttttttccaaatattttcttattgctgctgtaaaatattacatttttaaagtagagatctcagcagaagaatccttgtaacattttggaaatgctttctctggagcagtttgaaaacagctgtagtagtactgaatatagcttgtattactacatgaaaagtatgcacataaattgtcagtattttgcctcattcatttgttgtcaagagtgactgaaactctgatttggcacagatggtgacattaggatagcaatgtttggttaaaaaaataaacaatcttgtttctagagaattaaaaaaaaattaacttaagtgttgaactagctgtaatattgccaaaagtgatagaataattcatggttgaagaacctaaaacctgcattaagatggtgaggttggatgaccacctaaaactaatgaatggctttaattttattctcacttaaataaaactgtcaacaacccactgaaggaagggatgctggattccttttaaaataatcttagagtattaatagttcattctctgcagtttgtttctacttgctatcagtgctaataaaaaatacctatttagtctttgtstcccattcctgacataaagcttataaaacccatggaatttcgtaatgtggaattttgtaatgttcctgatttggctagagttggctattgtttgtgtataggaatgctagtgatttttacacattgattttgtatcctaaaactttgctgaagttgtttatcagctgaaggagctttggggccaagactgtggggtttgctagatataaaatcatgtcatctccagacagggatggtttgacttcctcttttcctatttggatgctctttatttctttctcttgcctgattgctctggcaaagactctcagattgtgttgactaggagtggtgagaagagggcatccttgtcttaggctggttttcaaggagaatgcttcctgcttctgcacattcagtataatgttggccatgggtttgtcatagatggctcttactattttgaggtatgttcctttaatacctagtttagtgagagtttttaacatgaagggatattgaattttattgaaagcattttctgcatctattgagataatcatgtggtttctgtctttagttctgtttatgtgatgaatcacgtttattgatttgcatatgttgaaccaaccttgcatccctgggatgaagcctacttgattgtggtgtattagctttttgatgtgctgctggatttggtttgcaggtattttgttgaggatttttgcatcaatgttcatcaaggatattggcctaaagtttgtgtgtgtgtgtgtgtgtgtgtgtgtgtgtgtgtgtgtgtgtctgacagattttggtatcagaatgatgctggccttacagaatgagttagggaggagtctatcctccttggttttttcgaatcatttctgtaggaatggtaccagctcttctttgtacatctggtagatttgagctgtcaattcatcaggtcctgggctttattttggttggtagactatttattactgattcaatttctttattgacctgttcagggaatcaatttcttcctggttcagtcttgggacggtgtatgtgtccaggaatgtgttcaattcttttaggttttctagtttgtgtgtatagaggtatttgataaaaaagaatatctgtcatttgatgtatttttcctccaattacaagacccctaatggtagcttagagtcttcattattagctttaaagatgtmgaaaacaatttctcacttgtctgggcaaaataaatcaccatctatagctcttttcaggtcttccttttaggaaggggtcaagtcctatgctctttaacctcttccctgatgcgcctatatgaagagtggggaggcctggcttgccaacagttcttgtgaaaaataacaaggcatcttaaatgaccataatttttgtgtgaggcagcagtgtgttgtggtggccataaatgctgatacagacttaggctttatcaatgaaagatgtgaggatatggttttcttactgtgccttatgcatctagatcatgtctagcacactgtattcactttgagggactgaggcttaagctgggcattgacagtataggatacagatgactaggacagcagtaggtcaggatgtctgtcattcattaaatggttgaaaggactgaggatgttttgcttaggaggcatccaaggtgtattagtccattttcatgctgctgataaagacttacgtgagattgggcaattcacaaaagaaggaggtttaatggacttgcagctccacatgggtgggaaggcctcacaatcaatggcagaaggcgagaaggatcaagtcacatcttacatggatgggagcaagccaaaaaagagagcttgtgcagggaaactccttcttataaaaccaccagttctcatgagacttatgagaacagcacagaaaagacctgcccccatgattcagttacctcccactgggtctctcccacaacacacgggaattcaagatgacattttggtagagacacagccaaactgtatcatcccacctctggcccctcccaaatctcatatcctcacatttcaaaaccaatcatgccttcccaaccatcccccaaattattaactcatttcagcattaactcaaaagtccacagtccaaagtctcatatgagacaaggcaagtcccttctgcctatgagcctgtaaaatcaaaagcaagttagttacttcctagatacaattgggtaaatacacccatttcaaatgggagaaattggccaaaacaaagggactaaaggccccttgcaagtttgaaatccagcagggcaatcaaatcttaaagctcaaaaatgatctcttttgactccatgcctcacatccaggtcatgctgatacaagaggtgggttcccatggtcttgggtagctctgcccctgtggctttacagggtacagcctccctcctggctgctttcatggaatggcattgagtttctgcagatttttccaggtgcacagtgcaagctgtcagtggatctaccattctggggtctggaggatggtggccctcttctcacagctccactaggtggtgcctgagtagggattttatgtaggtgatccgaccccacatttcccttctgcactgcagtagcagaggttctctgtgagggccccacccccgtggcagacttctgcctgggcatccaggtgtttctatgcatcttctgaaatctaggcagaggttcccaaacctcagttcttgacttctttgcacatgcaggctccacatcaygtggaagctaccaaggcttggggcttccaccttctgaagtaacagcccaagctataccttggccccttttagtcatggctggatggctgagacacagggcaccaagtccctacactgcacacagcagagggactctgggcctggcccatgaaaccattttttcctcctaaacttctgggcctataatgggagggcctgttgcaaaggtcgctgacatgccctggagagattttctccatggtcttggggattaacattaggctcctcattacttatgtaagtttctgtagctggcttgaatttctcctcagaaaatgggattttcttttctatcacattgtcaggctgcaaaatttccaaacttttatgctctgttttctttctaaaactgaatgcctttaacagcacccacgtcagctcttgaatggtttgctgctcagaaatttcttctgtgagatattctaaatcatctcactcaagttcaaagttctgcacacctctagggtggggtaaaatgccgtcattctctttgctaagacataacaagagtcacctttgccccagttcccaacaagttcctcatctccatctgagaccacctcagcctggatttcattgtccataacgttatcagcattttgatcaaagctgttcaacaagtctctagggagttccaaactttcccacgttttcctgtcttcttctgagccctctaaactgttccagcctctgcctgttacccagttccaaagttgtttccacatttttgagtatcttttcagcagcaccttacacccagtaccaatttactatattagtccattttcatgctgctgataaagacatacctgagactgggcaatttataaaagaaggaggtttaatggacttacagttccacaaggctgggaaggtctcacattcatggcagaaggcaaggaggagcaagtcacatcttatgtggatggtgatggtggaaggcaaggaggagcaagtcacatcttatgtggatggtggcaggcaaaaaaaggagagcttgtgcagggaaactccttcttataaaatcatcaggtcttgtgaaacttattcactatcacgagaccagcatgggaaaagagctgcccccatgattcagtaatcttccaccaggtcccttccacaacatgtgggaatcaagatgagatttgagcggggacacagccaaaccatatcactaggatagctgacaggaatctgcaaatgaaagaggttgtagattcattatggttccagatggcacaactatagaccttggaaaaaaatgaggtggagtttctctttggatatatacacacacacacacacacatatacatacatatacacacatataacttatttatctggctyaatatggatgaatatattatataatatataatcttgtattaagactgaatatattaatatatgaaaatatatatatattgcaaatcctcaaataacgtcattttgttcagtatcattttgttaccactttgatgagaaaaaaaatcaattcccagctggggccattgtctctgtggggtctgcacattcttaccatgcctgtgtgggttttctctggattctctgctttcctctcatatctcaaagatgttcatgttaggtgaattgatgtgtctacgtggttccagtctgagtgagtgtgggtgtctgggagtgtgccctgcaatgagatagtgtcctgtccagatctggttcctgccttgggcaaataattatcttatttgattttattaatctttcctaactgtatgtatagctcacatttatttcaatgtttaatattagaagtattttggtctttatttagaagtttggtgatatttctgtggccagaaatatgccataggaacttaactcttgtttatatcaattagcctagagtaaaattggtttcattatatcttgtttcacttaaagttgcactttctaaaaagttgcactttctaagaacttatggatgataagtgaggacttactgtatatgaatgaatatattactatatgaatatatatgcatacatacacatatatacacatacttgcacacacatgcacacacacacatatatatgtagactatatatatatatacactacatatatatatatatatatgtagtctagtaatggattagaccttagaagggtcattgaaggtatttaggctgaggttggatggatctcttccaagagatagtataaactgcatttatttttggattcattcattcattcattcacttcttatggagccctttctatgtgccacacactgttcttagtactgtggagacagataaatactgggcaagaggttggattaaaaaactttaaagacctcattatatctgtggtcaaaagaagttgcttgatgctttggggtcctttaccttaagtgtagagctctgcttgtgtattacccactctgtgttttagatgctcctgtgtgttcccatcacatgtcttctgtgatgtggagtagtattttatatcattctctgagtggctgtaggctttaacatcatgtgtatgacaacattttatctccctaccttttttttttttttttttgagacaaagtcttgctctgtcacccaggctggagtgcagtggcacaatcttagctcactgcaatctcctcctcctgggtacaagtgagtctcctgcctcagcctcctgagtagctgggattacaggtgcccaccatcatgcccggctaatttttgtatttttagtagagatagggtttcgctatgttggctaggctggtcttgaactcctgacctcaagtgatctgcccgtcttggccttccaaagtgcggggattacaggcattagccaccatgcccagccatctccctacctttgaacaaagtggttaaagttgaatgtgaagtcagcttttgatagaataatgttgatttttcrtgggaaacatttaattccaggctaggtaaataggtttttaaagattcaatatttaccagaaagtatgagagaacacagtgmtttttaaatgtaaggtgatattatttattaacattattggaagttcactgcactgaaaacaaagttaagcttttatttttctgagggaagttatagtttctgcacactaaaatactgaaacttcagcttcaatatttgtaaattgactatatatctggactactgctgtttcattctgtagagatcagatagtaccagaaaaaagcagaggtgccaagaacaaagtgtgcagatttggaggtgatattggggtctctgtacattatgtcctgtcaagtaaggccagctcttcatttgtttcatgtctaggtttggaattcacccagttgcrggccgaatgcctggtcagcttaatgtgctgctggctgaggctggtgtgccatatgacattgtgttggaaatggatgagatcaaccatgattttccaggtaagtggtgggggcaattgtgaagtttaaatattcttactatgaataaagcagtgcaggtgtgggatatgaattgtagattcagtgaagactgactagtcagatgaaaaagaacttgtacatggtagataataagttgaaattaaataagtgaaatatagtattgaataaggtacaaaagattcgtaaacagcacaggtaaatttttctcctccgtgaagaactgaaggatggtgaaaaccttggtgtgtagtatagaaatgttgaagactggggatctgggcagacctggcttttgaatccagatcctgattctcagtagcttgttacccaacctcaggctcttcatttatgagtgcttctgttgataatttagtgtctgattcttgccagtctctgagattttactggttttcaattgtactaacgtatgactggtgaagtaattttctctttcttttcttttwaaaaagtactagaatttccctagataaggtgctgtacgttatagctgtcatagggtagatgttgaatggtaatgacatttggcccaagcctatgcttgttaaaattaaaccacttccctctggcaaatatccactgtaaacttaaaaaaggctgtttattagaaaaagtattgaaattgtgtgtatgtctagattcacatagcatttttttggcaacagtctaaggtagtttatattgcagttcttgaagagaaaacttaggccattttaattttatgtcccttttcagattccactgttgttaaattatgtgtgacaccacccagttccaggaattatggacatggctttaatgcagattttgagactctcaaggagttatcttattttatttttatgtatttttttaacttttattgtagattcaggggtacatgtgcggtttgttacctggttatactgtgggatgctgagggttggaggtagtgagcatagtaccccacagtttttcaacccttgcccatatccctcactccccattctggtagtctccaggttctattgttgccgtatttatgtycctgagtacccagtgtttagctcccacatataagtgagaatgtgcagtatttgattttcttttcctgtgttaatttgcttaggataatggcctccagctgtttccatgttgctggaaaggacacgatttccatcctttttatggctgtgtagtattccatggcacatatgtaccatatttttttttatccagtgcaccattgatggacayctaggttgattccatgtctttgctattgtgaatagtgctgtgatgaacatgctagtgaatgtgtctttggtagaaagatttgttttcttttggatatgtacgcagtagtgggattgctgggtcaagtaggagttctaagttctttgaaaaatctccaaattgctttccacactggctgaactaatttacatttctacaaacagcgtgtaaatgttccattttctccacagccttgccagcgtctgttattgttttgactttttactaatagctgttctgactggtgtgagatagtaatttcattgtggttttgctttgcatttctcttatgtttagtgatgtcgaacatttcttcatgtttgttgaccacttgtatgtgttcttttgagaaatgtctgttcatgtcttttgcccagtttttaaatattttttaaaatttttttaaaatttattttattttattttatttgcttgttgagttgtttaagttccttatagattccggatattagaactctgtccaatgcatgcataatttgtgaatattttctctcattctgtagcttgtctgtttactctcttgttagtttcttttgctaagcagaagctctttagtttaattaggtctcacttgtcaattattgcattgttgcatttgcttctgaggacttagtcataaatttttcacaaggctgatgtccagaatggtgtttcctaggttttcttcttggattcttatagtttgaggtttaagtggtcattttaaaggttgaaagtggaatgcaaatttcataaaatcatgtgaccctattgcaagatcattttgagatcataaaagttatagagtcagattaggtagatttattgagaagggagaagcataataatgcaggctgtagtcaagatagtcaagttcaaatgcaagacctactgctttttagctgtgtgaaattggccgagttgcttaacctctctgataaagttctttgtaaagtgcctggcacaagtgcgaatcctatatttttgttattgttattataaagtaaagatcactataatttgtctgaaaatatgtaaaagtgaccatttgagttttatattctttcttttttgttttattatatagatactgatttggtccttgtaattggagctaatgacactgttaattcagcagctcaagaagatcccaactctattattgcaggcatgccagtccttgaggtctggaaatcaaagcaggtaaagtttcagacttgtatttcattctgataatcaaaggtcacttcaratatacacacagaactttctttgatcatttgataagaaatgatgatgccttctaggaggccaggagtaagagcatgtttagggcccagtttcctatatccagcttctgtctgttctccggccaccagagaacctgagtgaatgccctaatcacaagtagaaccagatgagattatgtgggtggattaacacaatctgtaaccacagctgaaaaaagagctgtgagcttttgtaatgagtctggctaaattccagatcgagtcctgtgaagcagatggcttccctctgggaagtatcaatcgccttcatatgccaagatgagcatatttttttcacttaactttttgaaagggaatttataagttgttatagagtgtctagcagaaaggtgatttggaaatccaaacaataatgtggcataatgaagcaagcttcgctcatgtgtattcctcctgaaaaagctaattgctagattttagataactcaaaggcttgtaaattttcctctgcctcagcagtaggcacattttaccactactgagtcacctctgcatttaaaaaatcataacataatgtacatttccatttaatttcgtttctttttattgtaaatattggagtttaaaacttaatatttgtgatgaatgagtagacataaaatatatttgtttatgtgtgtatgaaaaattgtgtcagtagtcaatatttgagaatttgtagagtgcattactatactaacgctataagaagaagaatacatttgcactgcttctgttttttaatagattacatgtcctagtagaccatagaaagacttttcatttcattaagaaatgacttgatattcagcaggacagcaacatccataacacatgtcattgtaaatgtctataacatatcaatattatagattgacttacctcttccattttgatttataggaacattgctgctagttatagcctctgctattgtgagaagtctggattgctctttggccttttgttctagcactttctgatatactataaagtcatagaaaagaataacattgttttcccactcaacctcatctgttttagaatttgtagtggaaacttatgcactaaacttgttttctttagcacattcatagaaagatgcttattttactgactagaaaatggtatacatggtctttatagagaaraagcactaagaagaaaataattgtaatcttatcactcagagataaattattaacatgactttttctctaatggatataagaataagggcacacttaagtattaaagttaatacaatgtaaacatatgttaaaaatatttcttgtgtatttttaaagtccctgcactaaagaattagtagtggtacatgccttgttcaaaggtagtgaagagcaatgtttgtttgcctaacatgtcctaggttggtctgttaaatacactctctcatttaatctctggttctcaggtgattgttatgaagaggtctttgggtgttggctatgctgcagtggacaatccaatcwtctacaaacctaacacggccatgcttctaggtgatgccaagaaaacatgtgacgcgctccaggcgaaagttagagaatcctatcagaagtaaatattaaggatcaagctgttagctaataatgccacctctgcagttttggraacaggcaaataaagtatcagtatacatggtgatgtacatctgtagcaaagctcttggagaaaatgaagactgaagaaagcaaagcaaaaactgtatagagagatttttcaaaagcagtaatccctcaattttaaaaaaggattgaaaattctaaatgtctttctgtgcatattttttgtgttaggaatcaaaagtattttataaaaggagaaagaacagcctcattttagatgtagtcctgttggattttttatgcctcctcagtaaccagaaatgttttaaaaaactaagtgtttaggatttcaagacaacattatacatggctctgaaatatctgacacaatgtaaacattgcaggcacctgcattttatgttttttttttcaacaaatgtgactaatttgaaacttttatgaacttctgagctgtccccttgcaattcaaccgcagtttgaattaatcatatcaaatcagttttaattttttaaattgtacttcagagtctatatttcaagggcacattttctcactactattttaatacattaaaggactaaataatctttcagagatgctggaaacaaatcatttgctttatatgtttcattagaataccaatgaaacatacaacttgaaaattagtaatagtatttttgaagatcccatttctaattggagatctctttaatttcgatcaacttataatgtgtagtactatattaagtgcacttgagtggaattcaacatttgactaataaaatgagttcatcatgttggcaagtgatgtggcaattatctctggtgacaaaagagtaaaatcaaatatttctgcctgttacaaatatcaaggaagacctgctactatgaaatagatgacattaatctgtcttcactgtttataatacggatggattttttttcaaatcagtgtgtgttttgaggtcttatgtaattgatgacatttgagagaaatggtggytttttttagctacctctttgttcatttaagcaccagtaaagatcatgtctttttatagaagtgtagattttctttgtgactttgctatcgtgcctaaagctctaaatataggtgaatgtgtgatgaatactcagattatttgtctctctatataattagtttggtactaagtttctcaaaaaattattaacacatgaaagacaatctctaaaccagaaaaagaagtagtacaaattttgttactgtaatgctcgcrtttagtgagtttaaaacacacagtatcttttggttttataatcagtttctattttgctgtgcctgagattaagatctgtgtatgtgtgtgtgtgtgtgtgtgcgtttgtgtgttaaagcagaaaagacttttttaaaagttttaagtgataaatgcaatttgttaattgatcttagatcactagtaaactcagggctgaattataccatgtatattctattagaagaaagtaaacaccatctttattcctgcccttttycttctctcaaagtagttgtagttatatctagaaagaagcaattttgatttcttgaaaaggtagttcctgcactcagtttaaactaaaaataatcatacttggattttatttatttttgtcatagtaaaaattttaatttatatatatttttatttagtattatcttattctttgctatttgccaatcctttgtcatcaattgtgttaaatgaattgaaaattcatgccctgttcattttattttactttattggttaggatatttaaaggatttttgtatatataatttcttaaattaatattccaaaaggttagtggacttagattataaattatggcaaaaatctaaaaacaacaaaaatgatttttatacattctatttcattattcctctttttccaataagtcatacaattggtagatatgacttattttatttttgtattattcactrtatctttatgatatttaagtataaataattaaaaaaatttattgtaccttatagtctgtcaccaaaaaaaaaaaattatctgtaggtagtgaaatgctaatgttgatttgtctttaagggcttgttaactatcctttattttctcatttgtcttaaattaggagtttgtgtttaaattactcatctaagcaaaaaatgtatataaatcccattactgggtatatacccaaaggattataaatcatgctgctataaagacacatgcacacgtatgtttattgcagcactattcacaatagcaaagacttggaaccaacccaaatgtccatcaatgatagacttgattaagaaaatgtgcacatatacaccatggaatactatgcagccataaaaaaggatgagttcatgtcctttgtagggacatggataaagctggaaaccatcattctgagcaaactattgcaaggacagaaaaccaaacactgcatgttctcactcataggtgggaattgaacaatgagaacacttggacacaaggtggggaacaccacacaccagggcctgtcatggggtggggggagtggggagggatagcattaggagatatacctaatgtaaatgatgagttaatgggtgcagcacaccaacatggcacatgtatacatatgtagcaaacctgcacgttgtgcacatgtaccctagaacttaaagtataattaaaaaaaaaaagaaaacagaagctatttataaagaagttatttgctgaaataaatgtgatctttcccattaaaaaaataaagaaattttggggtaaaaaaacacaatatattgtattcttgaaaaattctaagagagtggatgtgaagtgttctcaccacaaaagtgataactaattgaggtaatgcacatattaattagaaagattttgtcattccacaatgtatatatacttaaaaatatgttatacacaataaatacatacattaaaaaataagtaaatgtataagtttttacacattatatatatgtttatattgctactcatgtatctatctggacagttttctggcatgtagactatcattttatattctcttttttttctaggaattagaatagagaggactaatagagactaatagtctcttcgtgcagtaggcttttaaccctttactgagtcaggaaatatcagttaagtatttggtaatgaatttggaaagtgaaccgttgcctttctgattctacccaagtcatgaccctaacttttagattttgctatattctcgcatccaacataaatataaaatatattatatatcagtaaactttaaggtttcataaaatttatctgatcccaaaggttgattctttaaaagtagtaacttgtgactcatatgttcatctaacctagggacaaattttttagtcccctaaggcataagtcttgtgaattaaagcattttagtattggaaagctcttttgtgtaactaggcagaatagttcaaatatctaatttatagttcaccagtttttgagagcatttgccaacaaatattattcagtgagaatagtaaacaacaacaacaacaaaaactcaaaacctttccctccagtggcagcagcttgcataatccaggtattctttagattctcaaaggaaagaagaattaggttaattaacaaggaggaaaaaaatttttctaagtgaaacttttaaagtgttgtttagcaaagtagcagaaatggtcacatttggattttgaagcactcagagttcttgaacttttgtctcttagaagttacatattaggttgaggaattgaactgttttctttattatttaagtgattaaaggcatttagcatggcatatgtggtaattctgaatgaaaatcttttggctattggcaacaaaatgatgtgtatgatgagaacagtaattagagcaaccaatatttgaaactcctatatataatgattaagatagtggtagaaaaaaatagtccatgggccgggcgcggtggctcacgcctgtaatcccagcactttgggaggccgaggcgggtggatcatgaggtcaggagatcgagaccatcctggctaacaaggtgaaaccccgtctctactaaaaatacaaaaaattagccgggcgcggtggcgggcgcctgtagtcccagctactcgggaggctgaggcaggagaatggcgtgaacccgggaagcggagcttgcagtgagccgagattgcgccactgcagtccgcagtccggcctgggcgacagagcgagactccgtctcaaaaaaaaaaaaaaaaaaaaaaaaaatagtccatggaagataatttatttgggggaatagtagggaatcctaacaatggtagagaaagctaagaactttaaaagttctttaaagctaaaaactttaaaagttgaaaccctaaatagtggggagatattacatcactgtcatgttgattgtcaaatcatgtgactgcctcatcattctgtaggaaatatttgtacttcatattttgccaaagattactgccttgagctctgccttccagttcttgccaaaagcatatttacgaaggataacactagtgtaaaaattgcctaaaagatatagagtccagtttgtccctggatatttcatattttatccatagacaaaaccagactttcagagagctggacagttaggccacattgtttgggtcactgtgaaaagcagacataaagacattggaatgaagagagtcaaagtgatcttgcttgcctaaggtgactatgaattcagaggggagtccacatggcagcaataggatagtggggagaagaagtggttgtcatggactttgagaagaattgaggaaggggatgtggatttggggaaagtaggtgacccttaggatgatggtggctagttctttccccccatagagagaagtgaaaaggaagtgggagctcagagcaaggaagtttgggatgcgtaagtttcccctatgtaaagatggaatatgaagatctaataaactttttctcaccctccttcctgttgcatttgggaatatgaaaaatacaaagtatcagtgagatatgatgtagggaataataaaaacctttggaaaaggaccatttagaaattgaaataaggccatttttttctattctcttacttcatttttggtttactatgggaaaagcagaactcaggaatgtctacagtcagggatagaattagattccaccagtgaagttttgcacttcatattttgccagtgattaccaccttgtgttatgcttttcagtgcctttctggaactgagtttttaaaagccagtgagttattgtcagccagacttgtcttttttttttcctcccagttagggggtgcacttttcacaaaaatacagtgattaacactaatggagcagggtcctgtgcctggttaattctctttagactttgattctagtccccagttatacacatggaggcagcagcatcagtgggttagaactgaaaggtcatgtgtaaaactctccagagaaaagggagaatgtgacactaaatcacccctttgtgctatgacaggagggagataatttcttccccagagggatgaagcagaatttcatccctttaggatgttttgtcactagtctgagtttaatggaacactgtgcttcagaaatcactccttctagaaagagccttttaaagctttattgactcatggaaaattttgtgtccttaaattatagctaatgctctggttttgtcccattgggatatatatgggcatggaagcttacacctagttcaggtccacatccttgtgtctgattgggagtaactgccccatgagcactgggtatagctatagtaactaggaaatgtgtttttttaaggattagaatcactatggtaaatgagaccaatagaacattcaaagactataacacaaaaatcatataggtatactatatgtgtaaggatgtcagaatatctgtcctgcctgtggtccttgttgtaatgtgtctttcccagaatactgttttgtacatgttgctccaaagggtggattttagtgatgaactcttgatgaatatttagatggtggcatcgttatgaaaagtgttactgttttctacaaaatgaatcacttttggttatgcttacatttctagagtgtatcacctcttgataaattaagcacaaaggcatttatatataaaatatatataaacacatatataaaatatatattatgtatgtatatattatgtaaataaatatacatatataaccatgcagggtggaggaagggaaatgtatactatatatgtttctcattgtcttctgttcaggactcatctggaattttattctggctcaattttttttctttttttaaggttatagatagaaagaccttgttcctttatttaaagtgttcaatgggtggataatagtaatagcatctactagttaatgagtactcattttgtgctaggcaacattctattaacaacctatgggtttcagtgcatcctacaatagcaaatggcagagttggacttaaactgaaatctggctgatggcaaggtccacttaaccattcagttgacttctgttaaaaaaaagggaagcatgcaagtcgtaaaagggaaaaaaagcagttaaatttcatcaagaagatgccatttatttataaaatgagaggaagagatgtttccaatttcatagagaaaataagagcataattatatgccatttttacatagaattatgaaagttgctggttatatagtcataatttgcatttccacccattctctctgtaagcagctattgccatttttttctcatgcacaaaatcctgtatcctgagaatgcatcttccttaggagcagaaaagaggcagctttggagcagattcgccacctttctgggttttgctttccaggacagtaccrgctccgcctcctcgcttgctttgacttcttgcacattcttacctcacagctggtcagacaaaagctttttgctgaggattttcatttctcaaagactacaaactcgatgtgccaaaatatgacttcgttttcctataagttaagtgaattcctctcttgagcctctatattctctgttgatgtaaatttgaccttaatttggcgtgtttccttctcgttctcctactgctggggacacgtcttcattcaaaggcaaagtgggtggggaccaaggtaaatgacgtaacatcacagtttggtggagtgagttgtgtcctggtcttcatccatcctgtctggcattccttagatacctattgtcatagtcatagctagtcttggttactgatatctttgcacactgacatcctctgattcttctttggtctaaatgaaatagaaattacaagatgtttaatgcagcgtggaatgggaaggaagaaatgcatgaagtagagggtatggtaatctcaacagattctggcaaatttctcctatgactacaacttatatttggggtgaaattttaaaaagcctctgtaggaaaatagaatattagtgctattttcacaaggaaaagagtaggcattctattcaaataatttatgaaggaattgatctaagcaaaaaaaaaaaaaaagttaaggaggtgccatttaattcatctcctgagactaactcaattgcttcagaaatctttactttgagaaatttagcgagacagcgaattgtttgggggaaggaataaaaagtgctgccctaggaggaatgaaaagtgcgctgtcatctcattcctgttagttttttttcagcaatgctttggtattaaatgtatagccaaaagttgaaaggaaccattaattcatagttggaacacatctcaaaacaaacacagaaaggtcaaaacacagctcttttggtaagtattcttttaggaacacaagttagcatttgtagcccatctacttttttcatactgatgtattactcaggaaatcttttcaaaaaagtgatttctatgtatgctgttaattgtaatttttactagagaaattggagcacaaaacatcacaaccttcctgtaattaacctgtggcagatggaagttcaagaattacatcttctgccaattaaggatatttttctttaattacaagtacttgggcatttcagtaaatgtaatggtttatattttatgcataagggttttgcttctgtggaaaaatatttttttccccatagaaatgaagttgagcaaaatggaacaaagaagacagatgtgtaaaattgccatgatttaatattttt

SEQ ID NO: 93720 - DNA, 62144 bp, Homo sapiens
cttagattttatcctgtgagtgataggaacagttgcagggactgaagccaaggaagcatgctttaagattccatgttttttgagatgctgtctggtggctgagtagggaattccctggataagtactgcccagggtaggcaaaagaagctaggaggttactgaaataaggagtatgagaaatggtgtaggttttgctgatgttttgtaacacatctcatgacaatcttcatttccttcaccaatttcctgtttcattaattcccttccacgtgctcttctgaaatttgcctcatattctttgatttctcttttacatgttggtttcatcaccttttactttttgctttcctggaaacacaaatgattctgattgtgacatgtcagaattatttgcaacattcccctttctgctgaaacatgagctcactgaatacacaatttagtaaagtgtaggatgcacatgttgttttcatggtcataaccagctctgtagcattttataactacactggcagtgtgctgggaggtgtagagagaaatatttatctcatgtgtggctgacacaacctgccaagttgttttaggagccttcttggaatcccagcaagaacaccactgatgcaatttgaaatcacaatgtcctgctccatgccctggcttcatggcttagtcacgtctgaagtctatttctaactatctgtttccacatctataaagtatgagttaaatcatcctaatactactcatcttacaaagttttcttgctgatattaggagagttgggaaagaactgtataaattatgaagtgccatggagatgttggtggttactttatcaagaaatagacactccagaatagagtagaaagaaaacagttatgattaagtcctcctcctcttctttttttttaatttacaaagaaaggtttaattgagtcacagttccatatggttggggaggctcagaaaacttgcaatcatggcagttggcaaagtggaagaaggcaccttcttcacaaggtggcaggagagagagagctcctcttcttttttgttgtaaagtctacagaagtgcatatacttcagggcaagggcaggcagggagaagaaaggacattgcttcaccccagtcctcactgacaagtttgctttgggacttcattttgtcccagcatatgggacagagctctggccactacccattcagaaggcctgagctgcattgctagttccccactaactctgtgtgtccttgggcaaggctgggcttatgtcaaaagattatgaccctgggctctccagctacagaatctacatatgaatcctggctctgctagagcaattagtgacgtaaccttggatgggtcagttaaccttcctgtggcttagtttgctcatctgtaaaatagggatcataacaacatcaataccatgggttgttagacagattgaatcagttaatgcagggtaaatacttagcatgacacgtattcactatcatttccttgagtaaaagctgagtgtgagtgggtgtgagaatgtgtgaaaccctttcactgcaatctcagttaagaaacccatccataatttaaagttcagggcctaaatgggtggttatcttctcccagttgcatcctatcccacctttgctcttctcctgcccgtaggagctgttggtctttgattgggctggaagacctggtggaccctaagtgatctataagagaatgagaatagaggacagggaatgtcttcaaaactcctagagggacacagaggctgagaggcaggcagtcctgcaggggtcttctgattgggacaaggaggaccttggtcttcataggccaattctggtcaatttcccccatggacagatgaggaaacagatccaggaatatccaaggtctcacacttcccatctgtcaagtcttgttgattctgttgtattcatgtctttcaaagagagagagagtttaaggaaagaaagaaggatcaactgtgtctgatatcactgggagcttaagtaaagggttcttttacttcatagcatttttcccaatttgtaattcagtattatttttgtcactgtttagtatctctttgtcctattagagagatagcttcatcaggacaaggattttgattctttaatatttagtgcttgccacatgccctgaacacagcaggcatacagactaaccaacatacagtggcatcgaagtgagacacctacctcctccagtgcctagagtacatgtccatggacctgtcactctcctcaacaccacccctaagcatgaggcccgaaagcattgctaatcccctcctccagccaccaaaacttaaaggccaggtgtggtggctcctatctgaaatctcagaactttaggagacagcagcaggaggatcacttgaggccaggaatttgagacgagcctgggcaacatagctagacaccatctgtactaaaaattagctgggcatggtggtatacctgtagtaccagctactaaggaggctgaggtaggaggatcacttgaacccaggaggtggaagctacagtgagctataaccacagcactgaactccagcctgagcaacagagtgagaccctgcctcaaaacaatttcaaaaataaataaataaaaacaaaacttagataccacgtggtcaccccaacatgcaaaatcaagttttcccctactgagaagaatggggacttgagagctgagttacagagagataatctgcctttttttttttttttttggtttacatcctcaagatcatgacctgtgaaatttgaatctaatacacaaatcattccagagcaatgttgcttctgcctaccacgagtaattcacttggccactggaagtcagaacaagcttcccagaagagaggtaccacttggactaccaatataaaaggatgaaaatatcggagtgaaggtgttccttgcatcactgagtccctggacagcctgtccactcatgctgatatctgagcctaatgcttctctgaatgttgagatttaactttgatccaatgaaaccagaccaagaaagaagaaacgtctttcattgttgataaggacatgatttttctcacaattttatgattatttttccttagctgtcctataattatctgcttatttgtctcttctccatgtgcttagggtacaaagttgaccaagaccaagaataatgtctgggagcacaatactgacagcacagctttaaaaacatgatgaatgctttaatacaggaaatgagtaggggagaggcaagtggtgcttgggtgttcttccaatgcatagtatcttccttgacacagtcagtgcagctctcagtaggcaagtccctacatgttagaagatgttactttctgtggaattaagtggcagaacatgccttcaattattttcctttgcagaacaacaccaatttcattagttaggacagagtgctggctgcatttgaattccaagcaacgattagtctatcactgttggtatagattccaaccagtcacaccacctcctgaagtttgtagggcaggtaaatcttcatcttagaataaaaatcatcttagccaagtaagtgttttagaggaaagaagaaaacataatcgtttccataagagttttgtttctaaaaaaataagaaaggctctttgtttaggtgagctaatgaagttgttgatagttatcagatgacactggaatctttacttgtcagaatgtgttctgtgcacctctcggtgtggcaacatagagagggagatcctccagcaatgccattgatatggtcagaaactgcatctttctttctccctgctgagatggagtcctttgttctagaaaacccagggggtgccactgggagtaacccttgagacaggaacacgaatctcaaccaatttctggttgcagccttgagtcttactatttgccatagtgatgcttagcaaggaatggcaggtgcaccagagcagcagaggacctaatatctcccttcctgttaactttttataatattttattgtgatcagtatcagttgggaagctacttgcagtcactgagcctcagtttctacatctgtaaactggggatagtagcatggccctatttaatgtgctcagcgaagccactgaaaggagacagaaatgtaccagaattccctggacttttatcctacttctcctggggattgtcacccacctacccgtgtctgtcctttgttgctttgacgctgtcacttcttttcttaggtacctctctgtagggctccattattccagggattccagagttacagcacatgcatacctccatccaagcatgtttatttgtctcctgcttcactaggctgtccccaaggaacatgtggctcccggcacatacctggcacaacactgcacatgacattcacccacttggccttgaatctgacaaggaatctggcatgatgttcacctgctgaggccaggtgccgagcagccctggaggcttaggggccagagggatgggaaaaggtgtctttctggggtgagtatcagtttctgcaggagtgctgaacctgagaaagaataaagagagaaggaagtgaacaagcacagcttaaacatcatctgtttctactgagttttaacaactctgagattttgtttgtcatggaatccatttctcaggccaagcagacacagaacttgggtgtgagtgatgataatgagctgatataattttcacaccctcatcactgagatctctcccatcaggaatgggtcacagggctcacaggtggcagcaactgttattacaggcctcatctctaccagctcctggcacctgctctcctcccattagaaaatcctccacttgtcaaaaaggaagccatttgctttgaattccaattccaccctcaagaggctgggaccacctcattggagtccttgatgctgtgtgacctgcagtgaccactgccccattgttgctggctgaggtggtttgggtcaacctggccatctgggcagctgttctcttctcttctttctcccctactgtttccagacatgcagtatttccagagagaaggggccactctttggcaaagaacctgtctaactttctatctacggcaggacttttgaaagctacagaggaagaagcacaaattgatgctattccactaagccatcagctccatctcatccatgccatgtctcttttttaggggtcctcttgccaacagaatcacagaggacaaatctgaaagtgcagagacagcagctgaggcacagccaagagctctggctgtattaatgacctaagaagatggagtggtcaccagaaagtcagaggaagtgacacacaggggcccagcaatctcagccaagtcaactccaccagcctttctggtccccactgtgtgtacagcaccctgatagggaccagagccatgagagtgagtaagaccagactatgcccttgaggagctcacctctgctaagggaaacaggcctggaaacacacaatggtggtaaagaggaaagaagacaatagaactgcatgaaggggatggaaagtgcccaggggaggaaatggttacttctgtgtgagggggttggtgaggaaagactctaagagaaggctctgtctggctgggtatgaaaggatgtgtaggagtcttctagggggcacaggcacactccaggcataggtaaagatctgtaggcatggcttgttgggatgagtttcaagtattctggaatgaggacagccatagagacaagaggagagttaatagattttatgccaatggctccacttgagtttgtgataagaacccagaacccttggactccccagtaacattgattgagttgtgtatgattctacatagaatattaactcaatggaggtcagtgagtggtgtgtgtgtgattatttgccaactgccgaggtggagaagcctcttccgactgcaggcagagcacgggggccctgctactggctgcagctccagccctgcctccttctccagcatataaacaatccaacagcctcactgaatcactgctgtgcagggcaggaaagctccacacacacagcccagcaaacagcagcacgctgctgaaaaaaagactcagaggagagagataaggaaggaaagtagtgatggatctcatcccaaacttggccgtggaaacctggcttctcctggctgtcagcctgatactcctctatctgtgagtaactgttcaggctcctcttctctgtttccttggacttggggtgctaatcaggcctctctttcccttatctgttttgaatagcaaaaaggatgttcaggctggccgtggtggctcacacctgtcatcccagaactttgggatgctgagcaggtggactgcctgaggtcaggagttcaagaccagcctggctaatatggtgaaaccccatctctactaaaattacaaaaattagctgggcatggtagtgcataactgtagtcccagctacttgggtggctgaggcaggagaattgcttgaacctgggaggcggaggttgcagtgaactgagatcatgccactgcactccagcctgggtaacagagtgagattccatctcaaaaaaaaaaaaagagaaaaaaaagaaaaaaaaagattttcaaggagaagtagcttaagtgttggatgctacaaacatatagaggttatgatggatgttttgcagatctataaaggaataaataagcatctcccccattcatctttagtggaaagaagggtttagggacagcattgattraggataatctaatagacaatggtttgtacccagcttaccaaaccagaatttggattttacatttttccctttaagttgcaggagaagagggtgaatcttctcaccagtgagatcctggcatcctagagcaggtggagagaagagtcactccctactgtgtgtactggaggcttcccgcctgtcacattttacttctaactcaatttcacagttattaagagtaaggaatcatggtcacatggaaacagaaaatacaaacctcgttttaattctttcacagaaaagttagcaattcagtgagttgtggtaacatagtttccatctactggcaatttaacatgaattggtgtggcttaaattcatcctttttaaagccagatttttttggagatagactatttccagcatgttccttctgagtgataaaagagggctattagttcagtatttgtgacaataaatgtgtataagataacctcacctttccagaataatgtcaggaatatgagtctaatgtacaaatatatatctctaggacaagactgcatatgtctttttaaaaatactttcccaagagtttattttaatacccccatttcaaatacacctgcttagcaggttatcctaaactctcagggctagaaagtaagcaagactgtgagccagtgatgatagcaaaagcatccaggtaggatcaagatgaagtgagaaaatattccttacccctcagggtagaactccaaatagatattcatgggtcctggccccctagtggaggtcacttgaaggacaaacatgttggcatctcatctgcttgaagcctggacacaagggcaccatcagtgtcactctgtgtgtggctggccatgttgtggggctgtcactacagattctggcagtcaggcagacaataccttagccttagacgatgccggtacagcccaggattcagaagctatagtgtagaccatgcccttcttaggcctatacaattacatgcaatagatgatggatttttctgttagcctcttcattgtaacmaaaagcagcattactctaccaaacagaggggagctggaaagaaactaaacagtttgccaagcacagcctctgccttgacgtggaatcatgtgaatctagacactcacctagatctttcctcgggggccaatgctgctcacacattaactcaatagtttgtcctggcctgagagatcatgtaacatgtagaaagtttagaagcagagattagtgccattgattttccatggctgtgacaacaaaggaaggaacaggagtgggaaaacccaaggccaccctggttgtggtagatggtgcacacacttccactaactattctggggcaaggatccaaatgcactattgggcctggctatgctgtctctgctgggttctccaaacacgagcctccatgctgtttcttagttgtattttaccacatattatcagagtcactggatttgtacagaatgtttggaacctatactgccttaatggctaccctttaaagaagagaaaacaaggtcttaattcaactatctggaacattttatggttacttatgtggaatactccatcttttgctatcaacaggaaggtacctggccattagaaggtgcctgcctttcagctgaaagcacatatgaggcatatggatccatttatacacaccgtacttttgaaccacattttcctaatttgcctgtctggggccaagcttgtgggactagcagattcatggttgaattgatggctggctacctcttccatcaacttttctgcttcatccagtcttccacccctcagtaacctcaaactgggaaggtcttcagatatccagaatccccagttggggaagtccatacatggcccatcaaagatgggttgcaagcaggcctgctatagggagcagcagccttgatgggttttcctacagagacagttgatgtgcagacgcaataaactgactgctttgtaattgatcaccttgaaaaaaaatgagcatgtctggctgtattagtcttttcttccattgctataaaaaaaaatctcagggtgggtaatttagaaaggaaagagatttaattggctcatggttctgcaggctctacaggaagcatagcgacttctgccgctagggtgccctcaggaaatttacaatcatggcagaaggtgaaaaagaagcaggcagatcttacatgactggagcagaagcaagagagggtggggaggaggtgccacacacttataaaccaccagatctcataaaaactcattgtcaagaggacagcacccaagggggatggtgtgaaaccatgagaaactgcctctaagatacaaccaccatctatcaggccccacttccagaattggggattacatttcaacatgagatttgggtaggggcacagattcagatcatatcactggcactgtgcttatcaggtggatatcaccagttggaaggctagattccacaagaggaggaatgtccttgttcttagttgtgattcttctgcacagtgtcattcaggaaaatatgagtcaatcatcctccccaatagctcaaatcaatcagatcctctgaccacagagactgaggtgtagctaaaaggtgctcgcacttctacgaggccaatggaagcctggagcacagttgtcaatctgtagaaataaggactctgtgactcctccaagacctctctgtgaatgacagtttaagaagggccagatcctaaaacagggtcagagcttagagtgaagggaaagcttaaaagcctctgagcaaattctaaagacagggtcaccataggctctcagtgaccccctgtgactgagtggatgcagtgatgcaaaatctcatcatcactgcagaagacaaaagaaaaattgtcactctttctacctaggatgagaatcccaaaatcagggaagagtccacttactaaaaagacatgagggaatgaagtgcctggaagaattcgttcctgaacctctcaggatcattcacatttgagaacatttatcaaatattcatcccagactggggccatgaagacttcagctgcttttagctaatcattgtaactttttggtgtctcatggtggaagcatgaaaggacctgatgaacaaatataatcattgccgtcagagttactgttattttttattgccttaatgttacctcctttgcctgatcattccagttcctcagtcagtgactcaccagcccctatatctataaagtcacaawccctgagacctgatttttgtttcactttgtagatatggaacccgtacacatggactttttaagaagcttggaattccagggcccacacctctgccttttttgggaaatgctttgtccttccgtaaggtgagtgtttttgagcttcctcttttgcttcttatgattgcaaagagcaacttagttccatcagtaaaaatgcttctcctcaagaggaaggtctgagattttatactttcagaaatagcgtgtaggcatcacccagagcgtggcaaagtttaccctggggctctcttgctaactctcargaacctcaagtttgcctcagttggacagcccaaatgtcaagtagatccagcaatctgatgttcacaacttgatgtgcagactttgtgagcaccataaagagcatttcctttttgctccaggcaggttcccaggaaggtacagccatacttagttagtattaaaagtaggaacaggagcccctgattgtggcttgttatctgtggacatgagagtaaaactttcctctctgtagcaagagctcatgaataggcttttttcccttcctcctgcacagcttggaaactcagtttattagggagatcaagtatttaccattgggtcatttgcacctgcttgaagcctcttcaaaaaatgccaaattttgttggggaatttccatggctttaacccaggtcttactccccatgacatctgttgccactttgagacacagaacaaaagtgttctgctttacttcttttcctttgaaggctgcgtcttgtgggtgagtctgagcagggagtggatgtaactgagatgagatagtggttgtctattaacctcagatatttaagcacaatatgaattcatgggtttattttttacacaaaggcagaatcacatgcaaaatcactagaaaggggatgatttgacaaaattattgaatatttaatttcactaaatagaatgtcatatgtgcctcatggactggggactttggtcgagcctttgtgcctaaccttatctgatgctgtgttcagggcctggtccctggatggaaaattatgagcttatttccacagggccagcagcagcaggagtcagctctctggcttagacaatctgacctgcatacctgaggcttgtttctcagattctagttctcctaagtgagggctttgttgtctaattactgcccaggaatttcatattttttccctctgcaaaagcaataatttccctactttcacatgcgtccgtgtgaggagaccaccaaacaggctttgtgtgagcaataaatgtttttaatcacttgggtgcaggccaactgagtctgaaaaaggagtcagcaaggggagataggggtggggcagttttataggagtggggtaagcagtggaaagttacagttaaaggtggttatccattgtcagcagtggagggggccacaaggtgcatggtggggagatcataagactcattgtgcagagaagaatgtcaccaggttgattgatcaatcagttgggacagggcaggaacaagtcataatggaatgtcgtaagattgctcaatcagttaagacaggagctggctgtttcatttcttttgcagttttcagttgcctcaggccatctggatgtacaygtgcaggcttgggctcagaggcctgacattcctgtctttttatattaagaaaaataaaacaaaatagtggcaaagtgttggggcagcaaaaatttttggggggtggtatggagagataatggatgatgtttctcagggctgcttcaagcgggattatgggccatgtggacaccttaaagaaaattttataatgagttacaaggaataggaatttaggctgtggggagatcttggggcagaggatggtaccatggacttgttaaaagtaatatttgttgtatagaataattggtgatagtctgaatgtgtttttatattaattgagaaaccaattgaagacacaagtcccgaataacagaaggagaaaaacaggtaccagaggactaagaatagggaggagctaagacacccagttagaaagtgtccaggtgggtccaaaataagtatttgcctggctggtgagtttttggtctttatctttaagcttttttatattgtcatataccaggccagattggtttagataaaaacaacattcttcatttaaaaatatagagtactcctttttcagcagtgagtaggtcaaggcctcagcgatgttggaggacgactagggctaagaagtcaacctgggtctgaaggactgataaagtttgtgatgtatctgtaatgctagcagaaaagtcattagaaaggctacagaaagttgtgacagaagttgaaatacctgctattccagctccaagggcaatagtggaagcagaaagtcctaaccctacaagtagagggattagaggaataactcatttttgtctggttggtgtcatgagggggacaggaagttgttcmgtcccatttgcaaattgaattttttcaatttgggaataagaaatactagtgtacatgtacctgtccaattagcagatagacatatgtacgtggtggagccacagaggaagcagaggccttgtgtgaggcaaaactggaaatgcaaagtgaaaagatgagagggagtgccaaaagaggtgtcttgcacccagactcttagggatttagtgagggcatcagcccttagtggtcataatggggattgatggggcaactgggtatgagaaagagcatagtgtctacaaccaaactttcattgctattcatggggttcggtataagtaaacaagaagggggaatgggaggagagtctgaagaacaaggggaaggtagccaagaatggagtgaaatacagggcaaatgtcttaagggaaatgagaagttctargagggggctagttgcttgtaacctacatggaagaggtcatgaaatgacaacagaatagaatgggcctgtgagactggaaggagatatttttcttggtctaagaaccatcttccttgagtggggagggattgatagatggaaacttcagtgggagagtaaataggagtgactgatgagaaggagaaaaactggccatgagggacagaagtaggaatactggttgcttctttagctgtcttatcagcataattgttgccttgagcaatggggtctgaggccctttgatggcctttgcagtgaatgactccagctttttttggaagtaaagtggccttgagaagaatttttattaaagaggcattaatgatggaggacacttgcatagtgaagaaacttctttcagcccatattacagcatggtggtgcaggatatggacagcatttagagtcagtataaatattgatgtgtagtccctttgcaagagtgaggccccaagttaaggcaatgagtttggcttgctgagagatagtggaggggggcagagcagtagcctcaatgatagatgtggaagataatatagcacagcctgcctttgctggtgagtggtgattaggcctggtggaactgccatcaataaactaactgtgattcaggtgaaaaacaggaaagaaggaaatatggggaaatagagtgaatgtcagatggatcagagagatacagtcatggggataaggtgtggtatcaggaataatgtgggaggccagaytgaagcccaggccaggtacaatggtaattgtgggagactcaacagagagtgggtattgctaaaggagctggggaacagaaagtatatgcatcaggtgtgaggaaggaaatatattttggaagttatgagaactgtatggagtgagttgagcatagtttgtgattttgagggcttctaaaagtattagggtggtggcagccactgcacagagacatgatgaccagcctaaaacagtaaggtcaagttgtttggacaaaaaggctacagagcacggtcccagtccttgtgtaagaattccagctgcacagccctgcacttcggctgtgtgtaatgaaaagagttgggatgagtcaggaagagctagtatgggarcagcctctagagctgtcttcaaggaatggaaagaggagtgaggaaaggatttaggacttatggggtcagctaggtttccctttgtgagtttatataatggttttgttaggatggcaaaaccaggtatccaaaggcaaaagtatccaaccatgcccaggaaggaaaggagttgttttgtagaaggggttggggtttcagagatcagccagacatgatcagcagggagascccatgtgttttcatgaagaattatgctgaggtacgtaacggatggagaagaaatttgagctttggagggggatacccgatatcctttggagagtaaatgttgaaggagcaggagggtatcttgttgaaaagactcaaaggagggactacagagtagaaggtcatcaatatattgaataatgtgggaagcagagggatgggaagaaagtaaatcatgagagagagcttggctgaagtaatgagggctgtcccagaagccttgtggcagtacagcccaggtaagctgctgggactgatrggtgtcagggtcagtttaggtaaaagcaaagagaggctgggatgtgtggtgcaggggaatagtgaaaaaagcatctttaagatcaagaatggaatagtgagttgtggagggagatattgagaacaaaagagtgtacgggttgggcaccacagggtggataggaaaacaattttgttgataaggcgcagatcctgaacaaacctgtaagacttgtctggtttttagacaggtaagatgggggaattataaggagagtttgtaggctttagaagcccatgctgtagcaggtgagtgataacaggcttcaatctccttaaagcctcttgtgggatgggatactggcgttaagctgggtaagggtgattaggctttaatgggatagtaatgggcatgtgatcagttgccagggagggagtagaggtgtcccatacctgtgggttaaggtggggggatacaagaggaagacacgaaggaggctttgggttgggaagaaggatggcaatgagatgtagctgtagtccaggaatagtcagagaagcagataatttggttaaaatatctcagcctaataagggaactggcaggtggggataactaaaaaggagtgcataaaagaatgttgcccaatttggcaccaaagttggggagttttaagaggtttagaaacctggccgtcaatacccacaacagttatgggggcaagggaagcaggcccttgaaaagaaggtagtgtggagtgggtatcccccctatcgattacacaggggatggacttaccctctgctgtaagagttacctgaagtttggcatccgtgattctccggggggcttccgaggtgatcgggtagcatcagtcttcagccactaagccaaggagatctgggaaggagtcagccaagaaacattgggtttgagctccaggaactttaggagcagtggcgatgtgagtcagacagtccaacctctaattggagcccacacagacagggcacggcttaggaggaatcccaggctgtgggccttctgaggcccagtggccaggcttttggcatttgaagcaaggtccatgaggaggttttgaaggagcccctgggagctgtggcttggatgttctgaaggttttgtatgctggagacatggtcktgggttgtcttacactggaggcaagtagctataattcagagatgcattgtcacttggccgcctcttctctattatgatacaccttgaaggtgaggctatttaagtcctgttgtggggtttgaggcctggaatccaatttttggagattttttctaatgtcaggagaggattgggtcataaaatgcatattaaggataaggcggccttctggcccctctgggtccagggctgtgaagcatctaatggtaggtgctaagtgggccatgaactgggctgggttttcatctttaccttgggtagtttcctttagcttgtcataattaacagccttgtatgctgcttttttgaaccccttgactaggcaggagaccatgtaatctcacctagctatacctggggagtccatcttgtactgccaatggggatgctcttggggaactgccctgatgccttcttgaaggtctggctcatggcactggtgggtgtcagtgtgagattgggctagggtatcaactctttcctgctcatctggggagaggggggaggtcaggatgacatttcagtcactccaggttaaatcgcaggactgagttaaatattggaattcctgtatatatttagtggggtctgatgaaaaagagcctaaacgctgactgatctgggagaggtcgatagagaaaaaggcacatgtaccttgactatgccttcagctccagccacctgactaagagraaattgttgggcaggtggaggwgggctagtctcggaatgaaactgtaaggtggagtgggtgtgaggaggggaggtgatacttctattatagggtgggggagcagaggatgaggaagaattgggacctggcttggcctggtgaggagcagcctggtggggaggggagaggtcagatgggttcatagaaaaggaggattcaaaggactcagagcttagggtggagactgaagaaagagacaggagagaaagaagaaagatttgggatgagtcacactgggagcagagactagggagagactgatgtataaaagaatgcctggatgtcaggcacctcagaccatttgcccatttttcaacaaaaatcatccaggtcttataagatcgagaaatcaaaagtgtcattttctggctatttggaaccattgtccagtttgtattgaggccaagcggtattgcagaagaaaataaggcatttaggttttaggtcaggtgttagtcaaagggggttttaggttttgaagaacacaggctaagggagaagaagagggagtggaggctggaaggttgcccatagtgaagggggcaagcccagagaaaagagaaggtagagacatggagagaggggggatggtacttgccacccagggaaggtggtgcttgccacccagggaaggtggtacttgccacccagggaaggtgatacttgtgacccaggggaggtggtacttgygccaaggtgaatgatcaaggcaggcatccccacagtgatcagatacctctgaaatgtgggtgaataaccaggcaggtgtcctggcagtgatttagacaccaagggaagactgttcccgagtccatgactggcrccagagttttgagttcatggataaaacgtatctcctcygtctctaccagaaagggaaagaaactgaaattaaggaagggagagattgaagggtggagggatagcaagagaggttggagaagagaataaaaagaggccgcttacccgatttaaaattggtgagatgaccttgggctggctggtctgaggacccaagaggtggatctccccatggagtgagggcgaggacaggggatgggactcccgaaggagtccccctgtcccaggtctttggcaccaaatgtcatttgcgtccatgtgaagagaccaccaaacagtctttgtgtgagcaataaagctttttaatcacctgggtgcaggctgactgagtccgaaaaggagtctgcaaagggagataggggtgggtcagttttataggactggggtaagcagtggaaagttgcagttaaaggaagttatctattgtcagcagaggagggggtcacaaggtgcatggtagggagatcataagactcattgtccagaagaagaatgtcacgaggtcgatcaatcgatcagttggggcagggcagtaacaagtcataatggaacgttgtaaggttggtcaatcagttaagacaggagctggctgtttcacctatttgtagtttttggttgcctcaggccatctggatgtacccatgcaggcttgggctaagaggcctgaaacccaccactttcccatgtcaaatctttagtagatgtacccccaagatacacattcctcggaccttcttttccatagttaaaacttcacccctgaaatgtagaaacaggaaggttttttttttaagtttcagtgcaaactcggagcaagtgtcataattttctgtctccgatgtgtagaggtgacattttctcagaactttcaygttaagctggaaaactggaaagcgagtccactttgtcattctgtcactcactcattttctcactcaacaaacatgcctcacacttatctaaatctgctagrctaaaagaggtccctggtgtctgtaactttctaattctgctagaattctagagtgagctcatgaaataaatgaaaaggatgaagaacaaagagaaaaaagactgcacgttcccttctggcgctcactcacattccctcagcctcagtttctccacatgcccctagaggtgatcattcaaggatttatgagattttagagacaacacatgaaaaagcaaagagacatcagaaagacaaggagttacttagtatttatacacaaggataagacattcagtatcgacaacacttaaagaaaattcaagagtgattttaaatttcccatttcaaatacctccyctattttgtttcctttctcttatgacatctctaaataagcttcctctaactgccagcaagtctaatttcattggatttgactgttttcaaccccaattagaggcagggttaagtacacttaaaataataatgaaatattattttgtttctcctcccagggctattggacgtttgacatggaatgttataaaaagtatagaaaagtctgggggtgagtattctggaagattccattggatagacttgtttctatgatgagtttaccccactgcacagaggatagtctcagcccagagcctcttgcgatgaagctcttgccagcctaactacaaacagagaggttttctgaaagaagaagatatgtatttgggagaagagtattagaatgggaaactgtgtgccattataagctatgtgcaaattcagggaggtaaaggaagacaaagatgttccacagaaaatatgaggaggacttcatgtggattttgaaatagttctccttcactacaaagatcagtaacaagggtgatgccacaccaaggttggacaggcagttgctgggcaggtgtccttgcagaaatatttttgtgtaaggttgggttgggctttctgcaagctggtggttttgccaagtattttgtgatagttttgttatcaggcacacaagcatgagaatccactcatcatagccttctttgatttatttgtcaaggtttttaatcacacacataggcacacagacacactgacacacacacacacacgtgtcataattttggttctcacaatgttcacactcgctattgtaaaacaactttttgagatttgtcctaccaaggatcccatatgtcaccaggtgttgaggtcttcggtctaaactaggctgagaccattgtggttaccacttttctccaagctttggtggcccagggactcccagcatcacgttctgtccagtgtctgcctattcccytcttctttttttcttcccttgatgcccttttatcacatgcattgtctcagacccttcgaatatgtgctcataaatgcatggcatcatctccttcccacatcgattcactttcaattaaaagccaaaactctttcatttcaactttggatttaacatgcttttgaaagaagggttgagaaatatagagaaacagattgggaaaccatgctctgctgtttcttttttttaaactttctatgtaagtgtggaatttttcattctgttttattattaactttaagccaagactttttaatagaaggatatataaatacatctttgtctatacatttctgctgaatttgaagaratgctgaatattcttaaaccattgtgttccctggtgggctgatggactgtgattttataaggtggcctcagccaactgcagcagctgttccctgtcagaggggctagaggtttggcaagagcggtggaagaggtgcagtggtgtgttcgttcactagaagcatyagggagaaggttttgcctgtttgtatttcatcttctctcatcaagtcctcagaaaccacagtgctgtctgcagggtgctgtggatctggcatggcccatacaggcaacatgactgagtagaaaggacacacagctctggatgtccttgggccccacagcaactgcccttgaaacatttagtccttgtgagcatttgatgatttacttgccttcaattttccatggacctaatactctttataaagggaaatattttaaacctatgaaacattgtggagaatggcatgggaaatacccatgtatgcaccacccagcttaacaaatgctctcctgtcatttctaaccacaatctctttgaagagctcttttgtctttcaatctctcttccctgtttggcccacattacccttcatcgtatgaagacttggatggctcctgtgtcagactcttgctgtgagttatacctaatgaactagaacttaagattactgtgtattgtacatctagaggattatgtaatgtccggatcaaagtctggcttcctgggtttggctccagctgtagcataaggctgttgatgtttaatcaactctgttttctccacacagtatttatgactgtcaacagcctatgctggctatcacagatcccgacatgatcaaaacagtgctagtgaaagaatgttattctgtcttcacaaaccggagggtaagcatccattttttgaaattaaaatactcattgattgattaaatttttattttaaaattcttatatattcatagacagttgcctaaaaactgtgcaggaaggttccatgtacacttcatcctgcccatcccccatggtaacatcttgcaatcttgcataactataaatacagtatattcacattactgcagtacaggaaattaacattgatacagttcacagagtttattcagatttcaccagttttatgtgccctcatttgtgtgggtagttttttgtttttgtttttgtttgttgtttgttgtttgtttttcggactgagtcacactctgtcacccaaatgggagtacagtggtgtggtcttggctcactgcaacctccacctccagggttcaagtgattcttctgcctccacctcccgagtagctgggactacaagttgcaccaccacgccctactaatttttgtatttttagtagagacgaggtttcaccttattggccaggctggtcttgagtgtgtgggtagttctatgcaaatttatcacatttgtagatttgtgcaatgaccagcatgatcaagatgcagacccattccatctccgtatggctccctgctactatcctacagtcacgagtgtttttctctgagagggtctttatcagggaaaactttttttattttgaggaggccaatgtattaatattttttttatggattgtgcttttggtgtcaagtctgaaagttctttgcctagccctccttcctatattgccaatttttctaaaagtcataaagtttaatgctttactaaatgtaactctactatctattttgtgttattttttgtataaggtatgagatttagatcaacgttcattttttgtggcttgtagttgtccagttgttccaaagccatttttggaaatgtgggcatattgttaaaaattaattgggcatgtttctttgcatctttcatttgctattctgtcccattgatcactgtgyttattcctccaycaacaacaaactggtgactctaatacctgtacagtaactcttagcatcatgtagagtgattcttcccacttttatggatgtattttttyagatttgttttagctcttcctggtcctctgcttttccataaaaattcagaatgagtctctcagtgtctataaataaacatgctgttattttaacaagaattgaattaaatgtatagatcaatttagggaaagtctttatcttcactatgtttggtctttcaattcatgaacatagtatgcctctccatttccttagattttctctgattgcttttagcaatttgtagttttcagcatagagatcctgtgcatgttttgttggatttacagctaaagtatttcatttttgttggagtgattgtaaatgatattatgtttttcttgtattttcagatattgattgttggtacatagaaacatgcttggcttttgtttgttgatcttgtatcatagaaccttgcmgagctgacttagtatttctagaagtctttttgtatattcttgagattttatacattgacaattatgtcacttgaaaatagagacaattcttttatttcctttccaatctgtatgccttttaattctttttcccagtataatgtcaaataaatgtgttgaatttttgaattgttcctaatattaggaaggaagcatttggtctttcatcatcaagaatgatttagatgaagtgggtttttttgtagattctctttatcaaatggaggaattttctctccctagtttgctgaatttttaacataaaagagtactgtaagtactcattataaaacaaaatatggctgtggaagatgaaagagagtttcaagcatgctggcttgataggccagatccaagctggcaaaaataattatctctttcttctttttttctatccatggaataaaaaattaagaggaaagaatgttaatagaatcgcattatttcttcaaaatacgttgtgagttttaaaagtattayctaccttttttattatactttttttagggtacatgtgcacaacgtgcaggtttgttacatatgtatgcatgtgccatgttggtgtgctgtactcattaactcatcatttaacattaggtataactcctaatgctatccttcccccctctccccaccccacaacaggccccagtgtgtgatgttccccttcctgtgtccatgtgttctcattgtatatttttttaaatctaccacatcaaggcacctctttttcatgttgcccatggtttaggtgaacataaagacagagctcgtctgaggcaacatacagtccaacaaagccacctgcctctctgtctccactctctctctacactgcacgcgtgctaggtgttgatcctgtctattccagtggaagaacaggttccgtaccatgtggagaatttgcatgtaaaaggagactgggatatacaggctggagaccacatcaggtggctgggcatgtgggataaatcctattgagcatctgtcatagggcctgtcacttagtagacagtcactaaatatttgttaaatacatgatgcctgtttaacacattttctacaaccawggagacctccacaactgatgtaggacaaaatctttctrctttgaactctagcctttcgggccagtgggatttatgaaaaatgccatctctatagctgaggatgaagaatggaagagaatacgatcattgctgtctccaacattcaccagcggaaaactcaaggaggtatgaaaataacttgggttttaattagaaacttaaagaatgaatcaggtggggacaggtagaaagtaagatcagagttcctttccgaggagtagtctgctgaatttgagcttcctaaaaatagtctttttatgtacagaaaacacatcataaaattcattayacaatgtcacttattgttccatgccaggcaaagtcatgtccttctgggacttatgtctgcacatttaactatgggtggtgttgtgttttgtgcttagatggtccctatcattgcccagtatggagatgtgttggtgagaaatctgaggcgggaagcagagacaggcaagcctgtcaccttgaaacagtaagtaggagcacagccatggggttctgagctgtcatgagcccctccagctgcctgctatggagctgatactcccgctgttgggttattccagtgaccagacaaaaggagggctgtggtaatgcaacttcaatgggtctcccaagatggggcagctccgatgaggaggtggggcagctggaggaaaaggatcttctcccctgtgcacagaggtcagggtttacatatctgttaaattgtcaccttggatattctggaggactaaatacatcctttagggggaaaagtgtgattgtatcaaagttttaagcatggagtgtrtgggatggtggaaggggaaggcacttggtatctgttggttggcagtgagtagggtgggaaagttataatggagaacttagaataactttgatcatttcatgttttttttctgagggtatcagtagaatactaaatattaaacattcccaccatttctttttcctccagtctcaaagagagagggtggtaaaaacgctataggtggggcaagcctattatttgctgtctacacttatgcaggaacaacaggtgtaatctgagcctgtcctgggcagacaggggatatgtggtcactcactatagaagtttccaaatcaaattttgagagttttttttaaccaggacatcatttgtcattatattttacaaaaataattctgccatcagggcaacctcagctcaccacagctggggatagtggaattttccaaagcttgagcagggagtatagagaataaggatgatatttctaggagctcaggacatggtactgttgctttgtaaagtgctgaagaggaatcggctctgggcatagagtctgtagtcaggcaatgtcacctgtcttgagccccttagaaagagtgaatttttctactcttgttctgctgaagcacagtgcttacccatcttgtatcatccacaattaacacatgctactgcagttgtctgatagtggatctctgtctttctatgactaggctccttgacctcagaggtaagtctaactcagttgagtgtctccatcacccccagcggagagccagctgtgtcactgacacctgataatcaccttctgagggagtgtgatgggagatgctccagtaaatagttctgaaagtctgtggctgtttgtctgtcttgactggacatgtggatttcctgctgcacgcatagaggaaggatggtaaagaggtgctgattttaattttccacatctttctccactcagcgtctttggggcctacagcatggatgtgatcactagcacatcatttggagtgagcatcgactctctcaacaatccacaagacccctttgtggaaaacaccaagaagcttttaagatttaatccattagatccattcgttctctcaataagtatgtggactactatttccttttctctccctctctcttaaaaataactgctttattgagatgtaaatcaccatgtaattcatccacttaaaatgtacagtttaatggtttgtagtacatttgaagatatgtacgaccatcaccattgtaaactttaaaacacttctgtcaytctagaaacctcatacatgtttagctatcaaccccctgccagaaatcctgttgtcgtatataaccactagtcaactttctgcatctatagatttgcctattctggacacttcatagaaatgatattaatttttcagggtttttttaattctctagttcatgaatttgtactttagtctgtattattttctttcttctgctggcttcaggcttagtttgcccttctccgtttactgtgttgtggcatgaatgtagattattgatttgtgggtttttttcctctaaatttagacattacaactataaatttccctctgggcacttgtttgctaaataacatgacattctggcctatcacatcttaatttttgctcagctcaaaacagtttctatttgcccttttaatttctacttcaacttattggttgcttaaaagtttattgtttaacttccacgtatgtgtgagtttcccaattttcgttaccttattgattttagctttatcctatgataggtgacagagatacactgtgttatttctatctgatttcttgaasagcatgattaatttaagcagcaaattatgatttgggttatcctaagagaccctagcccaatacataaaggcaaagagattagggcattgaattttgttcctttcatcattcaaaagatgcagaaggggctgctgatctcactgctgtagtggtggtccctatgcacagaccttcccttgctcagccactggcctggaagaggggcaaaagtcatagaaggaatggcttccagttgagaacactgatgtatttcactcttctgattggtagagaaaattagaattgctccaggtaaattttgtatgttcacaatggtttcgttttctgttggttttttttttctacagaagtctttccattccttaccccaattcttgaagcattaaatatcactgtgtttccaagaaaagttataagttttctaacaaaatctgtaaaacagataaaagaaggtcgcctcaaagagacacaaaaggtaaaacgtggtggtagttataggaggatgtttagttttcataattttttagaaatatacatatgatcggtgcacttccctgtatgtttttagagaaagattttaacataaagagtacttatgtttagagcaagataattcatttggtaggaatgcagaaagtggagtttgaggaaggagatatgagaatgagtcagagagagcacttaaaatttgatatcaggcacaagaattagtatgccatgacataaatattattcagataaaaccttatcacagcacttcccttcaataaattgtcaaaggataaacattactgtttggaaatacattttattggtattatgctttctctagatcatagattggtaaagagtcatttcaagtacaaggctattattttacacattctccaacaaaaggtcctatcaggccacctgctgaagtgtagtgtgtgttacatttgagccctctgacagcctcgagtgaacagaggtcttctctgggaattgaggctgcaaggctggctaactcagctttgccttcatgagccctggagtccagccaaaagatatctgcaggtcaggggggcaagaaggggtaacccaggtgtcactgaagattgtayagatttggggaatgttgcagtatttgaaagtgctcccaccaaagctgctgacaagttctggaaatgtcaggagaataatctttgtggacattggtgatgaagaagacagaagaataaaaggcccaggacttcttcatgggtatgcagttaggaccagggaaaagaccaaaaagcaattgaacattttagccagatttgtttcaggaaaacatcctgctttccaaggatttagatggatattccttttcactggtgactcaggcaacacccatcagatttctggtctccaaggggctatattctcagaagggaggttgaggactgcacttctgattaacttctgacttcacgagtcactttctgtcaataaaatttctctttttgcttctagcaccgagtggatttccttcagctgatgattgactctcagaattcaaaagactctgagacccacaaaggtaacaaaagagtgcttctgagggctactggtggggcactcagagggaaggttttgttctgaaaatgtgcaggaagtattccaggtagatgagaatttctgccacatagcagaatgacacaggtttggatgttaaaatggtagctggaggcaacttctagaggcatgcaggcatagatagccatgttctaagcttaaagggcaaccctaaggaaaactggcatgccaggaagagtcagcagtctgtggatcacctacataagatcaaatgccagttctcagcctcctccagatccacagaattaaagtttcttcctggaaatttattaggtttctgcaaaaataattgyaatttttgtgattgctttcaatggcaaaaaccgcaattacttttgcagcaacttaatgcatctaacacctaatcaggagccatgctatccaaataagggcgattttaactggcaatttttggtgaaagtgtgttcaccaggttaatcaactatgaagttattttttcctttgcaatggataagtaactttttggaaaacctctgagactgtgtaaatatcctttgtcttcagtctttcacctaccagttttacaacccatgtacgatttttactgaagtcattgttactatgagtggcaaaatgatggccatgttcagtttcaagccaccaagatttggcaatcatgtcacaaaattcctgaatatttaatcattggttctagagagcaggagtaggctgactttggcatasagatttaaatatgtccatgtctacatctacttctgtctgtctgtctatctatctatcatctgtccatcaatcatctatttatctacttactgattatctagctatcatctctctatctatcccaatacaacttgctgtgataaaggaaakagcctactgttttagtgtttcatctagaaatcactagacacatatagctattgagcactgcacatgtggctagtgccactgatgaaaaattttaagttgtatttaagtttaattgaataaaatttgattttaaatagccacatgtcaatagtggctaccacattggacagcagagctctaaactttgagattatagtttggtttcacatcagtatcatcaggttcatggtaacagaatacaattattagatagttgaatttacccacaactgcatcacagaaatcttcactggtaaatcacagctctgttgacatttctcacactcctttcgtattggttttggtggtgagttacatggttggaacaggcactatatttatttctgtgttcccggtctctaaatgtcctaatccagtcctgatcaaacagaccagtgatgggccatcctgagcttctctcaggaaaaaaatcaagagaggggccaacttgcaatcacaagagcttataccattttaatgccattcatcagactgcaatcaatcaccactcatctagctttttgtccatcttcagttgctgtacatcctgagatagtcaattctgagacctatagcctgggtctattacctggtgcctctcaaagatataatccatacttctcaacctgggctatgcacacaaattaccacatcttgtgaaattcagacttgaatcagtagttcaatggtggggtttgagattttgcatttctgtttttgttgttgttgttgttgttgttttgttttgttttgagacagagttttcgctcttgttgcccaggctggagtgcaatggcatgatctcagctcaccacaacctcagcctcccagattcaagcgattattctgcctcagcctcccaagtagctgggattacaggcatgcgtcaccatgcctgggtaattttgtatttttagtagagaaggggtttctccatgttggttaggctggtcttgaactcctgacctcgggtgatccacccaccttggcctcccaaagtgatgggattacaggtgtgtgccaccatgcccagcctttgcatttctaataaggtcacagatgcttatgatccacggaccacactttgagtagcaagaggtggtctgtattccaatattggtctcttaagttccctcaaacatatctaaaggaaaggtcctttaattttccatacatctagccattaatgttgcaaattctctcaaagtttgtcaaggtatattgtagctaaaatgaattacatttttcttgggagagaagactaccccatattaatttacaataaagtacttttaggatcattcaaggagcacaccatgacactgagtatgttatgcagaaatgttctctctggaaattacccagctgtgaaggtggcagggatggcacgaggaggagcggatggtctacgttcttgaagacattgggggaaaactggattaaaatgatttgccttgttctggctctgtaagacacacatcagagtgaaaccacccccagtgagactctgaattgcttttctattttttcccctggggatttgaaggttccacttagatttcttttcatctaaactgtgatgccctacattgacctgatttacctaaaatgtcttttctctcctttcagctctgtctgatctggagctcatggcccaatcaattatctttatttttgctggctatgaaaccamgagcagtgttctctccttcattatatatgaactggccactcaccctgatgtccagcagaaagtgcagaaggaaattgatacagttttacccaataaggtgagtggacagtacatggagaaggagggaggaggtgaagccttagcaaagatgcttcctcaccacttcccaggagaatttttataaaaagcataatcatgattgtttcattcacaatatgtaggaaggctctcaaaataaaaagaaggaagcatagggaatggttgctattggcagaagtataagatctttgtaaaacagtcctctccctggttcatctgctttctgttaccacaataatgctaagtaaaaaaacatccaaaaacctccctggcatttaacaatatgcatattgctcacacgtcttgatagtgagctctgctgatattggcaggacttgctctggtctggctgtgatctgatggagcctggccctgggtgcgctgtgcaggttgactcagctctgccccacatgtgtctcatgtttcagtcaggtaaccactggtgaagaagcaagctaggaaccagggtatctgacttctgagctaaactcttaaactctataatattgcctttcaaatataacactaagtactaggtgcctatcaaccacactgttttcagacctctgccaaaacttggattctttgtgctatgaagagacatggcttttgggctggtctttgtgtggcagtgaggtgagcacaaagggatgttcttcagagattacagtccagccctgaagcaacaactaggagactgtttcagcaagtgaggacagggctgtgtggggttctatccttttcataactttgcctggcactgaaatcacatgctctgataacatccaccagaactttcttttgtcatatttgggatagaaagggactagtttttcctcaaattattgatagagattttatataatatagtgtttctctccacattttatgtatataacaaaagccctgcttttgtgtatatatgcatatatatatatatacacacacacacacacacatatatataatacaaatcctgctttgtaactgtttttgtttgtatatataacaaaaagagttatgaaccagaagtttggccaataatccttgtcgcacagagaatttgctttttctatctgttttcacttycttggttacagacgtgtaacctcttttttgaatggtgacaatcactttgtcatattttatttgatgctagtggtcatagcctattagtcatgtttgcttccatgagaaagaaaaaccactacatggttatgctaaggatttcagtcattggggttagagccttcccgaatgtctcctgctttcataactcctccacacatcttagtgggccattgagcacatcaaagggcatgacagttattaaaatactttatgaatgctacaatcctttgccagtatgagttgttctctggaacttctaacagttcaacagtactacatggactgagttaaaagttaattcaaaaatctcaatttatccaaatctgtttctttcttttcaggcaccacccacctatgatactgtgctacagttggagtatcttgacatggtggtgaatgaaacactcagattattcccagttgctatgagacttgagagggtctgcaaaaaagatgttgaaatcaatgggatgtttattcccaaaggggtggtggtgatgattccaagctatgttcttcatcatgacccaaagtactggasagagcctgagaagttcctccctgaaaggtaggaggcccctgggaagggagccctccctgaaccagcctggttcaagcatattctgcctctctacaggacagtctgggcttgtacaatcrtttgcttgtctttttatgtttaaaaggttttttcaaatcatgaaattgatcattgtcacactttacaaaccacagactagataaaagaaaactatagccagtcacagtcccagcaacttaagatgaaggtcctcaattatgtccttatgggtcataagtgtccaaaatgtaaggactcttttaaaaacacatgatcacaatgctattattatgycccacaaatgaatattttttcctgaatatamtcaaatcttcaggaatcaaatttgaataaaaaacatgcgtctaatcttcaaagaatttataggttagtgcaacagatagacaaagaaagcagtgatgacactgctttccatcaatacagtagcatcatatgcctgtgtaaattatctgacttaaactattctatggaggtgtgggggagaaagaaggagagatggagattagaagaaggaggagaaggaggagagaaggaggggtaagacaaggtagggaggagaaggaggagaattagaaaaacaagagacgagaggagaaggaaagtgcaaaataacaattttgaagtagtgcaagacaatttcttctccttcctcatgaccaacataagggtgacttgaggcaggaatctacttttctgtcagtcattctcatcacttatgtgccttttgtagtgtgaacacatcaccatcctgactataatttgagtgtttagaaataaatatactttgcaacagtatttatctcctctcaacaagactgaaagctcctataatgtaaggagagtagaaaggatctgtaccttacaattctcatagcaaaatatgcatagcaggatttcagtgactagcccacaaaagtatcctgtgtactgctagtagaggggtgggccctaagtaagaaaccctaacatgtaactcttagaggtattatgtctttaacttttaaaatatctaccaatatggaaccaggttcagtaaaaagaacaaggacaacatagatccttacatatacacaccctttggaagtggacccagaaactgcattggcatgaggtttgctctcgtgaacatgaaacttgctctagtcagagtccttcagaacttctccttcaaaccttgtaaagaaacacaggtcagtcaattttctgcattaataatgttttattaacaattattttaactgaatggtctatatatttaaaaaagaatacactcacttaatcttttaataatttgttctatgggccaaggaatctatttggacccatctatgatctttaagggtgcttcagttctggagttcaaaagctgtagcattaaaaacatcatgcaatgtcaatgtagactagcatgacatgattatctacagtctccttgaacttgagcaaaattaaattcagtttcaagtcaattggaaagatggggaagtattttgcacaatcatgaggtgcacttattatcttgttttgacttttgaatgatgctcttccttcccagaacttgtagaagttttctcatgacagtggctcccaaccactagctgtacattggaatcaccagggagctttaaaaattcatgatgcctggaacatctcagaaattctaaactaatttgcccagagtgtggctttaaaagctcccccattgcttctcatgtgaagccaaggtggaaaatgactaatttaaggtagttctattggatacgaaggactaccacagtccaaggccatccttactgacctcaccttccaggtgcctagctccaaccaactgggctccttttcaactcaattataactctgctaatcttctttcctttcttctcctcattctgttcttatctttcaagtcctarttcaattcccaagcccctccaaggtgtcttcttgacctagtccagggctcatttactcctctgctctgttattagttactggaggctattatcwtataatttcataatttgccattaaatcattgagttttgttctctatattttctctttatctaagaatgtcttcccccctccattaacaatatcytctcattttattccatttaaaatatcccagtggtgccttgcaagtgacctcatctaactcaagcatttggtcatttggtaaatgtttaaggagtgatatgcagtcgattggtttgcatacaaatattaagttttttaatgtgaacatttagcaaatgacattcatgtatttgcatgtgtgtgtgcttgcacatgtgcacatgcatgtctgtctgcagggaaaatatattcatgccttttgaaaatttttaaataatgtgttatatttatagaaagatttggaaccttttctctgaagaagttaaagaacagatgtcattgattcatattaagcaagaccctataaatcttatttctaggtctcatgtatttattaagcaactccacaccttaagcaggctttctacatagaagaggaagaagatagagatggtttccatattattttcatattccacattatttgtggctttaggccagctatgtagctatcctgtatgtgtgctcagacaggagactcagccctgagagaaggcggtcctctggcacacctrggatggggaaggtactcccttggaagtcccaagctggcacttctggatctccatggcaattttcttgcccatcactccatggagatcagaatatcactctattgtgtcccctcaacactgaaggagtgtctcaataagaaaagttgagtcaaaacactgtaggaattgagaggttccccacttgcactacccttgtaaaccaagagaagatgttaaaaaataaaacgataatgcttcctgaaggtgtcttcccatctttacactagatgggttcaattgagaggaattactggactgtggaagttgaagactgtccacataattaaaatgtacaatagctactcaggattaccttgcaagtttcaacatacacaaaattaacttcataagatggtttaaaaagtttaccgttatacctaataatctggtttaaatttttaaaactcatccattttcgttaaaatttaaatcaaaaaagaacacgggttcccatgaatttgtctcaggtcaaacctcacacagaataggtgctccatgaatattttgttaaatgatagatgatgaatgttctcactatccaatcttcacacatcttatagagtaagtataacgaatccaagatttatagtgctgaaagtagtttttatatgtttacaaagcattattgtcagtaatttttttttactttgatgctatactttctacttttgctttatttaatgcttctcaatatgctcgtttaactgttgcagatccccctgaaattacgctttggaggacttcttctaacagaaaaacccattgttctaaaggctgagtcaagggatgagaccgtaagtggagcctgatttccctaaggacttctggtttgctcttyaagaaagctgtgccccagaacaccagagacctcaaattactttacaaatagaaccctgaaatgaagacgggcttcatccaatgtgctgcataaataatcrgggattctgtacgtgcattgtgctctctcatggtctgtatagagtgttatacttggtaatatagaggagatgaccaaatcagtgctggggaagtagatttggcttctctgcttctcataggactatctccaccacccccagttagcaccattaactcctcctgagctctgataacataattaacatttctcaataatttcaaccacaatcattaataaaaataggaattattttgatggctctaacagtgacatttatatcatgtgttatatctgtagtattctatagtaagctttatattaagcaaatcaataaaaacctctttacaaaagtattattggatgtttcctgcacattaaggagaaatctatagaactgaatgactgagaaccaacaactaaatattttgatcattgtaatcactgttggtgtgggaactggagtgcagtggtgcaatcttggctcactgcgagctctgcctcccaggttcacgccattctcctgcctcaacctcctgagtagctgggattacaggtgcctgccaccacgcccggctaatttttctatttttagtacagacggagtttcactgtgttagccaggatgctctcgatctcctgaccttatgatccacctgcctgggcctcccaaagtgctgggattacaggcatgagccacggtgcccagcccaatttgattattaacataggtgagagttaacccactatgactttgcccattgtttagaaagaatattcatagtttaattatgacatttttgatgagacacagtggctcacacctgtaatcccagcactttgggaggccaaggcaggcagatcatctgaggccaggagttcaagaccagcctgaccaacatrgtgaagccccctttctactaaaaatacaaaaattagctaggtatggtggcacacgcctgtaatctcagctacccaggaggctgaggcaggggaattgcttgaacctgggaggtggaggctgcagtgagccaagatcatgccactgaactccagcctgagtgacagagtgagactgcatctaaaaaataaaattatgcctttttgtagcacatatattttgtaacatacaactgaagccmgtattatattattagttttcatttaatgttttcagcccatctcccctgatatttctgggagacaggaaatatgttttcttacacctcttgcattccatcctcaactcccaactgtctaaatgcaatgaacatttaataaaaaaaacagttgattggtcaattgattggacaacaaggctgaaactactcatttcttttcttttcctatttcttcctttattttccctttctgaataatttagccctagagccattaggtgggtggcagccagatggtggccacacattaaggtagagaagagagtcatggtggttccaagtcagagaccaagtaggatgaggacaaactgggtgttcatgtggaaacagcctgcctgggtgtgggagtccaagcaagcagagaaggggttcatagagaggtgtggcctacaagagcagccagagcctaaatagagcatggagaacccatgtgaggtcaggagggcatccatgagtgggaagtgatgggtgaggtttggttacataaaggggatttatcaaagaagtaaatatattaaggatgatagaagccaggcttctcatctttgaagaacggagtcatkgattcagaaagggagaaaactagcatgaatcctatgaaattagattggaatggatgtattcgtgtatattcatacccttctagatggatagatgggtagataggtgatagataacagatataygatagatatatagatagatgaaatgtatacatgtgtttgtgtgtgtgtacaaaaaaaaccatatatttcctacttctcttcactgataggtctaggtaacaatgacatttcaatagcaatgagcacacttagcgcccaagtcttggcttatgaataccatattccatggaaaggaaccagagctctttagagaaatgcctgattccagggccagggttaagaaggttcaagacaagcctaggacacattttgtgccaggaagcaagaaaatgttcaaatgatttccaagtaatgtttggaaatgatatttgaaaaagaccctccaaatgataactccaaattattttcaaatgatatttgcaaaaacctaaagactccaccaaggaactaytagaactgataaaatattcagtaaagttgcagttgcaggatacaaaatcaacatacaaaaattagtagcatttctatatgccaatagtgaacaatttggcaaaaataaaaaagtaatcccatttacaatagccacaaataaaactaaatacctaagaattaacttaatcaaagaagagagagatctctataatgaatactgtaaaacactgatgaaggaaattgaagaagacacaaaaacagaaggatattccatgtttacatattgtaagaatcaatattgttaaaactgtccacactacccaaagcaatgtacagattcaatgcaatccctcaaaataccaattacattcttcaaagaaatagaggaaaaaattctaacatttctatagaaccacaaaatacccagaatagccaaagctatcttcagcaaaaagaacaaaactggagaaatcttattacctgacttcaaattatactacaggggtataataaccaaaacagtatggtgtttgtataaaaacagayacattgaccaatgaaatagaatagagcacccagaaacaagtccacacacctggagtgaactcatttttgacaatgttttcaagaacatacactggggaaaagacggtctcctctggtgctgggaaagctggatatcaatatgcagaagaatgaaactagacccctatatctcaccagacacaaaaatcaaatcaaggtggatgaaagactgaaatctggccaaacacggtggctcatgcctgtgatcccagcactttgagaggctgaggcagacagatcacttgaggtcaggagttcaagaccagcctggccaataaggtgaaaccctatctctaccaaaaaatacaaaagttagctgggcatggtggtgcatgcctgtagtcccagctactcaggaggctgaggtgggagaatcacttggacccatgaggcataggtggcagtgagccaagatcataccaatgcatgccagcctgggcaacagagtaagactctggttccaaaaaaaaaaaaaaaagactgaaatctaagatctcaaatgatgaaactgctacaggaaacattgtggaaactcttcaggacattggtctgaacaaaaaatgctgaagtaataccccacaagcacaggcaaccaatgcaaaaatggacaaatggaatcacatcaagttaaagtttctgtgctgcaaagaaagcaatcaacaaagtgaagacgcaaaccacagaatgggagaaaatattttcaaacactctgacaacagattaacatccagaatatacacagagcacaaacaactctttggaaaaaattcaataatcctaataatcaaaaaatgggcaaaatatttatacagacatttctcaaaagaagaaatacaaatgccacatagttatatgaaaatgtgctcaacatcattgatcatcagagaaatgcaaatcaaaactacaatgtcatctctccccagctaaaatggttttaatccaaaagacaggcaataacaaatgccagtgagaatgtggagaaaagggaattctcgtacactgttggtgtaaattattacaaccactatagagaacagtttggaggttcctcaaaacattaaaatggacctatcataagatccagaaatcccggtgctgggtataaaccaggaagaaaggaaatccatatattgaagagatatcttcattcccatgttcccaatagctgctattcacaaatgccaagatttggaagcaacctacatgtccatcaacagatgaatgggtaaagagagtacttcacttatgcacaatggagtacaattcagccatgaaaaaagcatgagatcctgtcctttataataacgtggctggaactgcaggtcattatgttaggtaaaataagccaggcacacaaagacagacattgcatgttctcacttatttgtgggatctacaaatcaaaacaattgagctaatgtctgggtcttagtcaattttgtaccctaagtacagggagcacagccattagaatacatgatgaatgctttaatacaggaatgaataggtgagaggcacagggtggttgggtgttcttctgatacatagtatcttccttgacacattcagtacaactctcaacaggtaagtctcttcatgtatgttaccttctgaggaattaagtggcagaacatgccttctattattttcctttgcagaacaagaccaattgcattagttgggaaacagtgctggctgcatctgagccccaagcaaccattagtctattgctatcaccacagactcagaggggatgacacacaggggcccagcaatctcacccaagtcaactccaccaacatttctggtcacccaccatgtgtacagtaccctgctagggtccagggtcatgaaagtaaataataccagactgtgcccttgaggaactcacctctgctaagggaaacaggcacagaaacccacaagggtggtagagaggaaataggacaataggactgtgtgagggggataggaggcacccagaggaggaaatggttacatctgtgtgaggaggttggtaaggaaagactttaayagaaggggtctgtctggctgggcktgcaaggatgtgtaggagtcatctagggggcacaagtacactccaggcagagggaattgcatgggtaaagatctgcagttgtggcttgtggggatggatttcaagtattctggaatgaagacagccatggaaacaagggcaggtgagaggatatttaagaggcttcatgccaatggctccacttcagtttctgataagaactcaggttccgtggactccctgataaaactgattaagttgtttatgattccccatagaatatgaactcaaaggaggtaagcaaaggggtgtgtgcgattctttgctactggctgcagctgcagccccrcctccttctccagcacataaacatttcagcagcttgacctaagactgctgtgcagggcagggatgctccaggcagacagcccagcaaacaacagcacacagctgaaagtaagactcagaggagacagttgaagaaggcaagtggcgatggacctcatcccaaatttggcggtggaaacctggcttctcctggctgtcagcctkgtgctcctctatctgtcagtaactgtccagattcctctcctctgttaacttggacttggggtgctactcaggcccctgttccctcatctgttttaaagatcaaaagagatgttcaaggaggagtagcttcttggatgctacaaacacatagaggttattattgatcttatgcagatttatgaagaaataaataagcatttgtcccagccaccttctaattttggtgactaggagggtttggggacagcatttgttagtgggaatgatttgattagcttagatttgacctatactaatcaatgaaaatgaaaacccagcaaaggcagattacaaactgctgaacaagacgagaagtgtgatcctcatccccttcccaggttctcgggattctgggggcaggagggagcagcttgggtttttgtctcattaccttcattttctgggttctctgtctgctggaagagatgtgtagaagtttttcctctgtggacctggtggttcctgctcccctaacttccaccccaggatatcatttacataacacaccggggaacaccaagacttcacgggaagctgtccccyggctctttcctctttcctgtgccatgtcccaaaacatcccctccctcctatgactcactcctccaccctgtcatacacagaactatttaccttgcaatgattaatctccagagcaaaggagacttggaggaagttttgaagatttattctttgctttaatctttttcctcccgtctctgggaggctagcattaatatagagctttgtttctcagctaatgggaatctgctagcagcctgaaaaggcaggagctgtgaaagccaatttggattttacacattttttcccctttgtgttacagtaaaggaggatgaaccctctcactggtgggaytcctggcatcctagagcaggtggagagaagagttactttccactgtggttagtggaggctccacctgtcccattaacttctacctcaatttgacttttaagagcaggcaacaacaatgacatgaaaataggaaatataaacttcattttaattttttcacagaaagcttaggaattcagtgagttgtggcaacatggtttccattgtctaacattttaaaatgaattgatatggtttaaattcattcatttttaaatcagaattttttggagatggaatatttccagcatgttccttctggrtgatgaaagagggctgttagttcagtatttgtgacaataaatgtgtgtaaaataacatcacctctccagaataatgtcaggaatatgagtctaaagcatgaatgtatatcgctaagacaagactgcgatatacatatttatgtatatctttttatatttaaaaagatatgtctttttaaatatacatgyctgacagtttattttaatacctcctttttgaatatacctgcttagcaggttatcttaaactgtcaggcaggggagtaagcaatactgtgagctagtgatgatagcaaaggcatccacgtaggatccgtatgaagtaagaaaatattcctcagctctcagggtagaactccaaagagatattcatgggtcctggccccacagtggaggtcactcaaaaggcaaacaggttggcatctcatctgcttcaagcctggacacagggacatcaaatgtgtcactgtgtgcgtggtctgccatgttgtggggcggtcactacagactygggcagccaggcagacaatgccttagccttagacaatgctggtgcagcccaggagtcagaaactgtagtgtagaccatgccctccttaggccaacacaattacgtgcaatagatgactggcttttctgttagcctcttcattggaaccaaaagtggtattactctaccaaacagaggggagctrgaaagaaactaaacagtttgcccagcacagcctctgccttgacatggaaccatgtgagtctagacactcacctagatctttccttgggggacagtgctgctgacagattaactcaatagtttgtcctgacctgagagatcacgtaacttctagaaagtgtagaagcagagattagtgtcattgatttgccatagctgtgacaataaaagaaggaacaggagtagaaaacccaaggccaccctrgtttcagtagatggtgcacacatttccactaactattctggggcaaggatccaaatgcactatatgctgcctctgctgggatctccaaacacgaccctccatgccatttctcagttgtattttaccacatattatcagagtcactggatttgtacagaatgtttggaacctatactgccttaagtgctacccattatagaagagaaaacaaggtcttcattcaactgtctggaacattttatgtttacttatgtggaatactgtaccttttgctatcaacaggaaggtacctggacattagaaggtgcctgtctttcagctgaaagcacacatgacgcatatggatccatttatatacaccatacttttcagccacattttcctaatttgcctctctgggrccaaccttgtgggactagcagattcacggttgagttgatggctggtgatgtctgccatcagcctttcttcttcctcyagtcttccacycctcagtaacatcagactgggaaggtcttcagatatccagaaccctcagttgggggagtccatacatgacccatcaaagatgagttgcaagcaggcctgccatagggagcagcagccttaatgggttttcctacagagatacttgatgtgcagaggcaataaactgactgctttgtgattgatcaccttgaaaaaagtragcatatctgggtgtattagtcctttcctacatcgctgtaaagaaatacctgaggctgggtaatttataaataaaagagatttaattggctcatggttctacaggccctacaggaagcatagcgacttctgcctctagggagccctcaggaaatkttcaatcatggcagagggtgaaggagaagtaggcagatattacatggctggagcagaagcaagagagggtggggaggaggtgccacacacttataagccaccacatctcataaaaactcattgtcacgaggaaayacccaaagggggttggtgtgaaaccaggagaaactgcccctaagatacaatcgccttccatcaggccccaccaccagcattggggattacatttccacatgagatttgcgtaggggcagattcagaccatatcactggcagtgtgcttattatcaggtgaataccaccagttggaaggctagattccacaagaggaggaatgtcctggaaattggttttttaagttgtggatcttctgcacactgtcattcagggaaatatgagttaatcatcctccccaatagcgcaaatcaaccagatcatctggccacagagactgaggtgtagctgaaaggtgcttgcatttctacgaggccaatggaagccttcagcacagttgtcaatctgtagaaataaggactctgtgactcctctgacacccctctatgaatgacagtttaagaagggccagatcctaaaatagggtcagagcttagagggaaaggaaagtataaaagactcttcacaaattctaaagacatggtcaccataggctctcagtgaccctctgtgactgagtggatgcagtgatgcaaaatctcatcatcactgcagaagagaaaaaaaaaaaaagtcaccctttctgcctaggatgagaatccccaaatcagggaagagtccacttactaaatagacataaggaaatgaagtgccctggaagaattccttcctgaacctctgaggagcactcacgtttgaggacatttatcaagtattcattccaggattgggaccataaagacttctgctgctttcgactaatcattgtgactttttggtgtctcatggtggagacgggaaaggacttgatgtacaaatataatcattgctgtcagagttactgttatcatttattgccttaatgttacctccttctcttgagcattccagttcctcagtcagtgacttaccagcccccatatctataaagtcacaatccctgagacctgatttctgwttcagtttgtagatatggagcccattcacatggactttttaagaagcttggcattccagggcccacacctctgctttttttgggaactactttgtcctaccatcaggtgagtgtttttgagctcactctttggcttcttatgattggagagagcagcttagttccatcagtaaaactgcttctcctcaggaggaaggtctgaggttttacactttcagaaacagtgtataggcatcatccagagcatggcaaggtttaccccgggactctcttgctaactctcaggaacctcaggtttgcctcagttgaacagtccaaatctcaggtatatcggcaacctgatgttcagaacttgatgtgcagactttgtgagcaccataaagaacatttttcttttgccccatgtaggttcccaggaaggtacagtcatatttagttagtattaagagtaggaaaaggagcccccatttgtggcttgctatctgtgtacatgagagtcaaactttcctctctatagcaagagctcaggagtagcctttttcccctacctcctggacagctttgaaactcactttattagggagctcaagtatttaccattgggtcattcgcacttgcttgaatcctctccaaaaaatgctaaatcccctgaaggtatttccatggctctaccccagctcttactccccatgacatcttttgcagctttgggagtcagarcaaaggtgttctgctttacttcttttatttcaaaggctgcaccttatgggtgagtctgagcagggagtggatataactgagatgagatagtggttatctatcaaactcagatatttaagcataaaatgaatttgtggttttttttttaaacaaaggcagaatcatatrcaaaatcactagaaaggtgataatttgatgaaattattaaatatttaattttgctgaataaaatgtcatatgtgccacatggactgtgaactttggtcgagcctttgtgcctaacctggtctgatgctctgtctagggcctggcctctggatggaaaattatgagcttatctccacagggccagcagcagcagtagtcagctctgtggcttagatcatctttcccgcatacctgaggcttgtttccctgattccaattcttccaagtgagggttttgttgtctaattactgcccaggaatttcatatttttccctttgcaaaagcaataatttccccgccaccttttctaggtcagttctttagtagatgtaccccccaagataaacattcctgggatctttgtttgcacaggtaaaacatcaaccctgaaatgtaraaaacaggaaagtttgtttttcagtttcagtgaaaacgctgagcaagtgttgtaatttgctgtgtccaatgtgtagaggggacattttctcagaacttccatrttaagctggaaaactggaaagtgagtccactttgtcattctgtcactcactccttttctcactcaacaacatgcctcagacttatctaaatctgctagactaaaagaggtccctgatgtctgtaacttcctaattctgctagaattctagagcgagctgatgaaataaatgaaaaggatgatgaacagagataaaagactgtgcattcccttctgacactcactctctttccctcagcctcagtttccccatgtgcccctggaggtgatcattcaaggatttatgagattttagagacaatacatgaaaaagcaaaaaggcatcagaaagacaaggagttacctagtttacacacaatgataagtcattcagtatctacagcactttgagaaaattcaagagtgattttaaatttcccatttcaaatacctcctctgttttctctcctttcccttatgatgtctccaaataagattcctctaactgccagcaagtctgatttcattggattcaactgttttcagccccaattagacgcagggttaagtatatttgaaatattaatcaagggaagcatttccaagatggccgaataggaacagctctagtctgcagctcccagcaagattgaggcagaagataggtgacttctgcatttccaactgagtcttagcaacaggcagaccaggagataccctcccgtgcctcgmtcggcaggtgccacacccacggagacttgctcactgctagtgcagcagtctgagatccacctgatatgctgcagcttgatagaggaggggtatcagccattgctgaggcttgagtagcttactgtgtaaacaaagaggcctggaagcacgaagtgggtggagcccaccgcagctcagcaaggcctactgcctctgtagattccacttctgggggcagggcagagtagaacaaaacacaggagacagacagcctctgcagacttaaacgtccctgtctgacagctctgaagagagcagtggttctctcagcacggtattcgagctctgagaacggatagactgcctcctcaaatgtgttcctgacccccctgtagcctgactgggaaccactttccagtagaggccgacagacacttcaaacatgcgggtgcccctctgggatgaagcttccagaggaaggatgaggcagaaatatttgctgttctgcagcctctgcaggtaatacccaggcaaacagggtctgaagaggacctccagcaaactccaaaagacctgcagctgaggagtctgactgttagaagaaaaactaacagacagaaatagcatcaacatcaacaaaaaggacatccacaccaaaaccccatttgtaggtcaccaacatcagagaccaaagatagataaaaccataaagatgggaagaaaccagagcaaaacagctgaaaattccaaaaaacagagcatctcttctcctccgaaagatcacagctcctcaccagcaagggaacaaaactggacagagaatgagtttgatgagttgacagaagtagtcttcagaaggtcggtattagcaaacttatccgagctaaaggagcatgttctaacccatcacaagatagctaacaaccttggaaaaaggttacatgaatggctaactaaaataaacagtgtcaagaagaccttaaatgacctgacagctcaaaaccatggtacaagaacttcgtgatgcatgcacaagcttcaatagccgattcgatcaactgtaagaaaggatatcagtgatcaaagatcaaactaatgaaataaagcaagaagacaagattagagaaaaaaaagtgaaaagaaatgaacaaagcctccaagaaatatgggactatgtgaaaagaccaaatctacatttgacaggtgtatcagaaagggacagggagaatggaaccaagtcagaaaacactcttcaggatattatccaagagaacttccccaaactagcaaagcaggccaacattcaaattcaggaaatacagagaacaccacaaagatactcctcaaaaagagcaaccccaagacacataattatcagattcaccaaggttgaaatgaaggaaaaaatgttaagggcagccagagagaaaggtcggcttccccacaaagggaagtccaccagactaacagcagatctctcagcagaaaccctacaaaacagaagagattgggggtcaatattcaacatacttagggaaaagaattttcaacccaaaatttcttatccagccaaactaagcttcataagtgaaggagaaataaaatactttacagacaagcaaatgctgagagattttgtcaccaccaggcctgccttacaagagctcctgaaggaagcactaaacatggaaagaaagaactgctaccagacactgcaaaaacatgccaaatggtaaagaccatcgatgctatgaagaaactgcatcaattaatgggcaaaataaccagctaacatcataattgcaggatcaaattcacacatatcaatattaaccttaaatgtaaatgggctaaatgccccaattaaaagacacagactgatgaactggataaagagtgaagacccattggtgtgctgtgttcaggagacccacctcacatgcaaagacacacataggctcaaaataagaggatggaggaagatctactaagcaaacagaaagcaaaaaaaagcaggggttgcaatcctattctctgataaaatagactttaaaccaacaaagatcaaaaaagacaaagaaggccactacataatgataaagggatcaattcaacaagaagagctaactatcctaaatatatatgcacccaatacaggagcacccagattcataaagcagtccttagagacctataaagagacttagactccacacaataataatgagaggctttaacaccccattgtcaatattagacagatcaatgagacagaaggtttattttattttattattatttaagttttagggtacatgtgcacaatgtgcaggtttgttacatatgtatacatgtgccatgttggtgtgccacacccattaactcgtcatttagcattaggtatatctcctaatgctatccctaccccctccccctaccccacaacagtccccggagtgtgatgttccccttcctgtgtccatgtgttctcattgttcaattccaacctttgagtgagtacatgcggtgtttggttttttgtccttgcgatagtttgctgagaatgatggtttccaccttcatccatgtccctacaaaggacatgaactcttcattttttatggctgcatagtattccatggtgtatatgtgccacattttcttaatccagtctatcgttgttggacatttgggttggttccaagtctttgctattgtgaatagtgccacaataaacataagtgtgcatgtgtctttatagcagcatgatttataatcctttgggtatatacccagtaatgtgatggctgggtcaaatggtattcctagttctagatccctgaggaatcgccacactgacttccacaatggttgaactagtttacagtcacaccaacagtgtaaaagtgttcctatttctccacatcctctccagcacctgttgttttctgactttttaatgatcaccattctaactggtgtgagatggtatctcattgtggttttgatttgcatttctctgatggccagtgatgatgagcattttttcatgtgtctgttgggtgcataaatgtcttcttttgagaagtgtctgttcatatccttcacccacttgttgatggggttgtttttttcttgtaaatttgtttgagatcattgtagattctggatattagccctttgtcagatgagtaggttgcaaaaattttctcccattctgtaggttgcctgttcactctgatggtagtttcttttgctgtgcagaagctctttagtttcattagatcccatttgtcaattttggcttttgttgccattgcttttggtgttttagacatgaagtccttgcccatgcctctgtactgaatggtattgcctaggttttcttctaaggtttttatggttttaggtctaacatgtaagtctttaatccatcttgaattaatttttgtataagttgtaaggaagggatccagtttcagctttctacatatggctagccagttttcccagcaccatttattaaatagggaatcctttccccattgcttttgtcaggtttgtcaaagatcagatggttgtagatatgtggcattctttctcagggctctgttctgctccattggccaatatctctgttttggtaccagtaccatgctgttttggttactgtagccttgtagtatagtttgaagtcaggtagcgtgatgcctgcggctttgttcttttggcttaggattgacttggcaatgcgggctcttttctggttccatatgaactttaaagtagttttttccaattctgtgaagaaagtcattggtagctttatggggatggcattgaatctataaattaccttgggcagtatggccattttcacaatattgattcttcctacccatgagcacggaatgatcttccatttgtttgtatcctcttttatttcattgagcagtggtttgtaattctccttgaagaggtccttcacatcccttgtaaggtggattcctaggtattttattctctttgaagcaattgtgaatgggagttcactcatgatttggctgtttgtctgttattggtgtataagaatgcttgtgatttttgtacattgattttgtatcctgagactttgctgaagttgcttatcagcttaaggagattttgggctgagacgatgggtcctggacttttttggttggtaagctattgattattgccacaatttcagagcctgttattggtctattcagagattcaacttcttcctggtttagtcttgggagggtgtatgtgtcgaggaatttatccatttcttctagattttctagtttatttgcatataggtgtttgtagtattctctgatggtagtttgtatttctgtgggatgggtggtgatatcccctttgtcattttttattgcatctatttgattcttctctcttttcttctttattagtcttgctagcgttctatcaattttgttgatcttttcaaaaaaccagctcctggattcattaattttttgaagggtttttgtgtctctatttccttcagttctgctctgattttagttatttcttgccttctgctagcttctgaatgtgtttgctcttgcttttctagttcttttaattgtgatgttagagtgtcaattttggatctttcctgctttctcttgtgggcatttagtgctataaatttccctctacatactgctttgaatgtgtcccagagattctggtatgttgtgtctttgttcttgttggtttcaaagaacatctttatttctgccttcattttgttatgtagccagtggtcattccagagcaggttgttcagtttccatgtagttgagcagttttgagtgagcttcttaatcctgagttctagtttgattgcactgtggtctgagagacagtttgttataatttctgttcttttacatttgctgaggagtgctttacttccaactatgtggtcaattttggaataggtgtggtgctgaaaaaaatgtatattctgttgatttggggtggagagttctgtagatggctattaggtctgcttggtgcagagctgagttcaattcctgggtatccttgttaacttttggtctcgttgatctgtctaatgttgacaatggggtgttaaagtctcccattattattgtgtgggagtcaaagtctctttgtaggtcactaaggacttgctttatgaatctgggtgctcctgtattgggtgcatacatatttaggatagttagctcttcttgttgaattgatccctttaccttyatgtaatggccttctttgtctcttttgatctttgttggtttaaagtctgttttatcagagactaggattccaacccctgcctttttttgttgtccatttgcttggtagatcttcctccatccctttattttgagcctatgtgtggctctgcatgtgagatgggtttcctgaatacagcacactgatgggtcttgactttttatctaatttgcccatctgtgtcttttaattggagcatttagcccatttacatttaaggttaatattgttatgtgtgaatttgatcctgtcattatgatgttagctggttattttgctcgttagttgatgcatttttttcctagccttgatggtctttaccttttggcatgtttttgcagtggctggtaccagttgttcctttccatgtttagtgcttccttcaggagctcttttagggcaggcctggtggtgacaaaatctctcagcatttgcttgtctgtaaaggattttatttctccttcacttatgaagcttagtttgkctggatatgagattctgggttgaaaattctttcccttaagaatgttgaatattggtccccactctcttctgccttgtagagtttctgccaagagatcagctgttagtctgatgggcttccctttgtgggtaacccgacctttctctctggctgcccttaacattttttccttcatttcaactttggtgaatctgacaattatgagtcctggagttgctcttctcgaggagtatctttttgacattctctgtatttcctgaatctgaatgttggcctgccttgctagattggggaagttctcctggataatatcctgcagagtgttttccaacttgcttccattctccccatcgctttcaggtccaccagtgagacgtagatttggtcttttcacatagtcccatatttcttggaggctttgttcatttctttttattctttttctctaaacttcccttctcgctttatttcattcatttgatcttccatcactgataccctttcttccagttgatcgcatcagctcctgaggcttctgcattcttcatgtagttctcaatccttggccttcagctccatcagctcctttaaggacttctctgtattggttattctagttatccattcatctaattttatttcaactttttaacttctttgccattggtttgaagttcctcctgtagcttggagtagtttgatcgtctgaagccttcttctctcaacttgccaaagtcattctccatccagctttgttccattgctggtgaggagctgcattcctttggaggaggagaggcactctgctttttagagtttccagtttttctgctctgttttttccccatctttgtggttttatctacttttggtctttgatgatggtgatgtacagatgggtttttggtgtggatgtcctttctgtttgttagttttccttctgacaggaccctcagctgcaggtctgttggagtttgctagaggtccactccagaccctgtttgcctgggtatcagcagtggtgcctgcagaacagcagtggctgtagaacagcagatattggtgacctgcaaatgctgctgcctgatcgttcctctggaaggtttgtctcagaggagtacctggccgtgtgaggtgtcagtctgcccctactggggggggggtgcctcccagttaggctgctcaggggacagggacccacttgaggaggcagcctgcccgttctcagatctccagctgcgtgctgggagaatgactactctcttcaaagctgtcagacagggacatttaagtctgcagaggttactgctgtctttttgttcatctgtgccctgcccccagaggtggagcctaaagaggcaggcaggcctccttgagccgtggtgggctccacccagtttgagcttcccagctgctttgtttaccttatcaagtctgggcaatggcaggcacccctcccccagcctcactgccgccttgcagtttgatctcagactgctgtgctagcaattagtgagactccatgggcataggaccctccgagccatgtgcaggatataatctcctggtgtgccgttttttaagcccgttggaaaagcacagtattagggtgggagtgacctgattttccaggtgctgtctgtcacccctttctttgactaggaaagggaactccttgaccccttgcgcttctcaagtgaggcaatgcctcgccctgcttcggcttgtgcacagcacgctgcacccactgtcctgcacccactgtctggcactccctagtgagatgaacccggtacctcagatgaaaatgcagaaatcacccgtcttctgtgtcactcacrctgggagctgtagaccggagctgttcctattcggccatcttggctccaccccccgagttttggcttttaattgaaagtgtattgatgtgggaaggagataatgccatgcatttatgagcacatattagagggtctgagacaatgcatgtgataaaaggtcacctaaggaagaaaaaaagaacaagggaagacactggaaagaacgtgatgctgggagtccctgggccaccaaagtctggagaaaagtggtaaccacaaggctcccagcctagtttcactgaagacctcgacactaggtgacttatgggatccttggtaggacaagccttgaaaagttttacaatagcaaatgtggacgttgtcagaaccaaatgatgtcacgtgtgtatttgtgtgtgtgtgtcagtgtgtgtgtttaaaaatcatgacaaataaagcaggctgtgaagaggggattcccatgctcgtgtgcctgataacacaactatcacaaacgctttgcgaaaccacaagtttgcacaaaggcaatcccaaccttacacaaaaatatttctgcaagggcacctgcccagcgactgcctgtccaaccttggtgtggtgtcacccttgttattgatcttttagcaaaggagaattatttcaaaactgatatgaaatcctcctcatattttccttggaacatctttgtcttgctttacctccctgaatttccacatagtttgtaatggtcacaaactatgtgcatagtcagcaatacattttttgtttactttgatgctacagtttctaattttgctttatttaatgcttctcaatatgcttgtttaactgttgcagatcccgctgaaattacgcttaggaggacttcttcaaccagaaaaacccattgttctaaaggttgagtcaagggatgggaccgtaagtggaacctgaatttccctaaggacttctgctttgctcttcaaaaaagctgtgacctagaacaccagagacctcaaattactttgtgaatagtaccctgaaatgaagatgggcttcatccactgtactgcataaataaccagggattctgtacatgcactgagctctctccctgtctgtgtagagtgttatacttgggaatataaaggaagtgaccaaatcagtgcttgggaagtagatttggcttctttgtttctcacaggacaatctcagccacccctagttagcaccattaactcctcctgagctctgataaaagaatcaaaatttctcaataatttcatccaaaattattaatgaaaataagaattattttgatggctctaacagtgacatttatatcatctgttttatctggagcattctataataagtttatattaagcaaatcaataaaaacctcttacaaaagtatcatcggatactttcctgaacattaaggagaaatctatagaactgaatgaatgagaaccaacaagtaaatatatgtgatcattgtaaccattgttggtgtggggcatttgtcagaactccaatgtgattattaacataggtgagaattaatccactgtgactttgcccattgcttagaaagaacattcatagtttaattatgccttttttgaccaagcacagtggctcatgcctgtaatcccagcactttgggaggccgaggtgggtggatcacctgaggtcaggagttcgagaccagcctgaccaacatggtgaaaccccatctctactaaaaatacaaaaattagctaggtgtggtggtatgcacctataatctcagctacccaggaggctgaggcaggagaatcacttgaacctggaggcagaggttgcagtgagccgagacgcaccattacactccagcctgggtgacagagtgagattccatctcaaaaaaaaaaaaaaaaaattatgcctttttgaagcacatacattttataacatacaactgaatcccttattatattattagttttgatttaatgttttcaaaccatctcccctgatatttctgggagatgggaaacatgttttcttacacctcttgcattccattctcaactcccaactgtcttactgcaatgaacacttaataagaaacagtcaattggtcaattgattgggcaacaggctaaacacactcattccttgtctgttcccacttctttctttactttcccttcctgagtaacttatcctaaagtcattaggtgggtggcagccagatggtggccacacattaaggtagaaaagagagtgtcatgatggttccaagtcagagacctagtagggtgaggatcaagtaggtgttcacgtggagaaacagcccggcctgtgtgtgggagtccaagcaagcagagaaaatgtcgacacagaggggtggcctgaaaaagcagccagagcctaaacagggcatggagaacatatttagggcatgaggtgaggagggcatccatgagtgggaagggatgggtgaggtttcactacataaaggggattgatgaaataagtaaataaagtatactggaagccaggtgtgtcacttttgcagaaaagagtcatggattcagaaagggagaaaactagcaggaatcctatgaaattagattaaaatggatgtatccatgtatattcatacccttctagatagataaatggttagataggtgataaaaagataacaagaggacaagataattagatagacataaatgtatgtatgtgtttgtgtgtgtgtacaaaaaaacatatactccctacttctctccactgatagggctaggtaacaatggcatttcaatagcaatgagcacacttagtggccagatcttggcttattaataccattttccactgaaaggaaccagagctttttagagaaatggctgattccagggccaggattaagaatgttcaagataagcctaggatacattttgtgccaggaagcaagaagatgttcaaatgatttccaagtaatgtttggaaatgatatttgaaaatgatttccaaatgatatttccaaatgatttccaaatgatatatggaaacacttaaagactccactaaagaactattagatctgataaacaaattcagtaatgttgctggatacaaaatcaacatacaaaaaccagtagcatttctgcatgccaacagtgaacaatctggcaaaaataaaaaatgtaatcccatttacaataaccccaaataaaactaaatacctgggaattaacttaagagaaagatgtctacaattaatattgtaaaacactgatgaaggaaattgaagaagacacaaaaaagaaggatattccatgtttatatattgtaagcattaatattgttaaaaatgtccatactacccaaagcaatgcacagattcaatgcagtctctcaaaataccaatggcattcttcaaagaaatagaaaaaaaaaaaccctaaaatttgtatggaaccacaaaagacccagaatagcgaaagctaccttcagcaaaaagaacaaaactggaggaatcatattacctgacttcaaattatactacagaggtataataaccaaaacagtatggtacttgtataaaaacagacacagaccaatgaaatagaatagagaacccagaaacaattccacacacctacggtgaactcattttcaacaatgttgtcaagaacatacactgggggaaaagacagtctcttctggtgctgggaaagctggattttaacatgcagaataatgaaactagaaccctgtatctcaccagacacaaaaatcaaatcaaggtggacgaaagactgaaacctggctgagtgccgtggctcatgcctgtaatcccagcattttgagaggccgaggcgggtgtatcacttgaggtcaggagttcaagaccagcctggccaacatggtgaaaccacatgtctaccaaaaaatacaagagttagctggacatgctggtgcgtgcctgtagtcccagctacacagaaggctgaggtggcagaatcacttggacccaggaggcggaggtggcagtgagctgagatcatgacaatgcaccccagcctgggcaagagagtgagactctgtcagaaaaacaaaaaacaaaaaaacaaaaaacaaaactgaaatctgagacctcaaacgatgaaactgctacaagaaaacattgtggaaactcttcaggatattggtctgggcaaaactttctgaagaactaccccacaagcacaggcaaccaaagcaaaaatggacaaatggatcagatcaagttaaaaagcttctgtaccacaaagaaagcaatcaacaaagtgaagacacaaaccacagaatgggagaaaatattttcaaagtcacactctgacaacagattaatagccagaatacatgaagcgctcaaacaactctgtaaggaaaaatctaataatccaatcaaaaaatgggcaaaatttgaatagacatttttcaaaagaagacatacaaatgccacataggcatatgataaggtgctcaacatcactggtcattagagaaatgcaaatcaaaaccacaatgagatatcatcttaccccagctaaaatggtttttatccaaaagacaggcaacaacaaatgccagcgagaatgtggagaaaagggaacccttgtacactgttggtgtaaattagtgcaaccactatagagaacaatttggaggttcctcaaaacattaaaattaacattaaatagagctaccacaatatccagaaatccccatgctgggtatatacctggaagaaaggaaatcatatattgaagagataacatcactccaatattcacaatagccactattcacaaatgccaagatttggaagcaacctaagtgtccatcaacagatgaatggataaagaaagtactccaattatacacaatggagcacaattcagccatgaaaaaagcatgagatcctgttatctgtaataatatggatggaactggaggtcatcatgttaagtgaaataagccaggcacagaaacacagatattgcaagttctcacatacttgtgggatctacaaatcaaaacaactgagctaatgtctgggccttagtcagtgttgtacccaagtactgggagcacagcttttaaaatacatcatgaatgctttaatacaggaatgaatagatgagaggcacaaactggttgggtgttcttctgatacacagtatcttccttgacagattcagtacaactctcaacaggtaagtctcttcatgttatgttaccttatgaggaattaagtggcagaacatgatttctattattttcctttgcagaacaagaccaactttattagttgggacacagtgtggctgcatttgagtcccaagcaaccattagtctattgctatcaccacagagtcagaggggatgagacgcccagcaatctcacccaagacaactccaccaacattcctggttacccaccatgtgtacagtaccctgctaggaaccagggtcatgaaagtaaataataccagactgtgcccttgaggagctcacctctgctaagggaaacaggcatagaaacttacaatggtggtagagagaaaagaggacaataggactgtgtgagggggataggaggcacccagaggaggaaatggttacatttgtgtgaggaggttggtaaggaaaaattttagcagaaggggtctgtctggctgggcttggaaggatacgtaggagtcatctagagggcacaggtacactccaggcagagggaatttcgtgggtaaagatgtgtaggtgtggcttgtgaggatggatttcaattattctagaatgaaggcagccatggaggggcaggtgagaggagggttaatagatttcatgccaatggctccacttgagtttctgataagaacccagaacccttggactccccgataacactgattaagcttttcatgattcctcatagaacatgaactcaaaagaggtcagcaaaggggtgtgtgcgattctttgctattggctgcagctatagccctgcctccttctccagcacataaatctttcagcagcttggctgaagactgctgtgcagggcagggaagctccaggyaaacagcccagcaaacagcagcactcagctaaaaggaagactcacagaacacagttgaagaaggaaagtggcgatggacctcatcccaaatttggcggtggaaacctggcttctcctggctgtcagcctggtgctcctctatctgtgagtaactgtccaaactcctctctttgtttccttggacttggggtgctaatcgggccccttttcccttatctgttttgaagatcaaaagagatgttcaaggagaagtagctgaagtgttggacgctacaaacgcatagaagttattattatcttatgcagatctatgaatgaataaataagcatttctcccatccaccttctaattttggtgactaggagggtttagggacagcatttggtagtgggaatgatttgattagcttagatctgacgaagactaatcaatgaaaacatggcagcggcagattacaaactgctgatcatgatggacagtgtgatcctcatccccttcccaggctctggggattctgggtacaggaaggagtggcttgcatttttgtctcattaattcgctttctgggttctgtgtctgctggaagggatgtgtagctgtattgcccctgtagacctggttcctgctcccccgccttccaacccaggatatcatttacataacgcaccaggggacaccaagacttcatgggaagctgtcccctggctcttccctctttcctgtgccatgcccctgaaaatcccctccctcctatgagtcactcctccaccctgtcatacacaggatggtttatcttgcaatgattaacctctagagcaaaggag

SEQ ID NO: 93721 - DNA, 29312 bp, Homo sapiens
tctcaaatactaacaaggaattaggaagggcttctaggagaaatggttattatgagcaataggctccagggacaactcaactggtttatcttttttgtttgtttgttttttctattaccttgtcttctctgttagcgctggaaatcaggaacgtctatagtacatggaaaatacaagatagcacttacttgttgtttgtttaaaatgatcactcacaagcaccaggccataaaactacatggcttttccttttatcaatcatcagatctattagttcctatgacttgaaggtttcatttacaatcactgaagtgagactttacctggttttacaggcgctttacaccacagttcttggtgagtataaaatgttcgtaaaaaatccttcttcacaygtagacccttacaggaccccaaattgctaagtaraggacacgagcagccagtcaccactgttttcaataggtttgccatgttgatatgagttcccaattttctgrctccccagtttccttgaaggcaaatcactaagaaaaaagaaaataggatgtatatatgccaagaaaaaaactatttgtcttttaaacatgaaaaacattttaaaaatactaatctaaagagcttgaaatataacagttacatgtagacatctataaagaatttatttgccaagttccttacttatagaagatgctcaaaattcgttttccagttcagacatttaaaacttggaatccattttcccactaaaattggagttctaaactcactattcaattccaagcctaggtcatataacctatttgatccttaatgtagctagaaagctttaatacacacacatattgctacagaatcaagttgtatcttacatgaaagttatcttctaagtcagcatgtccagcaaaaagtgcatgtaattcagttacctttgaatttcccttaaattacctaaaatactgtacagtataatggtgacttacatttagccaccaggtcataccaaatactctgacatcctgttcagtgcagcaggatgcttatccactgagacctctgaactgaggctgactgagtgaacaaaagattcatgtttgccaagtgcacctctcaagaaaattaaacatgcatgacacatgactctaagaaagaagaaagaaagaaaaattccatagtatctttatcaaataggcttgtgcttgctgatgtggccataactatgaactgttttgtcagtggttctcacaaatggccactttttgcgagttctcaccaggctgcgtgaagtgtcactgggttttgctgttactaaggtttcaggaactacctccaccacattcctcagtagatccccagggatgcatgaaaggcactcccactgtccccataattcccaatgatcctccatacctttctcttctttctttcaagaatggaaagaagccaggcgcagtggcttatgcctgtaatcccagcactttgggaggccaaggtgagcagatcacgaggtcaggagttcgagaccagcctgaccaacatggtgaaaccccgtttctactaaaaatataaaaattagccggccctggtagctggcacctgtaatcctggctactcaggaggctgaagcaggagaattggttgaacctgggaggtggaggatgcagtgagccaagattgcaccactgcactccagcctgggtgacagagtgagacaccgtctcaaaaaaaaaaagaatagaaagcagccaaggacttagaattttatcagccaaactcagctaacactgctaactctgcctgtaagttctgctgtatcatgtggaccctcacgggactgagcatctgatcctagcaggctccgtaaatgttcttccagactccagagggagaaagacttagctcatttttaatttcagaactgctgccactggccaggcttggtggctcatgcctgtaatcctagcactttgggaggcgttgcctgagttcagcagttcaagaccagcctgggcaacatggcaaaacctcgtctctactaaaaatacaaaaaattagccgggcgttgttatgcacgtccgtgtgaagagaccaccaaacaggctttgtgtgagcaacaaggctgtttattttcacttgggtgcaagtgggctgagtccgaaaagagagtcagcaaagacagataggggtggggcagttttataggatttgggtaggtggtggaaaattacagttaagggaggttttctcttgcagacagtggtgggggtcacaaggtgctcagtggggagctcctgagactcattgtccaggagaaggaatgtcacaaggtcaattgatcagttagggttgggcacaaacaaatcacaatggtggaatgtcatcagttaaggcaggaactggccattttcacttcttttgtggttcttcagttgcttcaggccatctggatgtatacgtgcagatcacaggggttatgatggcttagcttgggctcagagtcctgacaggagtgatggtgcgcacctgtagtcccagctactcatgaagctgaggcaccagaatcgcttgaacttgggaggcaaagsttgcagtgagccgagatcatgccactacactccagcctgccagcctgccagcctgggcgagagagcaagactctgtctcaaaaaaaaaacaaaaaaacaaaaaacaaaaaaaacctgctgccacaactccttgaagaaacatctttaaaataccagaaagcagcattggtaatggaaatttttaatccagggagcatatttattcataagatgccccttaattcaacaaatatataccaagggcagagttttgccattaagaagcacttgtagaatcaaactggaattttcctggagataagaagtcaacaaataataacactacaaagtagagtaacagagtaacacaagctcagagtcctttgaaggatcaaagaatgagattgtgtcctcttttagagctcagaaaaggaagggaaagccgtttgagatgaagagaatcaaatgaaaaatagctaaggaagaaagaatgcaagatgtgttttggcatgcaattaaaaatatgtatgaataattatttgcatttggacagacagctttacatgttcaaagtgtttccacatatcatgtcatttcatttcagtcctaaagtattctcaagtctcataaataccctactcattcattcatgggtcacatctagagttatcatggctgagaataaagagaaaattagttcgaaattcagctacacattcaaaacccctaccgaatctatgccaagaactaagggagttgcaaagatgtgtaaaagattattcttgtcttgagtgagattttttttccccaccattactgagtgacctactcctatcccaacctccccacttacccaagtttctcttcttggatcatcccaactccccaacaaccaccatttttatggggctgacaaagagttcccagacctcatcagcaaaagagtgaactgagctttaatagagtcctgtattgtccaaatctgccactcacttactgttcgacctgaacctccccctgcctcagttagctcaactataaaaaaagcacaggtttcaaaggccattttagtctctagaaattttatgattagatgagactttgtaatgctataaaactgaagtcctatttcatggcctgaaatctggaaaatttgttccttctacttggaaaatggtaatttgatgttcagcagatccttggcaggggcatcagacatcagtagggccaaagccttcataggcccatttctgtgaaaaatttcacttgattcaactgtgaacatacagggcagagatcaggaggtcatttcttggcaaaagcaatacatatcactaagtctaaaccaaatacaaatggccctgaaagatagagaatatttaaactatcttatcattgacctgtacaggtttatacaaaagataatactccatcctaatcatcacattttcctccatcttcactgtaaagctctcatttatccatgtgttcctgtggctttgaagcaataagaaaaaaactttataactcaaaattaggggaaaaaagcacaactttttttttttttttttttttttttttttgagacggagtctcgctctgtcgcccaggccggactgcggactgcagtggcgcaatctcggctcactgcaagctccgcttcccgggttcacgccattctcctgcctcagcctcccgagtagctgggactacaggcgcccgccaccgcgcccggctaattttttgtatttttagtagagacggggtttcaccttgttagccaggatggtctcgatctcctgacctcatgatccacccgcctcggcctcccaaagtgctgggattacaggcgtgagccaccgtgcccggcccaaaagcacaactttttaagcattgctttcatatgtatgtttaatgtaacttatatgggttatttcccctattagatattaaaatccttgagggaaagcacccaacctaaagagggaggataccacagatatttaagagagtcagctctggatctgcggattggaagccccactctgcaacttattggctgtgtgaccttgggaagtcacttaacttccctgtacttaatttcctcatctttaaaatggggaataatagcacccacccagggtggtggctcacgcctataatgccatctctttgggaggctagtggggaggactgcttgaggccaagaattcaagactagcctggccaacacagtgagacccccattgctaaaaaaaaaaaattaattagcagggcatggtggtgcaagcctgaagtcccagctacttgggagtctgaggtgggagaatcacttgagcccaggagttccaggctgcagtaagccgtgattgtgccactgtactccagcttggacaacagagcgagacttgaaaaaataaaataacagcacctacctctcagggttgttgccaggactgagaatatccttatcagctgttatattcactttggtattactctcccccagtgctttgcacaacacagaggaagtcagtatttttgactgaatgaatagggctaggtgaccttaagcctaagtacctattgagcacattttccaaggattttcggaaaatttcctttgaaaaggaaatgtttgtgtagccttgtggaaaactgattctatcaccaaggtaagcagcctaagcgcacctgctggaaagaaggcaatcctaaactgtctgttaataaaaagtcaaggtttacaaataaaaggggtgcaatgaagaaaaggggcacactttaaataagaagagtaggtaggcacctaagccccacgcgcttctccgaataagtctgtcctacaagactcctgacaaacagaccacctaaggactggccggcgccacagggtgaataaaggacaccggcaaccataaacaagtcacgcttttaaaagcgagacataccagcaaggacacaataccctactgagccagcttcggctggcaggcgccgtgacctcacccaaagccactggtgtcacggctactgccaccggtgccgtcccttgctcggcaactaactgccacccgctggcatctgcacgagaccgctatttataacctccctaggaagccgattggccacggctgcaaatagtcattccggctgttgagtttgaactagctctgcccaggtcgccctctccgctgtctcttcctcctcaccagcctaggccccagaaacttgtacccaccaccgccagaccgccccaactcacactcacaatttgtgctcgcaatctcctatgtccccagccggacaccctctccgaactccctcaagggtcaagcatacctcaagggcatccagctgccacctctctggatgaaccgcccatcgaaagtcctctatgacctccctctccaccacccccgatcttgagggccgaaatgaccccgtacgactctcgctgtcccccaaagctgcaaatatctgcacctgcacagctgycgcctcattccctgccctcttcggggacccagttcccaaatccaccagcccactcccttcgacatcgccccagcaggagacgagaaagggacaccaagaggcacggtgcttcttccccacctaagcctgcggcctgcggacaccccaatgcaccctgcgcccgggacaccgccgaccccgccccgctttgctctttgacaggtctctctcccggcgagggccgtggtcttcaggaaaggcccgagcccctttcccagctgcgccctaggcgcgcgccccggctgcccgcacccgccagtgccgtcgcgctcacctgggccgggaggctgacagccttgggctgtgccctgagggccgcgagaggacgtcgcgctggcagacccgggcttgggccccgcggcgctgcgcctccaacccggaagaacagccccaactccgcggcggcgggcggccacgtgactgcagctccgctcccacctcggcccgcgccccttccccgccccagctttcttcccgccaggccccctccacccgatcgccgcgcgctctccgaaccaaaaggcgacctcacgaaatgcccctttgagctcaaaggctagttacccccaggggcccttccactctcggggacaggcgaaacctctttgtctctgcctcggcctgcggcccccagcccagcctccgcgctttccctccgccagtccttgtcaatcaaacctggtgccaaacgcggcagctgaagttttcagggacacatttgcttctccccttgaagaaccagttacaaagcgtgatgtcctctctggggtcccatcagaacaaagaaacaggtaatataactccactccgggtacctgcctttcctccagctcgctaggaaaaatcagaacttctgtaacagagaggacccaagggaaaggggcaggcggagaggggttggtgaagggcgggaatggggggcgttgattttccattctggcaggagaggtggagttaaattcctcagaaacgatgtccaggcttgaaaagtaacacacatctgcgtgcttgtcttccaacatcagagccagcctagaggaagctggctagtgtcactgctagtacgaatatccccgaggctggaaagcatctgggtggaggttgtgagctttccagaccaggcctcggctgtttttctaaaactattaaccgtaatgacctagtcgttcttttcacacagttctgttacttattctgcaggtgtattctgactaaaagtgggaggaataaaaaatagagtgtaaaatggttcacttgcccaaaacttaatcatcatgaagtgtcagtaacgtcatttatttctattaattgaaattttgatacaagaaaaataattatgaatctaaaaggtataagcagaacaggtattccataactttaaaaagaaatgagccgcagggaaacccttagtttgagaacttgtcttgtgattaacctacacagaaggtcattcaactaatggattcccactgcagtccaaactcacagacaggaaatgacacagccccatgttttaaaataataatgagccgtggtaagtgtgaccatagggacggtttccagatactgaaggtacaatgaagtgagattagtaatgatcccacttagtaaggattttaaactaagttattgatttaaaactttttgtaggggtcaggagttgctgctttgtcttttagggattaataattcgtggttcccaactggggacaatttagttccgagggatatttggcaatgtctagagacattttggttgtcacaattggagaggggacctatctaatgggttggggccagggatattactgaacacctcacactacacagcccctcacgacgaagcattatccagccccaaatgtcaatagtgctgaggctgaaaaatcctggcttaaattaatgctcagtacattatttaattttgacttgcttataaatttatatcacatgaaaacaaactcaaagataacatactgtttttcacttttgaaaatcatgaatgttaggcatatgataattttaataacaagcatatgattattttattccgcttacttktacaacataatttgggtgccatttcttcaggagaaaacatttgtcatttggaatgctctgtttcagtccttaagcttctacgtataattacagcatattattcataaacggagtccccaatgaaaataggattaagttccaaaagtttgcttttaagttagttgcttctaagtcttagacactgtcttgaataaaatttttgtagagatttgatattcyctattaagttttaagggcctttcccactctgacttctactctttcctccctgactaatttgacctgcaaactctcatcttaaaatagtacctctcacatatgtgtaagttttcattacagattgttctattattgaataatttttaaaatattttaaaattaaaataaacatcaaaatttaaaccatttgaagtttaggagtttttgtagtcacaaatgcttaaaaatagtttttaataattagagttctaatctatcagaagcaaaaaggatgaaacatttacaagactataatataacatttggatctgctttaaagcctaaaaaccagagaggtgcccagtagccaaaaatcaaaacataggctgaacctgagaagacatgtaatcaaaaactgacctctagtgatggcttgttaccaaaacccaccatctaggtaaaatcaggctacagaaaaggtagctttaatgtcttttcattgtggttattatgttacatggttattggcaatttattgtctcagcttcccttttataaataattattagtaaagtgaacagccccagagagatgggattcttagatttcagtgtgtctaacaatgcagacactcgacaggttttaagggaaccatcactaaccttaatcttagccctcttctcccaggctgaccaatcaagagtgtttgattttaggaaataaatgttaactgactaaatgagctgatgctaatcaacattaactggaagaaaaaagagaactgatattaaagagccagcacaaagttcaacaattggcatttgtttaagctacataagtaaaaccagtttgcatttgaaatttctgtgagcatttaaaaaactagctcatggcatactactgtgaatattgtcctttgcatattcatgtaagtaccaattacaaaaacctatgggtttttaaatcaatataaaaaattggccgggcgcggtggctcatgcctgtaatcccagcactttgtggccaaggcaggcggattgcctgaggtcaggagttcgagaccagcctggccaatagggtgaaaccccatctctactaaaaatacaaaaattagctgggcatggtggcaggtgcctgaaacctgaaaccccagctacttgggaggctgaggcaggacaatcacttgaattcaggaggtggaggttgcagtgagccaagatcacattgcactccagcctgagtgactagagtgaaactccatctcaaaaaaaaaaaaaaaaattatctgtgtaatcatagtttagggggtctgggaagctggtgaggartagaagctatgttagtttcctacggctgctgtaagaaattaccacaaactgggtggctgaaaacaacagaaatcatttctatcacagttctggaggtcagaagcccaaaatgaaggggttggcagggtggattctttctggaagcattgagggagaaaccatcccatgcctctgccagagcttctgttggttgttggcagtccttggtgttccttggcttataaatgcagccaatctctgcctccatcttcacattgccttcttctctatgtgcctgtgtccaaacctccctctcctctctcttataaagataccagtcagtggtcttaaggaccaccctaagtccaggatggtttctgtcttgagatccttgactaattacatctacgaagcctgtatttccaaataaaggcggacacagatactttgagggggaacactattcagcccactacatgggcattctgtgtgtttaagggtaacacactgtaaagagggttttgggggtctttggggggaagtttctttgttttttgaagagggatggatttgccagttattgagtttaaagtgaaaatccaaattatttgagggaaattcaggtgaaagtcattttgtattaataattggggaaaaatttccttagttatatacccggtttactggtttaataagcactcaacctaattgaacttttcctgcaatttctatatatcatatatttatcaccattatcaaactacttgattataaaaccccataatagtacttgataaaagaacttcagccaaattaaatttaaaggagtttaattgagcaatgaaccattcatgaatcgggcagcccccagaatcacagcagattcacagagactccaggggtgtcttgtggtcagaacaaatttatagacaaaaaaggtaaagtgaggtacaggaattggaaatgaggtacagaaacagtgagattggttacagctcagcatttgccttatttgaatgcagtttgaacattcagtagtctatgagtggttgaagtatggctgctgggattggccaccactcagctcctgttacaggtgcatagttattaagtcaggttttcaattttgcttattaagttagattacagttcatccacaaagactcaaatatagaagtacggagtctttctcaggccatatttagtttgctttaacacgcttaacatttttataatacttcactttttaaattttgcatttgattaaaagttctaatttaatataagttttgcaaagcatcatctctttgaagatctttttttatgctacatgttacccataatagaaaaataaaaaccagaatatctcacctccactggttcgttatactctcctatctcctctcctcctaccatttattatcaattctttctttttctttttcttttctttttttttttttgaaacagtctcactctgtagcccaggctgcagtgcagtggggtgacttcagctcactgcaacctctgcctcatgggttcaagtgattctcctgcctcagcctcccaagtagctgggattacaggtgaccaccaccacacctggctgattttgtatttttgatagatggggtttcaccatgttggacaggctggtcttgaactcctggcctccagtgatctgcctgcctcagactcccaaagtagctgggattacaagtgtgcgccaccacacccagctcattctcaattattttaccacttaaatgtgcacgtttctaatgttcccttggccctctctgctattaactctaatactttctctgtgtacaatgttacttgtgctaggaccactcccaaagctcaatctctagcccagacctctctcctaagctccagactcttgcagccaactgcctgctggtcattgcccttgagatatccacaaacatttcaagccaaacatgagaaaattctctactaccctccttttagctgtagcaaaacactggatgtttcttgaatgtatggagcaattccatacttccttgcctttcgcatgcttttccttcagtctagaatgctctccctgctctaccttttctttgcaagcttatgttcatcctctaaggtgtagcttttgtctcttcctctgtgaagtattctaggaagccttgttcaactcttatttcctcaagcttagcacagtgttggcacataacaaatgctaaataaaagttagctagatcaataagcagcagccactgtggaagaagactggactgaatcctgagtctggctgaatacccttgggatagttcaactataaaaaatatggagacaataactatttaacaggccattgtgaagaggagaagagaatttatgtaaagaatatagcccagagtctagcccatcataggttttaaaaaatgcatctgacttttggcaagggtgcgaaagcaattcaatgaaggaaagatagtcttttcaacaaatggtactaatacagttggacatctgtagtcaaacaaaaatgaacctcaacctaagtctcacagatttttacagtaaagtcaggatggaatacacagttacgtgtaaaaccataaaactttcagaaaaaaataggataaaatctccaggacctaggaatagtcttgacaccaaaagcgttatttttttaccttatttatgttgaaggactaaaaaagcattatttataaagggaaaaacggataaattaaaccttgtcaagaaaaaaaaaaggccaggtgctgtggctcactcctgtaatcccagcactttgggaggccaagatgagcggattacttgaggtcaggagttcgagaccatcctggccaacatggtgaaaccccatctctactaaaaatacaaaaattagctgggcatggtggcaggcgcctataatcccagctactcgagaggctgaggcaggagaatcgcctgaacccaggaggcagaggttgcagtgagccaagattgcrccactgcactctagcctgggcaaaagactgagactccgtctcaaaacaagaaacaaaacaaaacaaaagcaaaaaaaaatttagctctgcaaaagagtcaatcagttatatatatataaatttatgtatatttaagaaatatataaatatttaagaaaatatttaagaaatattttcttatttttttaagaaatacatatttaagaaatatatatatatttcttaaaaattcttaaaacctaacagcaaaacaaaattcaaatagaaaatgggcaaaaggtataaagagacgtttcacagaagaggaatataagcacatgaaaagatgatcaacattattcgccattaaggaagggaaaattaaaactcaatgagacaacactacatatctataagaaagcctaaacagggctgggcacagtggctcatgcctgtaatcccagcagtttaggaggccaaggcgggcagattgcttgagctcacaagttcgagaccagcctgggcaatatggcgaaaccccatccctgcaaaaaatacaaaaattagctgggcatggtggcatgtgcctgtagtttcagctactcaggaggctgaggtgggaagatggcttgagcctgagaggcagaggttgcagtgagctaggatccaggattgtaccactacactccagcctgggcgatagagccagaccttgtccaaaaaaaaaaaaaaaaaaatgcctaaaacgaaaaatagcgataatatcaaaatctggcaagggtggggaaaaactgtattattcatacattgctgctgagagtataaaatgatatagtcaaactggaaaacagtttgatggtttctttaaaaaacctgtaactaccatatggttctaccatttatactcccaggcatttgtcacagagaaacaaaatgtatgttcacacaaaaacctgtacataattgttcatagtagctttattcataagagccaaaaactggaaacagcccatatgtccttcaacaggtgaatggttaaacagactgttatacatgcttaccatggaagactactcagcaatgaaaatgaatgaactactgaaatactcaacaacttggatcactccccagagaattatgctaagagggaaaagccagtcttaaaagattacatacttactattccatttacgtaacattctcttttatttgtagaaatgaaggtctcattatgttgtccaggctggtctcaaattcctggcctctggtggtcctcctgcctcagtctcccaaagtgctataatctataattatagattatatagctatatatacattatacattatatttaatatataatgtatatatataagtatatgtattattatatatatttataatgtgtatatatatagttgttgttgagaccaaatctccctatgtcacccaggctggagtgtagtggttcaatctcggcttacaccaacctccaccttctgggttcaagcaattctcccacttcaggctcccaagtagctgggactatagacatctgccaccatgcccagctaatttttgcatttttaatagagacagggtttcaccatgttggccagagtagtcttcaactcctggcctcaagcaatccgcctgcctcggcctcccaaactgctgggactacaggcatgagccactgcacctggcccactatataatattcttgaaaaaatgaaattatcaaaatagagaacagattggtagttgccagagtttgaggagggggtgagggtaaaagagatgtagctgtggctataaaaggccaacccgagaaatccttgtggtgatagaaatrttctgtatcttgattacatcaatgtcaataccctggttatgatattgtactatagttttgcaaaatattacccttaggggaaactgggtagagcctacagggggggatctctctgtattatttcatacaactgcatgtgaatctccaattatctcaaaataaaatgtttaattaaaaaaataagcctgacaggtgtagtaaaatagtaatggtagactctaggtggtagatgcacaggtaagtacataaaattctttcaaatttgctgtttttttaatgtttctttgtaaaattagaaaaaaaaagttaagtattgtaattattctgagactaagtccctcactctcacaatctaaaaaataaaagtaaggtacattcggtacattcagcttactgaaaatattcattattgcctcttttcctgtggcataaatttttcaaatgaattgcctgtagattaagaaagcaatttcatgaaatcatttcttatcagtggaagcaaacattgaaggttcaggatgccatcctgaatttgggataaagaggtttttcatcttccttaccccacacctcatctttagtcagtgttttcaacatttatttggcatgttaattgtcaaattcccctttcaagtgatctttttatctgatagagtgtccaaggtactctaaagattgcattgctggcacactctactgttaggtgacagtttaggcactacatccctctgtagtggcttttgagtagacgacaaattgtaggaatttatagcattaactcaaaaattttagaaagcctcagggaacaattaatttcagggtttaaacttgtcagacctgaaaagtaactataaattcatattgatgattacagattctttgtttcttaatctccacaatgggctcaagagtccaaaagcataaatcatgccaccttaggacagtaagaatagttactttctgtgtaatatttcagtttacacaccaccttgacatgtattacctgatttaatcactttaataactcggaagaaggttctattattcctgggttttttgttgttgttgttttttgagatggagtctcactctgttgttgcccaggctggagtgcagtggtgcaacctccacctcccaggttcaagcgattctcctgcctcagccccccgaatagctgggaccacaggcgcacgccaccatgcccagctaatttttgtattttttagtagatatgaggtttcaccatattggccaggctggtctcaaactcctgacttcatgatccgcccacctcggcctcccaaagtgctgggattacaggtgtgagccaccgtgcccagcctgttcctgttttaaggtgaagaaacaatggcttagggtaaactgatacatctgaagtcacaacaacaagaattagagctgagacttaactgtaggtcttttggttctgagttcaatgattctggtgggaaagagtatcctctgagaggggatgctaaaatgacttccctgtgggaatgaaggtaccaagagaagcaaggaaaacagaagcccctttatagagagaaagagsgagtcctctgtgaacatcaagtccctctcatttttccctccccattcattttcctggattatcctactaatccttaattttatttgagatgagacctttacacagaagcctttccagaccatccaaggttaagtgcccttccataagactcaagttttaacattattatagtgtttatcactctctgtcttagtctgtttgggctgctrtaccaaaatgttataaactgggtcatctataaacaacagaaatttatttctcacagttcttgaggctgggaagtccaagatcaaggtagcagcagacttgttgtctggtgagggactgtgtcctcaaagacagctattacctcacatggggaagaagcaatgtatctctctgggtctctttttataaggatgctaatccctttcatgaggactctgccctcatgacctgatcacctcccaatacccaaggtattgggtataggtattaccccctgattccatcaccttgggggttaggattttaatatattaattttgcagggacataaacatttggttcactgcattccatattatttcctatttgtataattcctgcactgaagtgcaagctgcttgaagatggatattttatcttattcattggcatgtcatcaacacctaacagagtgtctggctttcttaggcagtcagaatatacttgttaaaaggaaggaaagcattgtgaatattctgtaggagttgaaatagaaaaaagatactgggttttgaccacatgccaacaaaaagagcagttaatagattgaacgagagaaatagggaaacaaaatgtgccagtggcaaaagcctgcttgctgacatttatacattaaacattgatgttcctgtctttttaagtgccaaatttggaatctgtacattacttggactctgtacatcatctgattaatgagcatttccagatattacattaccttgctgctggtcagcaagcactcagttcagttagttgaattgtgctattagtagtatattgcatgttctgattattcattcagaacttcctctaaacttttcaacaccaacatctcatggtctgaccacaactttcttttcaactcccttatttctgtgtcttgattcctttttccttccaatctatcttccatcttcaaccctttctctgtctagtctaagccatgaacagcctctcaaccccttctgtcttaatccttgtgtcttaaactacataacaaaattacattcccactaacaggtttcccaatgcctatatcaggttgtcaagagttgctagagagaagccaggtgtggtggctcatgcttgtaataccaacactgggaggccaaggtgagtagattgcttgtggccaggagtttgagaccagcctgggcaacatgacaaaaccccttctctactaaaaaaaaaaaaaaaaaagccaggcatggtggtgcatgcctgtaatcccagcctcttgggaggctgaagcacaagaattgcttgaacccaggaggcggaggtttcagtgagctaacatcgtgccattgcactccagcctgggccaccaagcaagactctgtctcaaaaaaaaggggagttgctagagagaaatcacaaaatggtccagagtgttgcccctgcaaatctctactttccaacctcaactggacctctgcaccacccaatagttttcctaggatcacactcctcccagagcagcttttgcaactgttgtcactttcctcaagtcctctttttttacattcccaccctcactctcagcaaagacatttccttctttttcactgagaacatggagagcatcttgtttccaacattctcttttcctgcagtatctgcatctccttccatttctcagtgaaacagagtttctcccatccaaagttactcctgctgcctgtactttgaatttgcgagctgccacctccttcagtcctttcctcccttgatttcccctcttttccctgatgtagtccttcgcctcattgtctttagctgacatatttatgtttacgtaatttaaaaaaaaaactctaatagcaacagaaacttctttaatacacttgcattgcaaactagttccatatctctttcttttatttcacaatcaagcttagacaaagttgtctacactcactgtttatgtttcctggtactgacaattgctggtttccaaatcattcacaaatttttattattccaaatgctagtacgattgggaggcctatttatttatttattgtgagaaatataattcaagaagaatggaatgtttgcatcaatatgatccatttattctggagacaaagtgtagcatattgtttaagcttgtagactatgtatttagaactgagtagctcactatttatgtgatcttaggcaagttaatttacatgtctgagccccagtatttttatacgaataaaataggtaagcaataatgcctactttatagggttgttttgaagatcaaattgatgcaggcaaacccaaaaattggggctcttggcttcaggtaggaaggaaagaattcaagggtggtgacagagtaaagtaaaagcaaagcaagtttattagcacaacagagaacaggaaaatggctgctccatagacagagcagggctaccccattggcagagtagcactcatggattgctgactaacaatatttatagctaatccttaattatatgctaaataaggggtgggttattcacaaattttctatgaaagggatggggagttcctagaaccaagggttcctccccttttaaaccatatgagggacacatttttaagcagtaaagtgctcaaaatgtaaaagaagacaatgcccctgagaaatgggtcagaactgagaggctgactcatatccaataaggactcaatattgttacctgctatgtaaagggttaccagaagctcctctgtggagatagtaaggtgtccagtgggagctgtgggggatctcaggccccatgagtcctctgttctcttggctattatgggtttggttgaccccctcagagcctggggcagcccttttccagtggtcctcttgcttacagagggcacactgactttggctcaggggccactaagtcaggctctcatttatgcatcccagatgccaatctcatggcacttcctcaagatgtgtaactctgaggtggtagggggctcaaggcagccaccaggaactgtgtgttttgactatttcttttggttttctctgcctcctctgccctgttcctactgttgtaaactccaaaggccatgtttaagagttggcctggccaggtgtggtggcttacacctgtaatcccagctctttgggaggccgaagcaggcagatcacttgaggtcaggagttcgagaccagcccggccaatatggtgaaacccgtctctactaaaaatacaaaaaaattagctgggcgtggtggtatatgcctatagtcccagctactcaggaggctgagtcaggagaatcatttgagcccaggaagcagaggttgcagtgagccaagatcacgccactgcactccagcctgggcaacagagtgagactccatctcaaaaaaaaaaaaagagttggcccattggggtttgaagtgtcatttctgccttatgtaacttccttctaatctcaaggaaagactgagtaataaaatgcatacccaggaaagcatacctttccagggagtctgggtctgtattagtataattcctgagtgtctcaaccagacagccctgaaataaagcaggatttccatccttttcaaagttacatctctaatcgtgtcataattagctggcttaaccgcacactttttcatgctttctattaaacaagttaccatgtgatttctgcattcaaaatcttggcaactcctctggtaatctctttgagtctccagatctggaactgcatctccccccatataataaatggcatggccttggttataagcattctacctgcatttttacgggcagtacccagaatcatttgtttatcctctatgatagagcaggtggacaatatttgcaagtcatgccaagttaagtcaaaggacatggtcaacttaacaaacttctctacaaacttccctgcatcctcttaaaaaccagctacatttctccttgcataaagccaaatcagatatagaaaaaaaaaaaaaaacacatgtattctgattgtccagtcatctctatcagctacctctcacaatgaacataggttcagttttaggggctgatatgagaccccactcctggtgatactggttgggcttacttccttgggcagggcgagatataggcttgggatagtttaataaggggaaggggaggtggaatcctgtgctgtggaactggtgagatcagcctcctcagaactgggggactgaagagacttcaggttggggagcacatgggccttctatggggagtagctaggaggggattatctagggtatctagtgtggctttttggtgtctggatgtaacatgagcaaggcacattctacaggtgtcccttaagtcaggctcctagtagagagccataagagcctgtacataagggatttctcttcattctccttcctttttacagaataagttgaattgtaaaatagttgaattgtaaaataatgtaacaaaccatttttaggccaaatttcttggtctcttaatttgtattggacccaaactgygttgcagtggaaaatgagtctcggcttatacagtatggtcagccacattagctagcattcgctctactctctctgacagggaagcagcggaatacaagagactgaactgtatctgcctctgtttccaaaagattcacgttcaactttcactcacacaaagccgggaaaattttactttttttttttttttttwagacagagtctcgctctgtcaccagactggagtgcagtggcttgatctcggctcactgcaacctccgcctcccaggttcaagcgattctcctggctcagtctcccaagtagctggaattacaggcacccactaccatgcccagctaatttttgtatttttagtagagacggggtttcaccatgttggtcaggatggtctcgatctcctgacctcgtgattcgcccgcctcggcctcccaaagtgatgggattacaggcgtgagccaccgcgtccggtcattttattagtctttaaaaaaaaaaaggaacctgaacttttctaacacagctggaacaattcacagcagccgcggcagccgcagcagcagaagaaaaggtttaatttagttgattttctgtggttgttgattgttcgccagtctcatggtgatggaagctgtacatttttccgaagggaccgagaagcggctggaggtttggttctcctggcagcagcccaatgcaaaccaaggatctggggatcttcgcactatcccaagatctgagtgggactttttttttttttttttttttgagacggagtctcgctgtgtcgcccaggctggagtgcagtggcacgatctcggctcactgcaacctcggtctcccaagctcacgccattctcctgcctcagcctcatgagtagctgggactacaggcgcccgccaccacgcccggctcatttttcgtatttttagtagagacggggtttcaccgtgttagccaggatggtctcgatctcctgacctcgtgatctgcctgcctcagcctcccaaagtgctgggattacaggcgtgagccaccgcgcccggccaagtgggacatacttttgaaggatgtgcaacgttcaatgataagtgtgacaaaaactgacaaccaggaagcttgtgtactcagtgagagtagcatgtttgtctccaagaaacgtttcattttgaagacacgtggtaccactctcttactgaaagcgctggttcccctgttgaagcttgctaggcattacagtgggtttgactcaattcaaagcttcttttatacttgtgagaatttcatgaagccttccccctaagggtacctacactagaatttccaggaagaaatagagtttcttaatgcaattttcccaaatggagcagcatattgtatgggaagtatgaattctgactgttggtacttacgtactctggatttcccagaaaggtaatcagtcagccagatcaaaccctggaaaatttgatgagtgggcttgacccagcagttatggaccagttctacatgaaagatggcgttactgcaaaggatgtcatttgtgagagtggaattcacaacctgataccaggttctgtcattaatgccacaatgttcaatccttatgggtattcgatgaatggaatgaaatcagatggaacttattggactattcacatcactccagaaccagaatctttttatgttagctttgaaacaaacttaagccacctcctatgatgacctgatcaggaaagctatggaaggcttcaagccaggaaaatttgtgatcactttgttaatcagagttctaaatgtcgcgccgtgttttcttcacctcagaagattgaaggttttaagcgtcttgattgccagagtgctatgttcaatgattacaattttgtttttaccagttttgctaagaagcagcaataacagcagagttgattaagaaaaatgaagaaaaaaatgcaaaaagagaacacacgtaagaaggtggtggatgctttctagatgtcgatgctggggtcagtgctttccataaccaccacagtgtagttgcataaagccctatatgtaatgatagtgtaatcattttgaattgtatgcattattatatcaaggaaatagatatcttgcacgaatgttcgcttctgtgtttaggtattctctgccactcttgctgtgaaattgaagtgcatgtagaaaaaaccttttactatatgaaactttataacacttgtgaaagcaattcaatttggtttatgcacagtgtaatatttctccaagtatcatccaaaattccccacagacaaagctttcatcctcattaggtgttggactcagcctaaccgtctaggactgttctattaaattgctgccagaattttacatccagttacctccactttctagaacatattctttactaatattattgaaaccaatttctacctcatacagaggttttttaaaacagcaattaaagtttttcttccatgaaaaaaaaagaaagaaagaaaatcggtctctttctctttaagagaatttgaatttgatccaattgcttttgacaccctagcagcaagtcctttgagatgcttgccattgtccccatgtctaacaaggatctccactagacacagaagtttttctaaatctatcaagagcctagttaatttttctttcaaatgcctacctcccttttccctcaagaaaggtcagtagggcaatcaccactaattcctgcaaagaaggcataagtacagttaccatggcataacgaaaatgaattatcagatatgagtggacagtagagagatggatggctgcatccactagcaaatggaatgcaacaaaagaggagtttttgtttgtttgtttgtttgtttgtttttgagacggagtctggctctgtcccctaggctggagtgcagtggcacgatctcagcccactgcaagctccgccttccgggttcacgccattctcctgcctcagcctcctgagtagctgggactacaggtgcccgccaccacacctggctaatttttttgtatttttagtagagacagggtttcaccacattggccaggatggtctcgaactcctgacctcgtgatccgccagcctcggcctcccaaagtgctgggattacaggcttgagccaccgcacccggccaaaagaggagttttaataagcaaattattgaaggagagattaaaataaggaaataggattcttatagtctgaattccacaaaaagtgaagaaagcattttggagaaaaaatgggatgacaaagacaacaagaaaaaatgagaccaagatcccccaaggatgggactctaacccacaatcctagaggggatacctagatccctctagagtgggactctaacccacaatcttagagggccaaaagcagttaatgctgaaaaacctggagcatccaggcatcaaccaatgacggtcccccacatcaaatgctacacatcccagaacaacctggaggcagacaacagtgaaccccaaaggcacaagcccaaggtcctcaatggtgggattctcacccacaatcctatggggacaattccaaaacaattgggggcacagaacagcatgactccaacattccaaagtcagcacaawgggggatcactcataataacaaaagaaaaaatgcagccaggcgcagtggctcacacctgtaatcccagcactttgggaggctgaggcaggtggatcatgaggtcagaagtttgagaccagccttaccaacatggggaaaccccgtctctactaaaaatacaaaaattagccaggcatggtggcgcacgcctgtaatcccagctactcaagagcctgaggcaggagaattgcttgaacctgggaggcagagtttgcagtgagccgagatcacgccactgcactccagcctgggtgacagagcaaaactatgtcttggaaaaaaaagaaaaaaaaaagaaaaaaatgcaaaacaaggaaactgtcctacctcatataacatagaaacaattgcccaaatagcaggggaaacaaaggagacacctatccatggagggcaaatggtgctgattgatgttagtaggggggcgtccagtgaaggtctcctgcagttcccctcggcttgttaatcccttcatgggttccaggaaagatgatgcaggtgaatcccaaaactggggctcagcccaggagggttcttggcttcatgcaggaaggaattcaagggtgagccaacagagtaaagtgaaagcaaaccaagtttattaagagcaacagaatacaggaaaatggctgctccatagatagagcagggctaccccataagcagagtagcactcatggattgctgactaactctatttatagctactccttaattatatgctaaataaggggcaggttattcataaatttcctagaaaaggatgaggagttctcaaaaccaaaggttcctcctcttttaaaccatataatagcttctggacattgccatggcatttgtaaactgttatggcaccagtgtgagtatcttttagcatgctaatgtattataattagtgtataacacagatcaagggcaattagagatcacattcgttgccatcttggttttagctgatttagctgatttatttaatgcctcctgttttgattagcaaggttgtgaccagtgtttggaaaacaagtcctgctgatctacctctatataagataattaaattagataatccatgtaaagtgttcatttggaacatagtaaatgctaaatattagctattattattgttattattttcctcccaatatgcaaatttagatggataataaaattataagaagaagattgcttagcactagattcccagaagtggtttattcattagtttaatggcctcaggcaggatacacccactgcagcatctagagtgctcaatctcaggaaagggtgcactttcatggactcttcagaatcctactattatttcacatctctgcaactgtaggctgtcagaaaaacaatactccaatacaaaggcttcaaaagcaagtctctctgaccttctatcctcctgcctctggcccctcattctcccaaggctagccttagaaactagaatttttcttcctcaaggcaggtcatagaaactagaaccccatttccccaacaccaggcataaaacctaaaagtattatcctaacgttcccccaacatttttgtgtaaaaatcagccataaaaaaaattatttgacctaccttgtttgattgcaggtctaaagaccctcattccagagagcatcctgccccatatccagaatgaaatccatgctcagagatgccaagaagaatctagacagacaggcctttctaggtaggtttccccactcggtctttagcattagatcttaccctttttgtccaatcatatttctacatagctgcccatactttgttgaacctaatgataaaaatggacagtttcctctatatctttgggtccgcattctaaaggctcctgtgtcaggtacaactctaaccaaataaatttatatgccttttctcctagtaatatgtgattttcagcaaaacttcagaaggcaaagggaaagatttcccagcccctaaccaacatttggcactcgtaagctcttcctctttaaccttctattctccactggcttctgtcattttattcctatgtaaatgaagaaaacagatttctcttcttcaatccagccattaaacttgataattttctcttctcttctgtctcacttttcctaagtaatctcatttcttcctgtggcttcagctatcaaatctctaactcaagcaacattgctctgagtgccaacaccataaatttaactctcctctgaagaactctacttggatgctccaggtaccaaatgaaatatccaaaacggaagaaaggagagtcccttcatttcctgaatctgctcccttctggtattccgaatcttataggctgaggcaccaaagccagaatcctgaaagtcatcctgatctctggcctctcactaatgactcacatacaatctctcaacatctgtcaacttcttcctaaaaatctcttaaatgtggcccttctgtccaaccccactactactagcttagtagctaccatcatttctcaccagaatttctacaatagccactgaacttgttttctgcttcatgtctcatatgcctccaacctaccaatctcacacccctgcttatcctcagcacctggaacagtgtctggcatgaagtagacacaaatcaatatttgttgaatgaacaagcgaatgaatcaattcctatcatagagcccaaggaaaaacttcccctttgccctctgaagttttgttgaaaagtcaactgacaaaaaaagcagattaaaagaagaaatgacatgaggaataattactctgtggttctcctttgtgggtatgttaataaatttctgtgccatttctcctattaagctgccttttatcagttgatttttcagtggaccttcagagggcaaaggggaagtttttgcttggctcctatagttttggtgctgtgagcagtataccaaaactattctgctcttaagccagagtgaagggaacccaggacctgactagctgccagaagaacaagaatttcttaccggccaagcttctggcctctctttctgtggaatctgatcaagttgacagttaaaatccctgtttgtctcttttctctgcaaaatcttgattaatgggagacaaggatttgtgtgagtagtcttgggtgttgtgactctggtgtaatttttggtttaagtattcatattatttgatcctttttgtcccagaaatcaactttttctttctttgtctttccgtgttgttatgtcataaagaagggtaccaagcatgaggtagaacataggcctaaagcctttataagcccatttttccagccagccttgcggacttgtcagaattgtagttctgaccagaacagcatataaactttgttgtgggcccccaaaataaaaaccatatgagattcccctttcatcttgttttatatccttgaaagtgtggctggtgacaaagtgggagcactctctcttggtctccactatctatgaggcatgattttcaggtcatataaggtgaccagtctgaaaatggctgggacgtgagacatgtaagattttaagcagcacactttttgttatgaatgtgtcaagctctcaggggagtttgtcttaaaagtcccatcactgtgggcttttgtcatctcaactcttgttgcttggttctaaacaattgccttctttgtgtttatagacagaccaaattaaaataaagacatataatagtatcatggctaaccttagaaattctcttgacaaaattaaacagcaaaaatctgacctaacacaaagtgaaaatcataactgaaggggtgggttgcccctccacacctgtgggtgtttctcgttaggtggaacgagagacttggaaaagaaaaagacacagagacgaagtatagagaaagaaaataaggggacccaggaaaccagcgttcagcatatggaggatcccgccagcctctgagttctcttagtatttattcatcatttttgggtgtttctcagagagggggatgtggcagggtcataggataatagtggagagaaggtcagcagataaacacgtgaacaaaggtctctgcatcatagacaaggtaacgaattaagtgctgtgctttagatatgcatacacataaacatctcaatgccttacaaagcagtattgttgcccgcatgtcccacctccagccctaaggcagttttcccccatctcagtagatggaacatacaatcgggttttataccgagacattccattgcccagggacgggcaggagacagatggcttcctcttgtctcaactgcaaagaggcatgccttcctcttatactaatcctcctcagcacagaccctttacgggtgttgggctgggggatggtcaggtctttcccttcccaggaggccatatttcagactatcacatggggagaaaccttggacaatacctggctttcctaggcagaggtccctgggtacttgagattagggagtggtgaagactcttaatgagcatgctgccttcaagcatctgtttaacaaagcacatcttgcaccgcccttaatccatttaaccgtaagttgacacatcacatgtttcagagagcacggggttgggggtaaggttatagattaacagcatctcaaggcaaaagaatttgtcttagtacagaacaaaatggagtctcctatgtctacttctttctacacagacacagtaacaatctgatctctctttcttttccccacaataacatatgtgctcaaactgtctgtaggattcacaataaagctgctccacctttcagtccagtaattaaaattctgtgctttcacta

SEQ ID NO: 93722 - DNA, 13384 bp, Homo sapiens
ttaccttcgcatcttagaaaagttagaaaatggtggccaggcgcggtggcgcacgcctgtaatcccagcactttcagaggccgaggcgggtggatcacgaggtcaggagttcaagaccagcctggccaagatggtgaaaccccacctctactaaaaatacaaaaattagccgggcgtggttgtaggtgcctgtaatcccagatactggggaggctgaggcagagaactgcttgaacccaggaggcggaggttgcagtgagccaagatcacgccactgcactccaaccggggtgacagagagagactctgtctcaaaaaaaaaaaaaaaaaaaaaagaaagaaaagttagaaaatggtgccattccattctacaagtcatcaactttactacatagttcatatgatggatggtataggcatgactttgtattacatgaaaaatatcatggcatatcactcctgtccccttttagcttattccattctaacagtgtgttttgaaactgttatgaaatatcatgttaaagtacctgacaatatgtatcaagactacaaagctatttcttctctcaaaaagtacaggtagaccaaaatgctattgggtaaaagcctcttgtttaattttgcaaaaaattaaaatgtgatttacctcacagataaacaattaaatgtgtaaaataaaaatagaaaatgcataaatgtgtcttattcaatatgcatttaagagcacacactacttggtaagaaatgtgctagctgtccagcttggcttgaaaacatgcattatgtaaattagtttatttagaaataatagaaataataaaataatgaaaataataatggaaaactgtaggttttattactaataagtttgttttgagaaattattgaattgcttagggactcccaaaattccatctccattttttcaatttcctatctttctaataaagtacttttggttaatgtggaatatctatacccaataatgtacttcaaaaagtatgtgacatgggtaatttgttgcctataaggtctggttctgtaatagcatattgctttgatttttaagtaattaatcaatggctaggtgtggtggctcacacctgcaatcccagcactttggaaggccaaggtgggaggatcacttgagcccaggagttggagaccagtatgggcaacataatgagacctcatctctgccaaaaattaaaaaaattagctggatgtggtggtgcatccctgtagtcccagctactcaggaggctgaggtgggaaaattgcttgagcctgggatgtggaggctgcagtgagccatgatggcaccacagcactccagcctgagcaacagagagaccctgtctcaaaaaaaaccaaataaattaattaaaaaattaaaattaaaaataaataaataatttatcagattatctcaagactgcattatattggccgggcgcggtggctcacgcctgtaatcccagcactttgggaggctgaggagggcggatcatgaggtcaggagatcaaaaccatcctggataacacggtgaaaccccgtctttactaaaaatacaaaaaattagctgggtgtggtggcgggtgcctgtagtcccagctactcaggaggctgaggcaggagaatggcgtgaacccgggaggtggagcttgcagtgagccgagattgcgccactgcactccatcctaggtgacagagcgagactccgtctcaaaaaaaaaaaaaaaagactgcattataaccaaaccaataatatgcatgcttagtttgcattaaaatgcaataaattttggaatgagtcaaatctgaaaaaaaatactaatagaactattaatttgaaaagatacgtgtttatactctaaagcatatgtgagggagggctgtgagggtaagccagtcagacaagacttcctagaagtggaagggaaagctgacatgttaatttcattgttttctggttttaaggtctttaagaatgctttggaatgagtcaatacatatatatatattccaccctcttcccttcttgtgagcttggagattttatggtgaagagatctcatgctgctagtacagcagaaaaccatattttaattctggggcttagggtctcgtttagttacatgttagttgcatctttttttcctgatgtcttactttgctgcctttaaatgaaatatttttatgaaacattaagataatgtacattattatgaagggaaaaccaaaactgcagtgtttctgaagggcatatggcttcataraactgttggtggtagatctgtgttgtaggatggaawtctatagcagaagtaatctgtggctcaagaaaaaaggtggctgccaactacctgcatatgaatgaaacatttgtggccgttaagactactgttttaaaacagcagtatgcatgcatgaccataaatacatttgacatttatayagcccggctctaatttccgtgttctctgcatrtggaacagcaagagccataaatgttattacacattgctccttaatatgcaaaggtgaacytgtatactcagtacatattgcctcagcttgttaatgagcatttcatggactgtgtaactgctgaactacattytgctagaaacattgagttgttccttcaggccttatgtttcagcaagcttgttctcactttgatgtataaattagagcaatacactgaagggacccaggggttacttgatgttgaatctttcctgtgaaattgaatatagctctcttcaaatgtgcttctgaagcatttttttccttcctgtatttaatgtggaagaatttctactgctatagaaataaacctctagattaaaaattacttgtatttactttaataaaaaattagtctatggcctttcccttgcattatatgaggaaataagagagtgaatctcaaagaaacacttacgctagtatatacagatccctttgttatttgttcttcaagagaacaaagagagtatttgtgtgaatatggtattactttttttttttttgagacagagttttgttgtttcaccccggctggagtaaagtggcccgatccccgctcactggaacctccccacccccaggttcaagtgagtctcctgcctcagcctcccgagtagctgggattataggtgtccgccaccatgctcggctaatttttgtattttggtagagacggggttttgctatgttggccagcctggtctcaaactcctgacctcaggtgatccacccgcctcggcctcccaaagtgctaggattacaggcgtgagccaccatgcctaccacagtattactgtttgagggctttttccctaccctttacaagtttaaagacataaaaggattgaactggaggaaatcttagaaatccccaagttctgaaccctcattttatagaaaaacatgttcaggttcatattgcaaaagaggccttcccaaaaacacacaactaattcctaacaaggtttcctaatcctcaggatggtattctacatactatataacactgctaacccaacattgattttttttaattataaaataaatttgctggctgagcacggtggctcatgtctgtaatcccagcactatgagaggtccaggatagtggatttcttgagcccaggagttcaagaccagcctgggcaacatagtgagaccctgtttctacaaaaaaatacaaaacatttgctaagcatggtggcacatgactatagtcccatctactcaagagactgaggagtgaggatcgcttgagcctaggagggggagttacgatgagctgtgattgtgcctctgcactccagcctgggcaacagagggagaccctgtctcaaaaaataataatagataaataaatcaataaataaaataaaaatacatttgctaaaataagaaaacagccagaaagattatctaagaatttaattttcttggagctttctacatctgtctacaccggcattaatgctaatgtattaatattagttttggcctccaatgctattaaaagttgtattggatcaatctgaaaatctaagaagatggtagaaagagctgttactctttgttccttgattctctgttgagctcaataacttaatatgccaccatgagtaaattttaaaagttagaaatcagttttgaattaaataaatattataggctatttaataaaacataccttcaagatgatctatgaataccaaaataatgtctgaatggattaatcccagttctggtcaaagtctcaagaaaaattaaaaatatatttcaagtatgtcattctaagcattaaaagctaagtgttgagctaactaaaacactcacatttacacaccttacaaacatgctgctgcagagtatacactttacattttaaattatgggcaactatcgctcagagaaactatggatctgagaatataattccactgaagctatgttacatgagagagacttagtagtagaaatctgtgatggttaatattaagtgtcaatttgtttggattgcaggatgcaaagtattgtttctgggtgtgtctgtgagggtgttgccagaggagattaacattcgagtcagtgaactgggaaaggccaactcaccctcagtctgggtgggcatcatccaatcacctgccagcgcagctagaaaaggcagtcagaagaaggtgggataagccgacatgctgagtcttcctctggatgctccctgtcctcgaacatcagactccaggttcttcagtttttggactcttggatttacaccagtggtttgctaggggctctcaggccttcagccacagactgaaggctaaactgttggcttccctactttcgaggttttgggactcggaatgagccactactggcttcctagctcttcagcttgcagacagtctatcgtgggacttcatcttgtgatcctgtgagtcagttctccttaataaactccctttaatatatacatatatactgttagttctgtccctctagaaaaccctgactagtacagtctccttctagttaaatacatattttttcattattttctttctgctggaaactagaagaataaaattaaactttattactctgcaaaacttgtggtctatgagtacctcacaataaatatgtgtttcatttaacacatatttattgaatgcccaaatacagtcatgttgatctagtctacatagataactgcaatataaagtagtggtaagaataaatgataattggtattggagatcaatggatagagaggtcagttccagttgtcatgaattagaagacttcatggggagagtttaacttcaaaaatggaaagggactgggcacagtgtctcatgcctgtaatcccaacactttgggaggctgaggagggcggatcacctgaggtcaggaatttgagaccagcctgaccaaaatggcaaaaccccagccgggcatggtggtgggggcctgtaatcccagctactcggggaggctgagacaggagaatcgcttgaacccaggaggcagaggttgcagtgagccgagttcgcgccattgcactccagcctggacgacagagcaagactccgtctcaaaaataaataaataaataaataaatggaaaggacaggtgacattcttttgatccagtaggggtgcagggtaggagaggagagtttccaagatggaagctgcaagtttatgcaaggcagggagcaaggaaaccacaggtatgtttagacaatgttcagaaaataagtttggatgagacaaagtgtttgtgtaaaggaagaagcagcagaaactacaattgggatataaagaaccttgaaagactttgatctttgcctttaggaaagtgatttttaaaagttagaaaagtttacaatttgtaatacacctctccacctttttaatggaaattcaacagaatcaaagccacaatatagaaaatagataaaaaggctagtttctcaggatcatgtctgtragccaggattcctgatccagagacaatggccccgatgggatggagcccgaakgcgtcatcgagagtaactggaatgagattgttgacagctttgatgacatgaacctctcggagtcccttctccgtgacatctatgcctatggttttgagaagccctctgccatccagcagcaagccattctaccttgtatcaggggttataatgtaatcgctcaagcctgatctgggactgggaaaatggccacatttgccatatcgattctgcagcagattgcattagatctaaaagccacccaggccttggtcctagcacccactcgagaattggctcagcrgatacagaaggtggtcatggcactagtagactacatgggtgcctcctgtcatgcctgtatcaggggcaccaatgtgcgtgctgaggtgcagaaactgcagatggaagctccccacatcatcgtgggtacccctagctgtgtgtttgatatgcttaaccggagatacctatctcccaaatacatcaagatgtttgtactggatgaagctgacgaaatgttaagccgtggattcaaggaccagatctatgacatattccaaaagctcaacagcaacacccaggtagttttgctgtcagctacaatgccttctgatgtgcttgaggtgatcaagaagttcatgagggaccccattcggattcttgtcaagaaggaagagttgaccctggagggtatccgccaattctacatcaacgtggaacgagaggagtggaagctggacacactatgtgacttgtatgaaaccctgaccatcacccaggcagtcatcttcatcaatacccggaggaaggtggactggctcaccgagaagatgcatgctcgagatttcactgtctccgccatgcatggagatatggaccaaaaggagcgagacgtgatcacgagggagtttcgttctggctctagcagagttttgattaccactgacctgctgsccagaggcattgatgtgcagcaggtttctttagtcatcaactatgaccttcccaccaacagggaaaactatatccacagaatcagtcgaggtggacagtttggccgtaaagatgtggctattaacatggtgacagaagaagacaagaggactcttcgagacattgagaccttctacaacacctccattgaggaaatgcccccaatgttgctgacctcatctgaggggctgtcctgccacccagccccagccagggctcaatctcggggggctgaggagcagcaggagaggggaaggaagggagccaagggatagacatcttgtcattttttttctttgaataaatgtcactttttgaggcaaaaaaaaaaaaatagataaaaaggtaggtattatggttaaagtagaagtactgttccttcccctgaatctaacccctatacactcactgaccttcctcaaatattttggatctgcaaatagttttaagcaaaaataaggtcatatgttcttcagggaagttaatcaataaactaagtgttttaaatataatctagcactggcgttaatctcttgcacccaaaatagaaaatataaatcactgccttttttagagttaatttacactgaaacaacttgagtaattcttcaaagaagcttcaaatgatcaactttagcaattaattataattaggactcaggtgccatgatttaaaaaaaaattgaaaaatggctgaacaaactaatagcaaaattttcttaatcataaactcattaytaggagcctcatgatgaattaaatctataaatggattatcatggtggaataaaagataagtgaataattttaaaatgaatataagtaaacaacacaatgatatcaaattgtcataagaaaacattataataaatctctatctaaaaagtgaacatgcctattgaaattgtccacacaaatgacagtaggtagcaattataggatgaaaatcattaatagtttaactcatttgcattttccattaagagaaaatatcaaaataccaaacatttcaggaattctttgggaaagaatttgtttcaaaaatttaaaacagtaggacactatgatgactatacttttttttttttttttttaccagaacatcaccctatcccagatactgtttgccaagcctctctcaaatctatgagcctgcctgctatgatgtagctgtcttctgcacaaataacgcatgtcttatcttgcctgttctgatcatacacagttgttcatcttgtatactctctcttatgaaattataagctccataagagcaaaggttatagcttatagctgataccttttttttttttttttggtattcctggttgtgtgataatcagtgcagtttagaaaaatgagcattagaggctgggcgcagtggctcacgcttgtaatcctagcactttgggaggtcagggaatccagaccatcctggctaacacggtgaaaccccgtctctactaaaaatacaaaaaaattagccgggcgaggtggcaggcgcctgtagtcccagctactcgggaggctgaggcaggagaatcgcttgaacccgggaggcagaggttgcagtgagccgagatcggccactgcactccagcctgggcgacagagtgagactctgtctcagataaataaataaataaataaataaaagaaaaatgagaattagagttgggttgtgaaatagcctcagttctgtcattaactatgtgacttgggaaactattttatatttcagaatttcaattttcacttttgtaaaatgatgacattggactatatcttctacagctctttcaacttagtgatgctgtgactaaaggaaactggataaataaatgctgttttttttcaatttcctatacattttcctttttacattctaccttaaaattttaaaaaatgaaatattaatttgaggaaatttattttaatcgagtagcattacatttttatttaagatgagtagatacagctcatatgaacagtttctaatagaagggcaactacattttcatgaaaaaattcatttctcattaataactagaagcactgagtagaatatgaagtttctagacagacttgtaaaaaactactgataaaacctcatctgtattgcgaaaacatatgcttagaaagtagttgacgctgattttttttttttttttttttttttttttagcgttaggtgattcaaatccagctcagaaagtttaaggctaatacagagcttactttcatattctccaaacctacagagaatgctggtaataaaatatcactgctgcagactaaactaaataaggctcataataatctttcctttgccaagtatttagaaggtctgtccaggtgaaaatatttgctgtttgtggagctaccaaaggcctagaataccccagatgttgactgcatttacatattaacataacttaagaaaggttatcagcatgtcctggttcctctaagaaaacaaaggagagccagaaagggatatttggaactatcaagaatatggtgtgctgtgaaaagaaattaaatttttggaccccaaactcatttatccaaagggaaaagtcaagctgggaactgagtcacacaaacctgcctcccccttttggttcctcgatgagatggctaccagatgaaaggctacccgcctcccccatattttgcccacaaggaaattcctggccagctgttaaaaacttctccatggccatgcaaattgatagcttatctttacaggtgcagtcacccagcctgccagacaaaaatgcatagctgattgttccccttccccattttgtctgttatgtaaaatgcagattcttcacatttttcctctgcccccccttgtttatgtaaaaactgtgtgcttctcaatatcccaccctttcccctttaaatttggagccctcaaaatcatctttggagaaaggcgtagacctgtctcccgggtgcatccttaattttggcaaataaatctcctaaaatgattgaggcttgtcattttcctcggttgacagtgtctactgaaattcaaaactttttctttgatttgtttaggtatcttgtctatattggcattggtactgtgaaatcttagtctaagattttatttttctctttctttgtaagagcctaagatttatgtattccaattgaattacttagtctatacaatacaaatctcattttcaataagctggaactttcgtagaccttctaatttgttttattcacaatctttcaaggataagtttaaaataaaaatccttttaaatatatgattgatttatatttagggactaatcaatctataaaagtagctatttcaattatgaagtaacttaaagaaaagattaactgctgagaaaaaatgcagctccatcggtcaatagctaaattatacagtgttttattcaataactatatcttcaaaaaataacttcctagtcttgaaactatctttgcaaaaattataactgaggatattatgatagtgaaagagattagacctaatcaactccatcttgcttctaacctttaagctgtccttgttcattcctaggcataggccaaactaaccttgggaaggaatttagtttatggtttgactctgaaatgaaattatagccctttcccaaaaagactcccttcttgctttgggcccagtctgcctttgtaggactaacaaactagctacaagagtaggaattacgtttaggggtcatgcagcttctggatgcaagagtctgaacctcaccaaattgatcctggagataacatcactattttaaaacctaagatcagtgcttgagatattttgcaaaccctgcacttgatggattagctgataccacccagacctggctcaaccagttctgtgatcccacccaggaacagaagacaacaagaaaacctcacttcgacccctctatgattccatcttcaatccgaacaatcagtacttcccacttcccaagcccctactgccaagttatcttaaatgttttttttttgagatggaatctccctctgtcacccaggctggagtgcagtggcatgatctcggctcacagcaacctccgtctcctggactcaaccagtaattctcctacctcagcctccagagtagctgggactacaggcgcctgccaccacgcccagctaatttttgcatttttagtagagacagggtttcaccacgttagccaggctggtctcaggtgatccacctgcctcggcctcccaaagtgctgggattacaggcatgagccaccgtgcctggcccaagttatctttaaaaactccagtccccaagcattcctccaaatgctcagggaggctgatttgagtaataataaaactccagtctcccacacagccggctctgagtgaattactctttctccattgcagtccccctgtcttactaaatcgtctctgtctaggcagcgggcaaggtgaacccgttgggcggttacagtattacaaaacttataatgataatagaacattttacttaacattattcaatgcttaacaggacataatttaggttaatattaggtaatcctgaccatagttatctatgcattttaattctatgtccctacctcttacggcttatcaaaacgaaaaggaataatatatcctatagcaaggttaacacttcgtatttcaaaggatgagaggttatgtttacggatgcattattggaattctatttaaaaagtatttcctcccacattcttctatcaaaaaccagccatgtagtaaaggtcagagtggaaaacagagtagtctgcattatattatatgtgtaccataatggtgaaacattatattgacagatttagggaaagcttttttttttaatcatattgaggtataaaagacaaaaatcaatgcagccgaaaactaacctcagaatgacagtgttttatatttttctaagcctctaccaaaaatttatttcactgtcttacttaatattcaaaatggatgcacgctgatttgaagtacagtgtcttgccaaggcagtcagccttagaaatactaaatcccttttactttttttaatcacagtgttaaattctcctgagtgaatcacaagtccaaggtggctgaatgcacttgccagtctattgctattgaagcaccttaatgacataaagaagaagaaaccaatgaacattgttatatatttcattttaaactgatgtagacattttgaggaaatctgcattttgaaccaggtatgttttcagaacagatcttggactacatgatgtctaaaaactaaataatatccaaggatccttcatgattaaattatcttcactcagcttgtcaaagagctctgcttctttatatcagaactatattttttctttatcagttcatattgtttatatacaaagatatttcacaaactatcaaatagcactgataaattaatttgactagtgatttcctatacatattggcatattgtcgatgaaaagagtcaaattctgtaaagtattttaagagatttattctgagccaaatatgagtgaccatggcccatgacatagccctcaggaagtcctgagaacatgtgcccaaggtggttggggtacagctcggttttatatattttagggaagtatgagacatcaatcaaatacatttaagaaatacattgttttggttcagaaacgtgggacaattcaaagtgggggctttgagttcaagcgattctcctgcctcagcctcccgagtagcagggattacaggcatgtgccaaccacgccctgctaattttgtatttttagtagagacggggtttctccatgttggtcaggctggtctagaactcccgacctcaggtgatcagcccgcctcggcctcccaaagtactgggattacaggcgtgagccaccacacccagcctcttggtgatttagacaatggattccattaacatccaagggtgttttgaacccaaaagtacctaagacagctctcaaaatgttaactcaaaagtatctgaaacaggtctcaatcagtttagaatgtttattttgccaaggttaaggacatgcccatgacacagcctcaagaggccctgaaaatatgcccagggtggtcagggtacagcttgtttttacatattttgaggagacatcacacgtcaatcaacacatgtaagatttacattggttccatctggaagggcagactaactcaaagtgatgaagggattgaggagggggattgaggggtggcttccaggtcatagatggatttaaaaatgttctgactggcaattggctga

SEQ ID NO: 93723 - DNA, 316111 bp, Homo sapiens
  misc_feature (1)...(316111): n = A,T,C or G
aaacatttgttaaatgaatgattttcgtcaacgttttcatgtgtttaactgttactgctattgagagaagatactcatttaggtcaggcgtggtggctcacgcctgtaatcccagcactttgggaggctgaggcgggtggatcatctgaggtcaggagttcgagaccagcctcgccaccatggtgaaaccccatctctactaaaaatacaaaaaaaattagccaggcatggtggtgcacgcctgtaatcccacctacttgggaggctaagacaggagaattgcttgaacctgggaggcagaggctgcagtgagccgaaatcgcaccactgcactccagcctgggcaacagagcaagactctgtctcaaaaaaaaaaaaaaaaaagatacaatactcattcatcagagacagacaatggaaaaaaaaagttcctgctttggagttagacaaataagaggcttgatctccatctgctacttactttttgagtttccatttcttcataaataaagtataatttatagaattaggtctactgaatacaatagaaaaaataaaaaacagtggctttaaatatgacagatgtttacttttctctcatgtagaagtctgggggtagacagctcagggatggtatggtgacttaatggatgttagggacccaggctcttattctgttccaccatctcactgtggggactttcatttccacagttatctcgtgatacaagacggctgctggagcttaaaccatcacatctgtgttgcaggaagaaagagaaaagagaaaaagcagaaaggcaaaaaagagtcccctttcagatctaccagaatactttttttttttttttttaacttttaggttcaggtacatgtgcagatttgttatatgggtaagtagcatgtcacgggggcttggtgtacagattatttcatcatccaggtaataagcatagtacttcataggtagtttttgatcctcaccctctaccacaccccaccctcagttggtgccagtaactgttgttcccttctttgtgtccatttgtactcaatgtttacctcccacttataagtgagaacatgtggtatttggttttctgttcctatgttagttcgcttaggataatggcttccaactccatccatgttgctgcagacgtgatctcattcttttttttttttttttttttgagacagagtcgtgctctgtcgcccaggctggagtgcagtggtgcgatctcggctcactgcaacctctgcctcctgggttgaagtgactctcctggttcagcctcctgagtagctaggattataggtgcccgccaccatgcctggctaatttttgtatttttagtagagatggggttttgccatgttggccaggctgatctcgaactcctgacctcaggtgatctgcccacccagagtggcctcccaaagtgtttggaatacaggcgtgagccactgcacctggtttcttttttatggctgtaaattagttccaccattgtggaagacagtgtggtgattcacataaaagtagaagtctaagaatcaaaccctaagtctgactctacctgagtctttaatccttccaatataatattaaagaggacaaattataaacaaaaagagtctataattctatcatcctggcaaaatatactccattttgcatattgctttcaggtaaataactgtttgatatatcattgcaaataagtgtgggtatgtatcactttgccctctgtggttttcactttctgaaatatcataaacatttttcatattttgagtctttctaatcattttatctttttgatgtcacaacattaaacctttgttatgatgtggacttttaggtcccaactttttgctaatggaaaacagcagccattaacgtctttgcattttttgtttctattatttcttattaaacttttacctgtggaaataaagggttgaaagatacaagtatgtttacggtacttgtcacatattgcaatattattttccaaaagattgtgccaacttacactgccacctgtaataaatgagttgtgcctcaacactgtaagcttaccagcaatggataacatttatatatagagaaatgtacagataaaaagggggaaaatggtggaacatagtatctcagtctcagtttgctttactttgtttataagttaaaaaaaaacctttaaacttgcaaaactggtcctggacaggagagaggaagtttaagacaaattatgatttttttgcatgattagataacagaggtaggtttacagtaaagctgctgaaacttaatctccagggcctctcatttgcatattggccacttgcaaggctctgggagatgttctagcaatggttttatgtttttgtaaacatttgcaaaagtaagatatttcattttatttatttgtttattttaagatagtatttgtcatatttatttgctccatttattctaaaacaaccctggctccctccttcattcccatctaatctaccccaatcctttttattaatattattacttaattaattgtttatgtgaatgagttctttagtggtgatttctgagattttgttgcacctatcacctgagcagtgtacactgtacccaatgtgtagtcttttatccctcacctccttctcacctttcccagagtccccattgtatcattcttatgatacaatgagtccattgtatcattcgtatgccttcggatacttgtagcttagttcccacttacgagtaacacacaatgtttggctttccattcctgagttacttcacttagaataatggtctccaattccatccaggttgctgcgaatgtctttatttcattcctttttactgctgagtagtattccatggtgtgtgtgtgtgtgtgtgtgtgtgtgtgtgtgtgtgtgagatatatacacacacacatatgtatatatacacatatctcactttttttaacctacttgttgattaatgggcatttgggctggttccatatatttgcaattataaattgtgctgctgtaaacatgcgcgtgcaagtatctatcatgtataatgacttcttttcctctgggtagatacccaggagtgggattgctggatcaaatggtagatctacaaaagtaagatattttagctgcaatcagatatgactactttccacttggtggtttgctggtaaaccttaaaaaaataaaaagctctgatttgtaccacttgccaatttccagggtgtaaatattcccaccatgactgatttcaagctaccaacagtttaacatggagattacaaaatactggaatatttaacaatcagctcttgagaacctccaactgtccctctgatacacttcgcttcttgcatagtagcagtgaaataggcataggcattttgggattccactatggggaaatggagttgatattgcatttagtttgggcttatttcttctatttatgtgggtcgaaggcacttaacccacatatatacttaagccatatatacttaagttattgatagacttttttttttttttgagacagagtctcactctgtcacccaggctggagtgcactggcacaatctcggctcactgcaacctctgcctcccgggttcaagctattcttctgcctcagcctcccaagtagctgggactacaggcgcctgtcaccacacccggctaatttttgtatttttggtagagatggggtttcatcatattggtcaggttggtcttgaactcctgacctcatgatctgtcagcttcggcctgccaaagtgctgggattactggcgtgagccacagcgccgggctgttattcatagacttcttggtgtaggaatagcttccaggaatatttctaccccagtgtgatgacttaccaggagttttgaactgaaagtgtagggccagaagacatatcatggtatgaaagtgtctggcctggcatggtggctcacacctgtaatcccagcactttgggaggctgagatgagtggatcacctgaggtcaggagttcaagaccagcctggacaacatggtgaaaccccatctctactaaaaatacaaaaattagccaggtgtggtggcgggcgcctgtaatcccagctactcgggaggctgaggcagtagagtcgcttgaacctgggaggtggaggttgcagtgagccgagatggtgccactgcattccagcctggatgacagagcgagactccatctcaaaaagagaaagtgtcctacaggtcttttcccacaaagtatgtgggtcattgtctcagtctgttcaggctgctataacaaaataccacaaactgggtggctaataaacaacaggaatttatttttcacagtgctgtaggctgggaattccaagatcaaggtgccggcagattcagtgtttggggtaggcccactttttggtccatagatggtgccttattgctctgttctcacatggaagaaggggcaaggcagctctctggagcctcttttccgagggcactaatcctattcatgagggagggttcctgctgatgacctaatcacctcccagaggccctacctcctaacaccaccacactggtgattaggtttcaacgcatacattttatgtggagagaaacattcagaccacagcagtagtgaaagagaaaagaggtttgaaatgcctagagttatacccgggcatgtgggaagtaatcagctgtgaaattgttaaggtaaggatttggttcttattaatgactagccaacatggttctctcctggttggaaaaagcttgataataaaactataaaacttccatcagtttttaaaagggaagtgtaggaataaatctgtcgtagtactttaaataggaagttatgtctaagtgtaaattactacatgttatgtatcacaacatatggatcacataacatgatattaaatgattatgaagctgaaagacattttctaaacaatcagaaattaagaaacaagtattgatcaaccatgctagaagacagattgaattatctttatatcctctttggagaaaatattacaaaattgttgtcacatgaagaagggatcaataagcatgtgggcaataatgtaggaaaaaatacaaatgtgtggcaggcattatttaataaaaatgttatacctttttggaaagagataacatgagatgtacacattacagccattgtatcatacacaaaaattgaataccctttttgtttttcataacattgaaattttggagttcacgtcaggtgttttgtagattgtcctacattttgaatacatctgattgtttcttcatggttagattcaggttagacattttttgcaagaagaccatataggcgaagtttttcctttttcatacgcattacatcaggaggcatatgagatcagatggccatttattggtaatgctacttctggttatttggttaagacggagcatatatctttaagttgttaatcacacagccactgtatccagactgctgagaagcaaactatcaggcaaaattcagggcgcgcagcaggaggcagtcgctttcccggctctggggaaaacgatccaaccacgcccactctcctgcccgcccgcgcctcctttccgggaaaatgggctctgagaaccagagcgccctttctcccacgcgcccaaatcttttcccatcagcatgcgtgcgcttgcgcagtctccaggcggctcctttccagcgcccgaccgcttctttctcctgctctcctccggcttcccctcagctctagcttttccctaaggggtcatcacagggcgccaaacgcgcgtccgcgggaaggccgggggcggagcgcggcgcggcgcggcacgtcagtggccttccggccggaagtccgcagcctcccgagccgctgattggctttcaggctggcgcctgtctcggcccccgcgccagttttgggctggttggcgcggaatcgggagattcgggaccatggcacctgtgcacggcgacgactgtgagataggggcgagtggtgagggacaattccgcgcgcggggctccgggttrggacastggcatgattgccggtggtgggggttctgagggaggcgcacacccgggtttgtttgggcgcagaccttggtcgtccccggcgggggcccttctggcgtcggaccgggcttcctttaggcgcggtttgctcttggaggaccagagcctggagggatttttgtttgggaggctgtctcacctctgccactgagagtctccacagtcgattgcgtttctatttcttttggtgagttgcacccacgtgctgggtataactttattgagactggccccgtggggccgaaagtatttcactgcgatctccctaagtatccacttgaaggcttgaacagaacagatctgtgtccctttttgtaggaacttccaggaaaattttatacattgtaactaagcaggaaagaaagctctaagtgctgtcatcggggaataacgcgttttgtatttttaggtaatgggtttctactttatgcattaacaatttttctttcagattctttggaaagttcttcaagtgctgcgtagaaatcctgttcacaatctagtcattcctggtgaagtttcaaaaaaatggcatcaatttagggcatttcggatcccctgtatatcactccgtttgtcaggggtgtcttttatttccaaaaatagaatacaaaaatgcaaatagatttgtctgattttttaagtgttcaactaaagcgtgacttcagttaacttctaacttaaaatcagatgcttcactttgttagctcaagcgtcacctctcctgtcattcagatacatcaccattaatgagaactcgcttcctaatcagcttcctttgcattcacctagttgtgagtcacagatttcaatttgttctagccgttcgttttttaagactattttggagagtcgacctgcctggattacagataggatgttgggtgtaagtatgtgaacgaacagtctttgcaggcctctatcagtgatttgccactaagccctttcttcatcctaaaaactacgtcatctatgaacatcaggaaatcactttggaggatactgtgcaatcttgagactcctcttaggtcatggtgttcattaagtagttgctggggacttgtgactggaatttttcctttagagcagactgaaggattgttacctgaaagactgctgtaagctagtgtctgtctgcttttggggaggatagagatactccagatggtaattttgaaacaaatatttaaacctttgtagctggatttttttcatgcttattctttttttgctaagttacctacgtgaagcattggagacatactccaaaaaacaaaatgtaggcttttttttttcttcagtattagcaggcagggcaccttgataatggcagtgaaaagttgaaaggtctgtaactagctgttactatatatgaaaaaagatcagggaatttttatttatttatttatttttgagacaaagcttccctcttgttgcccagactggagtgcagtgacgtgatctcagctggctgcaacctctgcctcctgggttcaagcagttctgcctcagcctcccgagttgctgggattacaggtgcccaccaccacaccggctaattttttgtattttcagtagagacagggtttcaccatgttggccaggctggtcttgaactcctgatgtcaggtgatccacctgtctcttcctcccaaagtgatgagattacaggcatgagccactgcgcccggccagggaaagtttaatgatcaaaaaagcaggtacagtggttcattcattggttcattcagcaaatatttattatatacctactaggtataagccttctgccaggctctggcattatgatggtgggtaggctggacatggtttgtcttcatgaagtacagatggtaaacatctaatcatatgcagaaaacggctttgctttgtttttgccttctaaagctagaccttggtactcttaggtatggtgtgtgtggggtatgtggatgtgtgtttgacttcacacgcggaagcgttacatgagccgctcctatattgctaagtgcaaagtaagataggcatcttcatgtaatccttaacagattttgaagcagacatgattatccccatttcacagatgtggaccctgaggctctgcatcagtcagagcccctatctgtaagctgcaggaaccaactctaccagattggttagaatttgttagaagaatattgtgttcacagaaactccaggaggactagtaagccagtctgggagctgtttagccaggaacagtgagtgaaattgtgccacaaaaatgggccagtgaggaggtcattgccaaccacgagcaagtacttgatgctatagctcataccttaggacattgctgacattgttgccggttttgtaatccttctgcagctgttgctacttgtagaatcttttaaaacccatgcccccttccttgtgacactagcttctgatttaatgtctgagcaggtgttcctaatcggtagcgcctattttatatgcccatgctctaggctgcaagggtgtctgggaaagagcatcaaccttttcagcttctgtaatggggcataggctctgcgtctcatcaagacttataagggatgggggccggatttcacaaacagtttcagatgctaggctgctttaaataacaagacacctgtctgctgcttaactggttaaccggtgttctcatgtcacccagtaaatggcagagctggaatgtgctgcttctccctaacctggttctcctactcactctacactcccttgtcgaatttaccttgcacactgagttctctcagtttctgaatacactatgcattttcatccctttgtaatttggctcatgcctcttcttttgcttgtgccactttttactttgttctctgtgaaatttgactcctttttctaggcctgtattggaaacctctcctgtgaagccttccttgattttccaggcaaaattaacagctctctcctctgtacatttcctcagtactgagttcttaccttttctatggcaccatgtttatattgtgatggtaatttcaggtactttgctttacttgactgggggcctcttttggacaggcagctctgtcttatttgtgattgtaccctaaaccctgtgtagtggaacattgttgcctgtgtagtgggacgttgcctgtgtagtggaacattgttgcctgtgtagtggaacattgttgcctatggagtaagtgcatttgaagacctacagatgtcaggcatcaagggagtcttgaggggaatcgcttttcactttcaggggtcatgttcagtaatcttcaaagccttttcatgtaggcctgttcacgatttttgaaatcatttgagtgacatccaagtttttgtggctgtcatcattaagtacctttattccttaatttttacttaatgtctttctgaaaatggatttaaaagtcaaatgtgaaagtcaaacaatagagtgtgatattataaagagagattccatttctagaaagctagaaaaaaataagatctctaattatgccttacctttaggctatagtttccagcagtttattgccagcatttggtacatgttctttaaattgtatcttctatttcagtcaaacacttagtcaagcagcttaatgttgttatgaacattctagtggggttggagttttaggctgcctcttatccatacttcttttctttgcctgctcctttttataaattaattagcaccaaacacagtaaaatactagatttcacagacatagatggcaatcatgctgagcctaaactcgtagttgacaggcagcactgttatgcttgacttagtttttcatcagtgggtatgtgaaagtctttaattctgtggatgaatttttttttttttttttgagatagagtctcgctctgtcacccaggctggagtgcagtggtgcaatctcggctcactgcaacctccatctcctgggtttaagggattctcctgcctcagcctcctaagcagttgggattacaggtgcctgccatcacacccagctaatttttgtatttttagtagagttggggtttcaccatgttggtcaggctggtctcaaactcctgacctcaggtgatccacccacctcagcctcccaaagtgctgggattacaggcgtgagccactgcatccgcttgaatttttttcagtgtgtgtgtggaacggtcagtttatgatgatcggagcatgaataattcaaaagttgaatgaataaacgctgaagtcctctgatatttcagtaatttttgacaaaccatttaagtccctgtagttgttttagtaatgtcctgtgtcataaccaactgaggccttgaaataagtgatataccaataatcccctcagagccatctttgttaaatttctccagccctcaatctgttccttctttgaatttccgggtgctttggctgaatctcttttaaggcatttattatctctaaatattgtttagagccagttgctacttgtctcccatgttagatagtaagttctgtgagtacagagaccatgtcttttttatctttttttgttgttgttgttttttgtttttgttttttgttttttgagatggagtttctctctttttgcccaggctggagtgcaatggtgcgatctcagctcgctgcagcctccgcctcccgggttcaagtgtttctcctgcctcagcctcccaagtagctggggttacaggcatgcaccatcatgcctggctaattttgtatttttagtagagatggggtttcaccatgttggccaggctggtctcgaactcctgacctcgggtgatctgcctgcctcagcctcccaaagtgctgggattacaggtgtgagccaccacgcccagcctgtctttgtgtctcatagtgcctagtactttgcaaagagtagatgctccttgaagccttttagatattgattgacagattgcaaaatgaatagtgcttttataacccactggattacttctggctggtcatttctaatggaaaggtgataaattagctaacagctgatctcccttgtttagtgtctccgcaggatatcagttgaattgggaattttcctctttttagagaaaaaaataacagtgactttaattgttttaacaggatcttggaggaactttctggcgagtcatgtatatttggatatgtatgtttggccatgagctttgtgaattatttacattataaacattatctacttgtatattactaaaattgtatgttattgttggctagaaacttttcctttgtgtttgagggaagatggctgacaattttgtaacatctgttgtaaattttttttcttttttcagctctgtcagattcagggagttttgtatcttctcgagcccggcgagaaaaaaaatcaaagaaggggcgccaagaagccctagaaagactgaaaaaggctaaagctggtgagaagtataaatatgaagtaagtaaccatttttcttctttattcttcctgtgcatcatctaattcatagcctgcaggtagtcttatgtcacctttgccccagattagaaatactcatatattttaaactttttgtaatgggaatttattagtattggacaagcatgggtatgaggtagatttacagatcatggagaatgttcgacccttaaagttcctataaggtattttaaagatgattttaaaattccaaaatgaaagtacatagtcatatctatatttttccttattgagcatgctgtatctatggtaagtcccatgggtttgttggggtcatttagagatgcttttacttactcttaaggtattgagcagtctaagtgctacttcttggagagaactgttcttcctaatctcatttgcaagggtagtggcagtggagacttggaccttaacttctgccgtgttctgcttgtaagattgaatgtgatgctcttttggttttcctctacccactgtttatggcctgcaggtcaaaaacagagtggccaccatctgcataaatattgtctagcatcaccttcagggcttcctgagtatcttaattgccttatggccagaaagtgattaaccaatactagaaaataacaaccataactgatagactttttgaactaacatattattctaagtgtgtttaccaatgtgtttattcatttaatcttttcaataaccaaatgaaattagatactatgattaataacattttgcaggtgagatatccgaggcacagaaagtttagtgaggttacaatggcagattcttttttgaacccagacagtctggcttcagaatatttctgtttaaccagttaaccaaataaaagaatatttgccatttgtcaccatttgttcaagttaagtgaggcaaccagatcataaaaggttgctaaaaggatttcagtaaaacaggaataaagcattttttttgtttttgagatggagtctctctctgttgcccaggccggagtgcaatggcacgatcttggttcactgcagcttccacctcccaggttcaagcgattctcctgcttcagcttcccgagtagctgggattacaggcgcccaccaccacgcctggctaatttttgtatttttagtagagacgggctttcaccatgttggtcaggctggtcttgaactcttgacttcaaatggtccacccgcctcggcctcccaaagtgctgggattacaggcgtgaaccaccacactgagcccaggactaaaacatttttaatgtaggtacttgtataaaggagttccatggggcatttcagatgttggcacaatgtggctgatttccctttaacactgtgatgttaattgtatggctctaagagttcatgctgagcagtagtaatgttgtttttaaagattgagtcgaaatgactttttactcaaaatgatttttaaaaatagttttctggtatctccttgataatatagtgaatcacttaagtaagagacaaagtctgtcttcaaccaacaaaaataataacgccagttcccctcccacccccaaaaaagaaagttggtcagtatagtaatattaattggactattttgcatctcttttgttaaaagcttaatttggtaaggcaggttgtttctgttactagatggttaaagaccaaatcagtatttgccagtgattcctgtagagtaggctaaaaaggaggtgaaaactcaaatcccgtaattattataagccttataggtgtggcagaaatccagtcagctctggccactggattccaaaagctctgtccaagttttttcctagggtattaactcttcagatggagttgtttctcccgtactccatttgagaaaggtagaactcttttttttttttttttttgaggtggagttttgctcttgttgctcaggctggagtgcgatggcatgatcttggctcactgcaacctcagcttcccaggttcaagcgattgtcctgcttcagcctcccaagtagctgggattacaggtgtctgccaccacgcctggctaatttttataattttagtagagacggggtttcaccatgtcggtcaggctggcctggaactcctgacttcaggtgatccacctgccttggcctcccaaagtgctgggattacaggcgtgagccaccacacccggctgaggtagaactcttgagagaatgggagaattttttttttttttaatctcgctctctctcccaggctggagtgcagtggtgtgttcttggctcactgcaacctccacctcccaggttcaagcgattctcctgcttcagcctcctgagtagctgggattacaggcgccccccaccatgcccagctaatttttgtatttttagtagagatggggtttcaccacgttggccaggctggtcttgaactcctcacctcaagtaatctgctcaccttggcctcccaaagtgctgggattacaggcgtgagccactgcacctggccgagaatcaggtactttttttttttttgagatggagactcggtctcttacccaggctggagtgcagtgcatgatctcggctcactgcatcactgcaacctccacctcccgggttcaagtgattctcctgcctcagcctcctgagtagctgggactgcaggcatatgccaccacgcctggctaatttttgtatttttagtagagatggggtttcactatgttggccaggctggcctcaaactcctgacctcaggtgatccacccacctgggcctcccaaagtgctgggattacaggcgtgagccactgtgcccagcatttgttaatttttaataagtatctatgagattttgcaaaccagcccaccagagtctcatctggaaagtcactggcctttccccatgggcagctgcagcagtggtgtgtatctttcatttgttgctttagctgtgcagaggttgtctgctttactcataccagtagctcatagtgttctgaccctcttgcagtcaggcagccaatatgattggaggacctgccactctctggacttgcctttcaaatagctcagcgtttaagtccttgtgtggtttcaagacctgaggatggtggagtttcagtggtaatacaaacagggtcactcaaaaactatttctggtttgcctgtagaatatgcaatatgtttgttttgctaatttttggaaggggatggatgagggagattttccttctgaattgtatttggttgattgaacaggcatgaaaattatcgtctatttgcagagcgtacatcagctagtggagagggaagtggcatgccttacaggtttgctaagtgtaggagaaaccagtctagaaattacaagtgaataattccccaaagcagctaatgaagaattggctataattcagtttgttttttatgaaatagatgagtaattgatggtatgacaagtgtattatgctaatggaatcatttaatatcttatgttaacacccacctaaaaggaatactaagttaattgatgtctatttaaggaaaaccctgtagtggtgttgaatgtcagaactcatgatttggttgcagctactccttcagtctgccattccagtttcaatttgacaattttttcatcagaattatttaacactttgactcctctatttgaagcttttttcctgaaacttgtataatggtaggtcgaggacttcacaggtgtttatgaagaagttgatgaagaacagtattcgaagctggttcaggcacgccaggatgatgactggattgtggatgatggtaggtggggcggaggtgggggcggggatgttgcttcctaggcactgtgttagttgcttcttgtagattctcactcatgtggtggagttgctgctttgcctgggcaaatgtaaggcactgttaggatcttacctttggtttggattttcctttaattatttgaggatgaggaagcagaatagcaggacatttatttggggatattttggagaatctaggcacatacctcaggatgtagtataaatcctccaggtaatggctgtgtaagaattgggaggagccccttgtctgtggggccaatgcacagcgcttggaattaaggaatgcaggttcgggatccatcattcctactttccaattctatgaccttggacaagtcacttaatctctctgcgccttagagtcttcatctgtaatatggggatgagaaaactaccttctcccagagttgtgaggtgtatatgaggttctaggtatgaaaattaacttggtcagtagaaagcaccatacaaaggctggtcctaatgtcctgtgccccttctgaaagctcattggttctcacttgtagggtctgacttcatggccatgtgaatgctgaccacagggagcatgtagattgtgcctgtgactatttatgtttctacttgtgtagttggattcagctatattgccagttttcccttgtagactgggatatctctctgggcttgtggtaatcttgattcttttactttttattcttctggtagagtaaaactgctataaagcatcctattgtggcagactttgatcctttgggccaaatcgtttcctgaggtcacctgactaggtataatatatatcatttggttttgactccacacctgctgtgtggatgctgtgcattgtctgacacctgtgtgaacagaattctgctgcacttaaaaatagcacaggccaggaaaacatctgagcaggtataaaaggtttttttggtcatggctaaaatattattggccacttttagaaatttgatcccagtattaaattttgtccctgcagatggtattggctatgtggaagatggccgagagatttttgatgatgaccttgaagatgatgcccttgatgctgatgagaaaggtacctaccttttsttttccagggtgttgttttgagatttaaagaattctctaaaattagagatgacttgatactctgatagtttacctttgagagaaggacctaactaccattgtttttagatacggaatatgttctaagatgaagagaagtatggttttgtggaaaattaaacataaaaagcagaaacaacatcaggaaatgaagtttcatgtctctgttattcaagtagtgtggtctttacttattttgaagttttcaatcccgtggtcatttaaaacttgctgattttgagggctgcaacagtaattgatcttttttaattcctactgaagttatatacttagaattttagctctttgctaattgtatagcacaataacaaggtttagaactagagtaatcagcttgctttgtctaattgaaatttaaaataatatggtgaatgtgtcagattgtcttagctgtacaatcattggcaatttttttttgagtaaacaatcctgatttagttcctgtaaaatgggaatggaaaattctcttcagtatttttttttgtttagtttgttaattagttttctactactgagtggtagattggggtcagcaaactatggccctctcacaaccagtttttgacaaaaagttttattgagatacagttcacataccatacaattcacatatttaaagtatacaattcagtggcttttaatatagtcacagagttgtgcagccatcaccacaatcaattttagaacatttttgttaccccaaatggaaatcttgcctgtttttgtgtggctctcgagctaagaatagtttttatgtttttaagcggtattttaaaaataaaaaatgcaaagaatatgtaacaaaagaatatgtgaccaaaagcctaacatctgtgctgtcttgccctttactgtctggatcctcatttgcagaataatattttgcaccattagttttctctctccttccaaccacatacacagagactttttgctcagtgaacttttagaacttcagcagtgacctcctaagaataaggatacctgactacttaaccacaataacattatcatgatattatctaatatattgtctgtattaaaagtttcccaattagcccaatagtatcttttaaagctattttaaatgcagactccatttttgttttcatgtctctttagtcttttttagtgtagaacagcaacacctccccccctcccctgcccctggcctctttttgtctttcatgacattgatttttaaagggaccaggctgtttgttttgttgaatgtcccacaatctgagttttgcccaactactttgttgtgcttagatttgggttaaatattttggcaacaataaataaatagttataaataaatgctttgtcaagacctacaatataaagtctgtccttcccatatcaggggcatatgacgtcacttgtaccattattgttgatactaagtttgatcttttggttaagatgatatttgtcagatttcttccttgtaaagctactttcctcccttttgtaattaatgcaaaatagggggtgataatttgagaccatgtgtatatcccatttccccatgaattgttacccagtgcttttagcatctattgttkatcctttctcttcttttaaaaattaatgcttcagactcatgtatttctaaaagatttactgttctaattcagtagccattattatcatttttcctttttatgttcaaattatctcagatttggctggtgagagcccctttaagccacctcctatgttcttttgacatggctccatcagtctttgaggatttccttgctttctgggccaagaggataagatgttccaggtttagcttgcattcttcctgccctggacctggaaccaaccatttctcccaagaatcctggttccttttagtggggaatggtatccagatatgggagatggatgtactcattgctattggggtgtaacggcttctaggccctttcagtgaacagaacaaggaaattatatatgtcatgagttcatacagatatatttgattggttgaaatccaacatcactgggttctttatcttcccaattctatatttgtatctgccttcaccctcaatgaaaacccttgtcttctaaaatacacacaaaataatgtcagaatcactaaatcaatatctgtactaacaacctttctaagtaaaatttatgatttctctacagttttatttgttcttgttatatatcctaagggtctatagtcagagtattgtgttcagaagctatataaagtaattttttgtgtgttttgtattgatttactatgtaggttcattttttgtttgtattcaaatttcagttttaaaaccttttaattttacttctgaatattgtaaaacatatgatttaaaaatgaaaatcagtaacttttttattagtttctggtttattacaaaaaaataagcatatgtatttttttctgtgtgatgttatttatttattcattgatttattagttaaattagaatatgtgaaccatcttcctggttctgccaacctgtataatgtggaaattttctacactggtaccatttggtagcaatgtggccaattgtgtatttctagtttgtgtgagtccatgaagaagagaatgagctcatgtgccactttcatctccctgaactgaggaggcctatgttagagttacggttctattgttaattggcggtgtcatcttgaactaatcccattacctatctggacttgagtttttgtcagctgtaaattaggaagttggaatggacagtgagcttctcaaagaaaggactcatgtcctggtaatctcagtgctaatcacagtagtggactcaaagtaaatatgtagttttgttgaataaaggagccatctctgtgtttccatagtcatcatattatctcttccgagtaataagttactgaagagaatgatttgatctggaagagagctagtcttagaaatttttatttcgtgctttgccaccaccattcacccacaagtccccactgttttagtgtccattactaggagcccagtaaggtcacaagatcctaggaaggaaaatggacttctgcaatgtactttaaaggcttataagaaattactaagttttgcttagaagtaaaaagtcaactatggtgtggctctaattcctgggatgttgttttcaaacagagaaaaatggccgggtgcggtggctcacgcctgtaatcccagcactttgggaggccgaggtgggcagatcacctgaagccaggagttcaagaccagcctggccaatatggtgaaaccccatctctactaaaaatagaaaaattagtcgggcgtggtggtgggcatctgtaaacccagctacttgggaggctgagaatctcttgatctcttaaacccgggaggcagaggttgcagtgagccaagatcgtgccactgcactccagcctgggtgacaggaataaacaaaacaaaaccatagagaaaaatatcaaccaagtcccagtgaagaaaaattagcaggaaaatgcaataaaacaaaacagaaacactaaactgtggaagaattccacctcaaatatttacttgtattcaaatttttatccttctgtctaaatcctgccaacctacagtggtgagattaaagccctctcatgaagccttccttgctattcaaacctctgttgacctcctctgttcatacactatcaagacctgaattttatatactaaacattttgactattaattacattctgttttcagagtgctccagatgatacagatctcctgtctcacatttttcacaaatgtcctacaatccttttcacaatcttaggctcatgaaaatactttttttttttttttttttaatttatttttttattgataattcttgggtgtttctcacagagggggatttggcagggtcatgggacaatagtggagggaaggtcagcagataaacaagtgaacaaaggtctctggttttcctaggcagaggaccctgcggccttccgcagtgtttgtgtccctgattacttgagattagggattggtgatgactcttaacgagcatgctgccttcaagcatctgtttaacaaagcacatcttgcaccgcccttaatccatttaaccctgagtggacacagcacatgtttcagagagcacagggttgggggtaaggtcacagatcaacaggatcccaaggcagaggaatttttcttagtgcagaacaaaatgaaaagtctcccatgtcttctactttctacacagacacggcaaccatccgatttctcaatcttttccccacctttcccgcctttctattccacaaagctgccattgtcatcctggcccgttctcaatgagctgttgggcacacctcccagacggggtggtggccgggcagaggggctcctcacttcccagtaggggcggccgggcagaggcgcccctcacctcccggacggggcggctggccgggcaggggggctgaccccccccacctccctcccagacggggcggctggccgggcggggggctgacacccccacctccctcccggacggggcggctggccgggcagaggggctcctcacttcccagtaggggcggccgggcagaggcgcccctcacctcccggacggggcggctggccgggcaggggggctgacccccccacctccctcccggacagggcggctggccgggcggggggctgacccccccacctccctcccggacggcacggctggccaggcggggggctgacccccccacctccctcccggatggggcggctggctgggcggggggctgacccccccacctccctcccggacagcacggctggccaggcggggggctgacccccccacctccctcccggacggcacggctggccaggcggggggctgacccccccacctccctcccggatggggcggctggcctggcgggggctgaccccccccacctccctcccggacggggtggctgccgggcggagacgctcctcacttcccagatggggtggctgctgggcggagaggctcctcacttctcagacggggcagctgccgggcggaggggctcctcacttctcagacggggtggttgccaggcagagggtctcctcacttctcagacggggcggccgggcagagacgctcctcacctcccagacggggtctcggccgggcagaggcgctcctcacatcccagatggggcggcggggcagaggcgctccccacatctcagacgatgggcggccgggcagagacgctcctcacttcctagatgtgatggcggctgggaagaggcgctcctcacttcctagatgggatggcggccgggcggagatgctcctcactttccagactgggcagccaggcagaggggctcctcacatcccagacgatgggcggccaggcagagacactcctcacttcccagacggggtggcggccgggcagaggctgcaatctcggcactttgggaggccaaggcaggcggctgctccttgccctcgggccccgtggggcccgtccgctcctccagccgctgcctcccgggcggcgctcgccggcgcctttttttttttttttactgtggtaaaatatgtataacataaaatttaccacgagtgacatttagtatattcacaatgtttgcaaccatcaccatcatcttgttccagaacattttcatcatccaaaatggaagccctgtacccattagcagtcactccccaatctctcttcccccagagcctgacaaccatcagtcagctttctatctttatggatttgtgtattctggacattttacatttcatataaatgaatcatgcagtattttatcttttgtgtttggctttgacttagcagaagattttcaagtatcatgttttcaagtagcatgtatcagtacttcattcctttttactgctgaataatattctgtgtggatgtactacgttttgtttattcattagttgatggacatttggattgtttctaccttttggctattgtatgtagtgctactatgaacatttgtgtacaagtttttgtttgaatgcctgctttcaattttttagggtactaacctaggagtgaaattgtgtatatgttgtggttttttttttttttttttttgagacagagtctcgctctgtcacccaggctggagtacagtggtgccatcttggctcactgcaacctctccctcccgggttcaagtgattctcctgcctcagcctcccaagtagctgggattacaggcacgcgccaccatacccggctaatttttgtattttagtagagaccgggtttcaccatgttggtcaggctggtttcgaactcctgacctcgtgatctgcccaccttggtctcccaaagtgctgggattacaggtgtgagccaccgcgctggcatgtatatgtatttttatttccttttctttcttttttctgagacagattcttgctctgtcgtccaggatggagtgcagtggtgcgatttgggctcactgcaacctccgcctcctgggctcaagctatcctcccacctcagtgtcccragtagccaggactacaggcacatcctgccacgctcggctaattttttgtgtttttagtagagacagagtttcgccatgttgcccaggctggtctcaaactcctgggctcaagcagtccgcccgttttgccctgggaaagtgttgggattacaggcatgagccacggtgcccggccccttttctttcttaaacaaaagataatgttatagaggttttgtactttgcttttttcttgtagcaagatgtyttgaaaattaccccatattagaacatagagagcttgtttttaattatttatttctatgtagctgcatagtattccatgatagggattgcacaatgtttattcaaatggtttccttggaaggacatttagattattttgagtaatttgctattataatgccacatccaataactctgtgcatatggcgttttcctcagagaaaattcccagaagtgggattgctggctcaaagagtagctacgcataaatttttttttttttgagatggagttttgctcgttgcctaagctggagtacaatggcgcgatctcggctcattgcaacctctgcctcctgagttcaagtgattcttccgcctcagcctcctgagtagctgggattacaggtgcctgccaccacacccagctaatttttgtatttttagtagagacggggtttcaccatgttggccaggctggtctcgagctcctgtcctgagatgatccacccgccttggcctcccaaagtgctgggattacaggcgtgagccaccacgcccagcccactacacataaaattttattagctattgcctattctttataggagctgtcccattttacactctcatgaacaatgtatgaatgtctgtttctctacagccttactaacagtgttttcaagcttttgaatttttgccactctgatatgtgagaagtggcatttcagtgtggttttcatttgcatttttttttgtttgtttgtttttgagactgagtctcactttgtcacccaggcaggagtgcagtggtgcggtctcaggtcattgcaacttccgcctcctggtttcaagcgattctcctgcctcagcctcccaagtagctgggactacaggtgtgtgccaccatgcccggctaattattgtatttttagtagagatggggtttcactatgttggccaggctggtctcgaactcctgacctcgtattccgcccgcctcgtggcctcccaaagtgttgggattacagatgtgagccaccatgcccagcctcatatgcatttcttttacatatgaaattgatcatcttttcataaaacgtaactatttatatatgtttgtgtttactgcctgctttccttttgggctttttatcttttaagtttttaaaagttctttgtcagggaaattggtcctttatctgtgatacatattgcacaaattttttcttcatttttcttttaacttggttttcttttttcttggtttttctttttacaccaattctggtgtaattgaatttatcattttttttcttgcaagtggattctgagtcatagaaagattttcactggacccaaattgcaaaggaattgctttttaaaaggtttttgtaaagtttcatttttaaaaattttgatttgtgatccatttggtgtttatactggtttacttctttacaaatggctagccaacactacttaataaagtccatcttttccttagtgatatgggatgccaccttcattatatattaaatttccataagtaattgggtcttattctggactttatgttctgtttcatttggtctatttgtatgccactaccacattcttattttttttatttttttattttgagacagagtcttgctctgttgcccaggctggagcgctggagtgcaatggcatgatctcggctcactgcaacctctgcctcctgggttcaagcgattctcctgccccagcctcccgagtagctgggattacaggcatgcaccaccatgcctggctaatttttgtatttttagtagagacagggtttcagcatgttggtcaggctggtctcgaactcctgacctcgtgatctgcctgcctcggcctcccaaagtgctgggattacaggcgtgagccaccgcgcctggcctaccacattctttcaattattcattgttggcttttttttgagatcaggactattctgggatgaatcagaaagcgagagtaaaattgacggtattagaaaagtttgtaggtgatttacacatagccgtaagagaaaacatatggcaaaagttttgtttgttttttttctttttcaagacagagtcttgctctgttgccaggctggagtgcagtggcgcgatcccagctcactgcaatctcgcctccggggttcaagcgatttccctgcctcagcctctcgagtagctgggattacaggcatgtggcaaccacgcctggctaattttttgtattttagtagagatggggtttcaccatgttggccaggatggtatcgatttcctgatctcgtgatccgcccgcctcggtcttttaaagtgttgggattacaggcgtgagccaccgcacccggccagcaaaagttgttctttaatgagcagatgtctctgtgctgtttagtgttgatatgacatactgtgtatctggttgctgtttctcataaaatggaaattaggatgccaccatatcataattggtaatcccatttcttcacagttaaattttcctatcagattcagtatacagctaaagagatgatctcatgaaggctactaggctaatttcttggttcaagattagctttatctttttatttctgtggggaaaacaaacccaaattctcacttttttaaaaagctttttattcacattaacaatagcagttaagcagtcacacttatgctgatatttaactggtatttcattagtttctataaaaacatttggcccatgttttcttgaattaaactcatttaaaatattttttcctacataccttgtatagaatctcatagttttgttttgttttgttttttgagatggagtcttgctctgtcgcccaggctggagtgcagtggcgtgatcttggctcactgcaagctccaccttctgggttcacaccattctcctgcctcagcctctggagtagctgggactgcaggcgcccaccaccatgcccggctaattttttgtattttagtagggacagggtttcactgtgttagccaggatggtctcgatctcctgatctcgtgatcctcccgccttggcctcccaaagtgctgggaatacaggcatgatgtatttttaattcttaacatttttcttcccaatagagatcaagtgactaggcttttagttttccattttgatttttgctgatgcatgtttctaaataattcatattccaataggaaaagatggtaaagcacgcaataaagacaagaggaatgtaaagaagctcgcagtgacaaaaccgaacaacattaagtcaatgttcattgcttgtgctggaaagaaaactgcagatgtgagtttcatggtttccttattttttgtattttcctttgtgaggtgaatttaatatttgattatacagataacaggtgctctgtatatatttgagtaacatttttccaatttcactcactaagttggatgtagatttctaagtgaattaaggcacctcagtggttggaacttgcgaaatggaaaagagaattgaacagaaaagctgaattgagagtgtgtttaattttagtgagtagcaggaagatcatggattaagggcgaaagtagaggatgggagctatagatgtaggaatgctatatacacaggtggttgttaaaatctgtgaatgtagatgagcactcagagagtgaggaatgaagaggcaaggactaactggctaggtccttcctttcatatacatgtgtgtagttttggtgagacattttaagtgcaaggctttctcatgttacctttctttatcatttccagaaagctgtagacttgtccaaggatggtctgctaggtgacattctacaggatcttaacactgaggtaaatgaatctccaggagttgtaaaatatgcagaggacatagactgaagaaacactctagtaattatacaaaacagactattgccagaattttttctttttttttgaaacagtagcttgcactgttgcccaggctggtgtgcagtggtgcgatcttggctcgttgcaacctctgattcccaggttcctcttccctgattcctgcctcagcctcccgagtagctaggattacaggcacctgccaccacgcccggctaatattttgtatttttactagagactaggtttcactatgttggccaggctggtctcgaactccttacctcgtgatccgcctgtcttggcctcccaaagtgctgggattacaggcgtgagccactgtgcccggcctgttgacagaattttttaaaatgtaagaacgccaacaaaaaaccccccaccaaaaaacaaagaaacccccttcagattggttttatcccaccattttaggtgagtatttccagctgttagagctgtgtgattatgtagatagggatgtgtgggtgtgtgtttgaagtagtaagaatatacccaggagtcagttctgtgagtgctcactgcttgtgttcagttgctgtggtgtatgttccctaaatagattgaagcctgtcaatctgcacaatcaggtataagagccttgtcttgaattctgagtgggaatgaaggaagagtgagtgaactatccctgatagaactcaaacaggattagctgcattgtgaatttgagatttggccatttcccataaagactacgctctcatttagaagtgtacttcttttaaagtgaccattgattaaaatgacttaacaacaacaccatgtagttttatcttgacaatttttaaatgtaatattctcaaagggtcagtgaaagtatgttaaattttaagaagaaaaaatttgggagggggtagatttaatatctattttagttttcttgtgatttctatagtattgttgctatagtaaccacagtacatgacatcgatgggaggggggagggggaaagggaaagaaaagaaagctttgcttattgggcttcaatgagtgaagaagtatactttttctgtctgtggtaaaccaagcatggcagtgaatatgtcttacctttccttttagacacctcaaataactccaccacctgtaatgatactgaagaagaaaagatccattggagcttcaccgaatcctttctctgtgcacaccgccacggtaaagtgtgtagagataccttcaatcttgatttatagtattgctttaaacttattttgttgcttttctgtatgagggaaatacctttacatttgtttttgatttttgttttaaattaggactcccattcaatttatagtttcatgtatttcaaaaatagcatgtgcctgcctttttcatagtaaatttgcagtaactagtgtgtgtttattataggtattacaactgtggtaaatgcaataattttcctcccagaagcaagtatttttttgtaaacctaggtaacagtaaaataattgaagctgttacattaataatacataaaatctttttataaaagggaactgtcattatctttggtcagggtaggacagttgcatatttttagtatgtaggtctaactgactaaatatttaaaaacgtttacaggcagttccttcaggaaaaattgcttcccctgtctccagaaaggagcctccattaactcctgttcctcttaaacgtgctgaatttgctggtaagtgtgatgtcaggcagaattgcaagagtgttgagtggtttctgtcaaaaatggaggccctatgatggaggaggtagaggagattttgaaggtgttgtgatggcaagtttaaatgtgaagatttgaattcataaaaatttcagtaaaagttaaaaacacccaatttggagattaaagagaaatgcaaacatagtatagaaaagggacaggctgctattttagtgttggataagcctttgtgcgcctttgtgtgcctttgtgtgcctttgtgtcatcgcaataacacatgacaagaatgtgtgatgatrcctacaggcgatgatgtacaggtcgagagtacagaagaagagcaggagtcaggggcaatggagtttgaagatggtgactttgatgagcccatggaagttgaagaggtggacctggagcctatggctgccaaggcttgggacaaagagagtgagccagcagaggaagtgaaacaagaggcggattctgggaaagggaccgtgtcctacttgtaagagcattttatgacttttctggcaaataggaccacaatttttctgttggattttgaaaggtttttgaaaatgtgatttctgcagaggaagttttctcccggatgtctcttgttgggacattgatcaagaaggtgatagcagtttctcagtgcaagaagttcaagtggattccagtcacctcccattggtaaaaggggcagatgaggaacaagtattccacttttattggttggatgcttatgaggatcagtacaaccaaccaggtaatcatatataaggtaactatatgcctttaactcagagtaggacttttcccttaaatattttattttttgtttctttttgtgtgttttgtctttttatttaatcagtttatttctgttttttttttctttatccttaaatacttgagtcactgtaattagctcaggtcaggccctgccctcacttaacatgtattgtaagagagcgacactcattcattgtaaagtgaatgcgccaccctgatggagaagagctatggtgcgaataatccttaaagatgcttattccaaaaatcagttacatatggttttggaatgtgtgtttgtagttcactattgatgtgtctgaagttacaggaatgcactttaatttaaagggaatcagtcattaatttgtctgtttcttcagcaaatttgaatgcctattgtgtgctaggcactgagatgggatgaataagctggacaaattcgtgcactataatggagcttatgttctaggagggtggcagtgggtgggggcacattagcagtaaatgagataaattgataaatgatgtaaagaaaattagttgggcgatggccaggggaggcctgtctgaggaaatgaccactgggctgagatttgaggtatttgcagagctggtgaaagggcatttcagcttaacgagccaagtactagcaaaggcctagagagaggaaggaggaggcctgtgtggttgtagcatagtaatcaagtgacaagattggtataaaatgaagctggagataaagacaaaggccagataatgtaggactttgaaagcctcgttaaggagtttgaatcttctaagagcaatggggtggcattggagggttttaagtacagggggtggtggtcacgtaattgggtttacattttaacaggaacagtggtttgtgtagagaataagcactgtggtgcatgtgtgcgtgtgcacacacacgtggagggatgggctggtgtagggtaatggggaagtgtggaagccctggagatcagtcaatccagggcagggctgctagttacttggaccctggtggctggagaggagagaagtaaaggcatttgacatgtcttttgacacaaacttgttaatggattggatgggggaggtgacagaaaggaggaatcaaggatgatttctaggtcatcttaatgagctaatactgtgaattcttgactcacaaaaagcccggaggctgttcggtattcttttgtgcctctttgagcccgtcttcattgtgggactgtgcattgcaagatctgtcagattaatgttaaatacagtatgcactcttaaacagagttgtctttatttagatcctttttggatctgtggtacatgcaaatagtgtatttttcaaagcggtttcctggaggctgtatctagtgaaaagagagggagtacctagatgtcagcaaagcaagcgtgtgagtaaattgaaggccacatttaccttaaagataaccaggcattgactttaattggaaaaatgttaatgatctctggcaggggtgggggcggtcagaagcattaatatgcttcagcttatcaaatatatataaactcttgagccacttgagtagcacactgccatgtgttagtttcttaggaaaagatataatcaattttagaaatgatatcttaatttactttagctaggacaaaatgatttgattataccccctcacctctttgactattttgttactctgctggaagtctggcaagtatgattacatgaggctaagcagatgatttcccatccattgctgaaacccagggctgccccattgtacaacctcagggaataccattttcacgtgactttcctggagcacagcagtgtgactggtgctccctggagctgggcagcacactggcctggctatcccagtattactccccgtactttgctgcatctgctcaatgctgcatttcattccctatcttggttaatggtcccatcaaaaccagaaacctgggagccatccttgattccctccttttcctcactttcctttccaagtctggttagttttctctgccgaaagtggacaacttaccttctctttttcctcatatctaccaccctgatcccttcttgcccactgaaacaattgcaccagcctcctaattgatctcttagctatcgtcttccacatcactgctagagggactgatcagaagggcaattctgaccatgtcagtcgtcattaaaaaaaaaaaatcctcagtggctactgcctacaacataaagtccaaactgcttagcaaggcttctgatgcctgctgtctatgaattttgttccctagaaataattctctgtatgtacttttctgctctttatacctgtgttcctttactccttgttttttgtctgattggaatgtgctcatctgactcattctttaaaattcagcccagatgttatctcctgggagtgtacctaaacctccagacgggtctaggagccctttctccttgtgactacatcatagcctttcccactgtagcgtttgtcctattattttgaaatgaactgagtctgtgtttttctttgccacaaagcctgtaagctcctggagggctgggatcttttatttccagcatccagcagcaatgccttgcacatagtasgtgtttaataaatagttgttgaaataaactgcacagtgactgacagtcctgtagatgcaggtgaaaaatttcagagactagtgttgcatttgctactattcctgagtttgcatcttaatgccttgtagctttgtggggtatgagaatgcgtaacacaaaagcaaatggttccccactcccccacaaccccacaaagtaaatacatccataaggcttcatattgccagcgtcagttgccaaggattagaaccttaagaagcaacaaccttctttctttcttatttgaaaatgagttggttatttctacatttcgtttactggytgatactcttagtaaacagagcattgttttgcagggtaaggatctagagctgcattgtccactgtggtagccaccagccacttgtagctctttacatttaaattaattaaaatgcaatacaaattaaaatttattttcttggtcactagccacatttcaggtgttcaatagcaactgtggctagtagctaccatattggatggctcagaaacaacaattccatcatcacagaaatttatttcaactagtgctggtctgtagtgacaagtgttggaagattgaagcattgaagcacagttatatttgcaaagcaaccagtttatgatatatgatggtgttgaattcctggtactgaccatagtcatggataggctttttcaaccaatattggaaaatattttgcaattgaaagagatactaatttgttattgatctgtcatccaaatgctaaggcagaatgaaatttctggtgctggagaaggcctcagagatcatctagtctagttatgcacttaagaaactgaggctctgaaagatayaatagctctttagtggtagaagcttgggcttctcaccctcagtccactctgctgttctggttccgtggtacttctcaagttgtgttctctcctatggcacatcttctctgttattgatgccaacgggttaaataagatagcttaaaaaaactcctttaatctcagagtgttgaacactttcattgtgatagcaggtaatgatcactgagctttggtgaaatcaatgctgctaataaaaatgaagtactccaaaagaccctgttattgtttctcactttctaacagattctaagtaagtcagttgttgctgaatgctccataattatgaaaagaatcttactctttgcatatgggaagatatcctgtcttcattatgactttttcaaggttgaataatcctgactgcacctggtttcagctagtaactttggggggaatgtgatctttgtttaccatgatctttgttgtgtcaaatgaggcataaacagtgtcaaatgtgttgcatgaagtgtgatattagtttgacagtaaaatgagcttatttgaatctttgaatccaatattagggtctttatttttctttgcatagcattttgtttttccatctttaactgttgtgaggatgacttttaattttctgagttactgtgattttttttctttcttaatcttcccatagtccttccttccctctccctccccatccaccctccgttaccccctcaagctgaaagtctcacaactcttgtaagaattttaatcatctgcagaaatgaaaattcttagatcgtcttatttctaccaggatgtgtgaaaaaaggagtcactgatgagtagtctttcaaactggggtaattgaccttgtgaacagtagcctttgcatgtaccagaattttcttagtgtctcagataagtggctgtgttgagtggctttgttgattactgctgtctaattattcatggagcccaggattttgcacagtgaccatctcctgggttgactaacaaatgtttgcagtctgttcttcgtggccaattttcataaacaatgatttgatgtctaaaaaggtgtggttttactttatggtattcattacttaaattactgaaatagaatagaaaggaacattataaacacttacctagttagatgtcctaagtagctgtgaggtagaaaaggtgaaatagaagataatagtagtccctattgtgaggtatttattattatatggaataagaaataagaagtaaattatgttttttgtaaacacagttttacatatagaaaaacactgatgcactagttatcctgatacatgaatattggtttttataggtaaatacaagcgctaaaaaattagaattatattctcagatctgtaatctcacaagaggcttaattatgagatttgttggaaaatactttccttatgtttgtttctcttttttttttcttgagacagggttttgctgtgttgaccaggctggtctcaaactcctgagctcaagcgatctgcccacctcggccttccgaagtgctgggatcacaggcatgagccactgtgctcggcctgttttgtttctcttaatctgtataatcctggttgtggggaaagtgtttatgcaagttagagaatcattctgtcccctgtcctcccagtggtcatacactgtatcattgtgttagtgtagtatggcatcagtactgagtaaagaactggtcttggggagtgggaaatggatatatttgctgtcaaaatgagttatcatgaaggtataaatgtgtggacacattcagtgagcctctatattgttcctttaattaggtgaaattgaaatgtttcttttctcgtgattttcacttattctttcaggtgtggtatttctgtttgggaaagtttggattgaatcagccgagacccatgtgagctgttgtgtcatggtgaaaaatatygagcgaacgctttacttccttccccgtgaaatggtaaacattagtgattagcttttagttctcagtcgttgtatctgccacacattctgtgttttgcagccagctctctctctttcaatagggctacaaattctctacaatcctgatgcttctttcttgctgcttgcctggtgaccactgattgtcagcaattctattagaggttgggaaaagtagaaaaaataaagtagaactcagtttttcaactagttagagtataaaagtttctgagatttagtatataatgctttctttctctcactcctcatttccataataatcagggttggaactataagtctctaaaatgtgacatggcatttggcccagttttcatggttttgctgcataggcagcagtgatattccctccattgccatttattaacaagttcaattctatttgcttctttttttttctttattgagacggagcctagccctgttgcccaggctggagtgcaatggcacaatctcggctcactgcaacctccgccttctgggttcaaacagttttcctgcctcagcctcccgagtagctgggattacaggcgcctgccaccacactgagctaatttttgtatttttagtagatacagggtttcaccatgttgatcaggctggtctcaaactcctgaccttgtgatctgcccgccttggcctcccaaagtgctgggattacaggcatgagccactgcgctcagtctgcttctccttttttattgggacttaacatccccatttccctctcagcccctccctatatcagttgaactgtggagtctcttggtcaggatttacaacacttattcttccattttgtagacttgatcatctttatcgctgatttgttttttatgatgccattgggaggaattgggcatttggtttagtacattttttgggtctgtttgtatctttgaacttatctgtaagactgctattaaatgtttaaatgggtgaggatgaaaattgatatagacttggatttttggtggttgagaagatcatttatgtacagatacttttttttcccctctgtccccttctctgggataacagaaaattgatctaaatacggggaaagaaacaggaactccaatttcaatgaaggatgtttatgaggaatttgatgagaaaatagcaacaaaatataaaattatgaagttcaagtctaaggtttgtatttggcgatgatttttttccagctctgtttgttgtttattttctgatttagcaaatagttattgcatattttctttgtgtaaaatgccttctgtgcagctataatttattgaatggaaatttcataggtatgaatgtaaaaacagtatattagatttgcaaaaatattttttctttctctttaaactgcttataaaataatgtttattaatttgaatagaaagacaatccatagcaaattaattgcctctggtgcttgcaacatgtcttgtgctctcattcccaagtgcagaagaaactgctctgatctcgtttatattagttgttgccaagatgttttggttagaaagttaagtaaggttttatttttaaaagtcagggactatgatacagtctgatagaatgaaaatctctggttcatgtgctagttatgatacattgtcttgmttttagtgagatattgatgtctttggccataatcgtgggggctatagcctgctcaaaatactggctattaataatgatcgcaggaaggattgagttgctgaagataaggctaacagtattaactatttgagttttgaattgccgctgatgagtcaagtctttataattctagaagcaattgtgatatactggtgaagagcttaggtgctgaggccggactgcttgtggtttaagtcctagccctattacttactagcatgtaacttggacaagtgctgaatgactactttttttttttttttttttttgagatggagtcttgctctgttgtccaggttggagtgcagtggtgcgatcttggctcactgcaacctccacctcctgggtttaagcaattctcctgcctcagcctcctgagtagctgggattacaggcacccgccacaatgcccagctaattttttttgtatttttagtagagctggagtttcaccatgttggccaggctggtcttgaactccagacctcaagtgatccgcccgcctcggcctcccaaagtgctgggataacaggcgtgagccaccgtgcccagccgaatgacttctttatgcctgtttcttcatctgagaaatagggccctatttcaagagttgccggaagggttaaatccattaattcatattagatgatgagagcagtccttgccagatagccaacactcagtaaatataagctataattataatgctaattattaatctagcaagatggagttgcttaatatcaaatagtagcaaatcatttaatgcattaacattgtaaaaaattttaaawttttattgcccctcttgcatgcaaatatttctgagttctgtagtgtccaagatgagtccttttagcattttgacactggttgttttagttccaattgaaagaggaaagggtacctttttggcttcatttacctttgtgttccataaggattcttgatgattaaatacaagagcatgtattgtaatactggttagtttgtgaagtttttgtcttaaggattttttaaaatatctacttacccagccagtggaaaagaactatgcttttgagatacctgatgttccagaaaaatctgagtacttggaagttaaatactcggtaagtcaaacaaagaaaattactgggttttgcttgagaatgacatttttctgtttttgaactttcaactgactttcagttacgagtattggcagggcttctcaagcccacagttcattgaggtggatttatagtaatgaataattgaaatggataaaattaatttaagtatatagactacaggttacactgcctttctctgcttttgagtatgcatctttaaataaataagttgaaacagcacgactgtttgtcaagtggaatgaatgccacatgatggagttggacatcattagtctgctgaagtgtcccttatgagcagtggaaaggtgagagaggagtgtcagtagcattgctatagtgctgctcttgctcctgtgacaggcaaggtcattgctataggatgttaattaactggaccttaacctctttttacctctgttctagtgttttgttcccacaacgttggaaaaggaaaacttttaagaactatttctgacagtggtgatgaaaagtattttcaatgagttccactctgttgctttcattcttctaatggagtggtacttacttggctattctttatcagtaaagcatgtacagctctggacagaaattttcttttgggggagcttcttggcctatttttcttctaatgggtgtcatcaagatgcattattttgtcattgtgaattggttttgtttcctactgtgaattgttttggatttcatttgtggcaaattacatttcatatatatcaaaggggttttcttctgtgcttcatagagaggcttttgtttatttcaaatatagactttggaaaatgcaaagtaatagttttaaacaaaaagattctttttttttttcctttttcaggctgaaatgccacagcttcctcaagatttgaaaggagaaactttttctcatgtatttgggaccaacacatctagcctggaactgttcttgatgaacagaaagatcaaaggaccttgttggcttgaagtaaaaagtccacgtaaggaaaaatacatgctcagaatgctgaatagattgctgatagatgtggtttttaaaagggaagttaggaaattgatctatttattttaatgtgtctacttccttttctgtttgtttcttcagttttcgttgagtgagtatagggagtacatttggaatcaccttatctcggtaatgcctggcggtttagtctgagggaggccttagtttggggtgcatccctcattatgctgttattcatatgtacttctgacctggctgatgtggcccagctgttgtgcatagtgaactgctgacctttgaaggagaggagaatcactattcaatatggatagtgcatgtttttcctgttacctgatgtttttcagtaattgcttctatgatagtctgctttgtcttaaaaatgtttcatgattcctccaaggcagtgtttcagtttttttaaaacctattttgggtcctggatgctttggagaatctgatgaaagctatagacctctttcccaggaaaatgaacatatgtacacacacgtgaggatttgcatacaacccaataatgtggcttatttttagttagatgttacaatatgtcattcttattagaaggcagggttgaagaatatgccagttaatgacagatgtcttaattatagtagtttttctttttcagtaaatagctattgatctgttgtatctrttctctttcagagctcttgaatcagccagtcagttggtgtaaagttgaggcaatggctttgaaaccagacctggtgaatgtaattaaggatgtcagtccaccaccgcttgtcgtgatggctttcagcatgaagacaatgcagaatgcaaagaaccatcaaaatgaggtttaaaaaataggacagattttgtacccatgccttagatgtgttacttgcctgaacttgcacagctttgctttaagagaaagttgttctttttggaggggaaagaatactaattcactactaaactcttatagagaatgaattgaatttgtctagtgttggagttttttcttaaagacttaaattgctgaacttatttttatttttgtctattaaattttttacttaggagagcttcaaatggacacagacagaataataaaatgaactccccataccaatcactcatattcagcagttagcaagattttgttacacttgtttatttccctcctttttttcttcttgaagtattttaaagctagtctcagacattgtgtcattttccctgtgaaccttggtatgcttctctcaaaatgtggtatttcttatataataccattagcacacctaataacattaacagtgactccttggtataatctaaaatacccagtccatacttacatgactctgtctctcaagatgccttttaaaactcagtttgtttgaatcaggattcacacaagattcgcagatggtatttaatctatgtgcctcttgaatctcttttaaacaggaagaactcactcctactctccagtttttttaatgacattgaataattaaagaatcattgttggttgtcttgtagaatatcccgttttctctatttatttgctttgttgtggtgtcattggacttttcctctataccaggggttggcaggcaatcaattgtctgtgagccaaatccagcctgctacctatttgtgcaagtcaaatttcactggaagacagcatgtttacagctgcttttgcactatgacagcagaattgagtagtaacggtgaccatatttaggcctgcaaagcctaaaatatttactgtctggctcttgaaagaaaaagtgtgctgaccctgccttatccttcatatttccgcatactataagtgagctctaaaggatcaaattagattcaggttcaacttttttagccaaaatgctttataggtgatgcagtgtacttcatattgcatcatatcagaagacacamtgtctggttaagctgctattagttgacaaaggctgggatcagtggaaaaaaataacctgctattagtgagtctgtgtctgattagcagttgaatgaatgataactattgtaattctccatcagtttttcatctaaggttttttaactttgacactacaggtattttgggccggataatgcttttgtggggtactgtcctgggcattgtaggatgtttaacagcatccctggtctttactttctagatgccagtagcatccgtcccctctagttgtgacaaccaaaaaatgcctacaaacacatcatcagatgtccccgggtcaggggatgtgtatgtgtgtataaaattacccccagttgagaaccactgagctaatggcttcatttattagtcatttttgccggaattagttaatttcattagaagtcgtaaaatggtgattttttaaaaattctgtccatggtttttaaatttttctataaaattaaatttttttctttagccagtattatttggttatgccataatggtttacacaggaaagacaggataaatgcttacttccttctctttaattgccagttgtcctagtaggaagttgggacctatattacatgcagtcgtgactgatgctttatttatttatttatttttgttgttatgttttaacttcctaagtccttttgacattgatagggatcttttttaacagcattttgtcagtgttttcagtattttctgatttttttttttagtatgtgttttgatctttttttctttcttttttttgagacagagtcttactctgttgcccaggctagagtgcagtgacatagtctcagcttactgtggcctctgcctcccaggttccagtgattctcctgcctcagcctcccgagtaactgggattacaggtgcgggccactacacatggttaatttttagcagaggcggggtttcaccatgttgcccaggctggtcttgaacccctgacctcaagtgatctgcccaccccagcctcccaaagtgctggaattacaggcgtgagccactgcacccggcgtgatcttttaataatagttaatactgtagatggccatagttcatagttaagtgtttgggagaagtttaattagtagttaaaattttaagaaagtatccacctctagtgtccagaatgaggtttccacattccattttcttttctttttttttctttttttgagatggagtcttgctctgttgcctaggctggagtggagtacagtgatgcgatctccgctcactgcaacctctgtctcccgggttcaagtgattctcctgcctcagcctcctgagtaactggaattacaggtgtgcgtcaccacatgcccagctaatttttatatttttagtagagacggagtttccccatgttggccaggctagtcccaaactcctgaccttaagtgatccgcccaccttggcctcccaaagtgctgggattacaggcgtgagctaccatgcccaaccccattttctaataaaaggaaattgggcgctctggagtaatggcagattcagggaaggaaatgtccaggataagtctggaacatcttattataccagaaagcaacgacagtattaaaatctactgaagatatgtcaaaaggactcaggaatcaacttgaagagtcttctactgaacaaagatgggacaatgtgagggtaagaataagttgaacagattgcaacacatcagatccatgagttcataatgatattgtctgcaatgacaccacatcgatcacttctgaaggaagctggggaaccaactcattattttgaaaactgataaagggattgaatgaaggtttttgacttttctgaacacatgctatacctcaggcaaccaaataattgatgaggggaagtttctcttcatagacggtttccagctaataaatgaaagataaatggaatagtaccactttgtaattgccggtgaaataatggatctaggaagtgatcaccagtgggtacttatatctctaaggtagagatgagcagacattatgtgcctgtgcctttggatagaagtaatcagcrcctctaaagtattcttgccccagaattgaacctgattttgatcaagcttttagacctaactatgaatttatagacagtatggagacagaaaaacaagttaagtgacactgttgggacacaagtagtagaatccatactatggggcactctctaggacaaacagcctagtttctttagcaagtaaattataggggaatgacagatgggatagggttgtacctgtagttttacatatcagccattacaaagtatggtccttgtgtggtaaataaaattgagataattggaaaatatgaaaatttaaattctgcctggataattaatgattttaagaaattactattcatgtaattgtattaggtgagataattgtattgtgattatatttttcaaacttcttatctttcagagtggtggtggttgtcagctgggtgagattttgcctctaaggggacatttaacaatgtctggagacatttttggttgtcacaactcagggggtctgggaatggtaatactggcaactagtagggagatgctggggatgctgctaacatcatacagagcacaggacagcccccacaacaaagaattatttggcccaaggtgttaatagctccrtgattgagaaacccagttttagagattgatgctgaaatcttcccagataaaatgatgggtttgggttttgcttcaaaataatctagagagaggaaggaagtaggtagggttatagatgagttgataattgaaactggatgatggctatacaggagttaattttattttgtctatttttaatgtgtttacatatttttataataaaaagtttaaagtatttattatttttcgagacagagtctcactctgtcacccatgctggagcgcagtggtgcgatctcagttcactacaacctctgcctcttgggttcaagtgattctcctgcctcagtctcccgagtagctgggattacaggtgcacgccaccatgcccagctaagtactgtatttttagtagagacggggttttaccatgttggccaggctcgtctcgaactcctgacctcaagtggtccacccgcctcagcctctcagagtgctggaattacaggcatgagccaccacgcctggccaaacttttcatatgtgtttaaatgtgtatctttaaatattcttggtgattttggtgagaatgcagaatgtatagtagcggtctggtaagtgggttttttcctcctttctttgcagattattgctatggcagctttggtccatcacagttttgcattggataaagcagccccaaagcctccctttcagtcacacttctgtggtatgtatttttttttaagctggcttactaacagcttgatttgaatttccttattttttctccagctattggatcagtaacttgtttttcaaaaattgttttcaagaatagtgcatattgttaaagagggttttgtttttttttgttttttttttttttgccatggaaactaagttttattgggttggttgcctcctattcagctggttcatttttttttttctaggagaagtctggagtctatttgacatcttttttttgtttcaatggttgctctactgaggttgagtagttttttcctgggtcaaaattagactttattttctgatgtcattctaatagcctatcatagaagcttgatcaaagttttctgtgtgatgaggcaagatgccaaggaataaatatttacctatttgggaggagttatagtaataagaattggagttgggttgtgctatgcataaaattcaatggatgaaacaattccaccaagttctgcatatgtgttttatgagtcagtctccaaggaggattctgatatattccatgttgagagcttggccagttacctaagcattttgctgttttttaaaaaagggaataataccattgacctattatatttcctgggatctttttcagcccagaagcagagattaacttggcgagcctctcgtctggttttcttgggtgttaggaaagtaggactaaaacatgcagagaagggagtatgagatatgattgttgtgaagttttcccccttaagtgggtggaacacatggaacaaaatggtgatgagaatagcctggaaaatatgtagaagagagcaatcatgagttcatttcaacacgcatttattcacttcctctatgtacgtcactatgtgaacagctgttgtgtatggtaaggaacttacagtgtgtaataggggaagctttggtcaattttaccttttsagaaggctgaactgagtttctccgctgtatgttgcttgcggcattggtggtggtgggatttcctttgaggaagactgctaaaatcttccattctggcttcagtggatagatagcaaatgtttcatcaaagcagttttaacaactgcagggacttagggttctgtgcttgaccattcttttgaggtcatcaacatgaccagtggaagtatttgatgaccctcctaattctttagggttggggggaatatatttaagacagtttcgtttggaaacatgtactatatgattacctgaaattagactaagatgggtgttggaatctttattttttttcctttttacagttgtgtctaaaccaaaggactgtatttttccatatgctttcaaagaagtcattgagaaaaaggtaaagtgctcattatatgaagcacctgtttgtttggagcgagaaagaaaaggggggtggtatggactagtagaaaaaaggtgttttatattttattagattcattcctgccagattggactatgacatcgacccattaaaatgtattagacatacacctagaagcattatttaacaatgtttaaatgttttactacctgaaaataatgggattctgtactgtattggtggttggataggctcaaacccccctccaatagcttaattagaagcttctctaaaatgcatgatcatatgattcctgttttgggaaggtgttgggtagagtccctccccagcttgagggaagctaaatgaagttgggaatactgtggacgttaaagagccatgtattgacaaagttgacatggggttggccaaaatggatcagtgatctctaaattccagcgtgctccatgaagaagttttcatgggtccttaataaaatggggaggagtgggaagtagtataatgtagtgaatttttcacaaaggtaaatgtattcaattaaaagaattttcttttatggattgtatgttgtttcttttacgaagtgatgatattgatacgtttttaggtttgttttgttttttaatgtcttcatctgacaaaagtaagcaaccttgtcaggttctacttattttatttaattggcttgagaagtccagtagttgggaggtactgttagattaggctattatttgtgaagtgccgtgaattacctaaccaggtaaaatgacctaggaaaattccattagagtcaaaccgactttttttttgagacggagtcccgctttgttgcccaggctggagtgcattggcgtgatattggctcactgcagcctccactccctagttcaagggattctcgtgcctcagcctcctgagtatctgggattacaggctcgtggcaccacgcccagctaatttttgtatttttagtagagacagggtttcaccatattgaccaggatggtctcaagctcctgacctcaagtgattcacccgcctcagcctcccaaagtgctgggattacaggtgtgagccactgcgcccagccacttataattcttaaatatgtttgtttttagtctagtttcttatttatcagttctcatcttaccatttgggattattttatacaatccttgggatttctttgcccagtaaatacataaacagtgaagtctaccagggattatataggaaagtaatgtttttgataggtactctgattcatatgctctaaatgtgtccagatgcacaagcatgtccctgtggagggacatttctatattttatgttgctcagcacttaaaatattttgctttattcacatgcttattactagaatgagctcctcagagactttgaaattattactatgaaacctacaatcaggaatttcattgctacatttagttttgaaatggatggtttcttttaaccctaagaaatcttaccatagttgaacaagaagccaagatacagtacttgcggacagtaaagagtcgtcagtgactggtgtgtttttatctaacagaatgtgaaggttgaggttgctgcaacagaaagaacactgctaggttttttccttgcaaaagttcacaaaattgatcctgatatcattgtggtgagtagatgtttgatcatgttgtggggaagctcttcatttcttagttcttttcagtgtgactttattggtgcttttgagcagcaaataatcttttcagagtaaaatgatcctgtggactggtgggaattgctgctaataggagaaaaaaatagcaagcccactgcaagatagtttttttttttctctagtataaaagcaacctatgacttagtgttgaagttaaggattgtctggctatttatgcttagagaccagcacataaataagtaaacatgtacaaatggagttatcgccaaaatattgacttagtagttgtatagtggtcacaggagtttattaattcccttggtttggtgcaaatcacaaaactaagtattttaattttatgagttcagtggatctctatgacatattcctttgaaaactcagggctcggaattgatttttctcttgacgatccagtatatccccactagatagcttgagctaataattcattgagctattttttgccccaattcctgagagtcataaggcaacattttgttttatatatcctctggcctttctagtttgtagaatatggaattccttcatttgtcttttttctaggttaatggatcaatcatattgtttttgttttttcagaggaatgtaggctataaatgcctatattttggatgtgatatgggtaatttgggtacattaaagtcttgcaaaagtgtttgccgtattcttccctacattcatttttactcttggataccttatctggcaactgtatagctagcatcctgagttcctgtggataggaagcgatatctctgcacccacttcccttatgatatttcaagacctatctttaaagttccaaaaagattctgtccacagtgttggactgtgacattctgtctcagcaccaggccctcagtcagcctccaataacaacagtttcttggaccccaaggagatgccatgaagcctgggaaacctggcctggcttcaggtgttagagccaagtctatgcgtgagaaatctagatgtaagatggaattctgacatgaatatgggtccctgattctaggtattataatttgtaagtgagacttcctcaaggcctttgggtcttctaatttaataagcaaaactgctataaatatctagtggtaaaatacatataaaattaactatgttgaccattttatagtatacagttcagtggtattaactacactcataatgttatacaaccatcaccacgatccatctctgtaactcttttcattttgtaaaactgaaacgctgtactcattaacttcccattccccggcccctggcaaccaccattctgctttttgtttctatgattttgactactctaagtagtggtatatatttttaattaagtttaataacaagtatatttattgatgtgaattattttaaacttcatctaatttttgataaacataggaaagtgaatcatgttcacgtgttggaaattacggaaatgaaaaatctagttgcatttttgagataatttctactctatatagttttgtttctttgtttttaacaagtttcttatttgaactatttagtggtattatatatttatcttgttgcrtatcaattatgagtctaaatcagtagtgtttgaactcaatttttaaaaagaagctaaatgcagttcctgagttttcgaagaagtcttacataaactgtcatacaacaccaggcaggttctgtgtttttaaggaagcaaaatggaattatttgaatttagcttttaccgatcatatgaaaagtatgggacattaaatttgcattttcctccgagaccgtaaggcatgagctgcaaattaaaagatatcatatgagccttgcatcaattaggatgaaataaagtttattccagcaatctgcttagcagccttgttaatgtcaaggctaatgagtgctgctgatgaataaattcctgaagaagaaaggacccccaatcggaggtaagtgcatgatgtcttcaattagagactagaaaaagaaagggcaaagaaattctgtgcgtatgaagataaatcctctaatttgcatttgttataacattatcagctgccttctttttctgactagggtcataatatttatgggtttgaactggaagtactactgcagagaattaatgtgtgcaaagctcctcactggtccaagataggtcgactgaagcgatccaacatgccaaagcttggggtaataataattttcaaaatcttatttatctatttattttaatttgggatagctaccaaggaacacactatactttttaaaacaggaattggttatcttgttatgggaacttcagtacattttaactttggcactaaacatcttttcctttgaattcagcattttatttgtaaaagcctctggtagttttggccgggcgcggtggctcaagcctgtaatcccagcactttgggaggccgaggcgggtggatcatgaggtcaggagatcgggaccatcctggctaacaaggtgaaaccccgtctctactaaaaatacaaaaaattagccgggcgcggtggcgggcgcctgtagtcccagctactggggaggctgaggcaggagaatggcgtgaacccgggaagcggagcttgcagtgagccgagattgcgccactgcagtccgcagtccggcctgggcgacagagcgagactccgtctcaaaaaaaaaaaaaaaaaaaaaaaaaaagcctctggtagtttttaaaatcattggttagaatctagggatagtgaacaaagacagcccatacatgttaccttcactttgtcattcctgaagtgatagcccttagggcaaggttgcatggttcagaaatcgttgagtgctatcatttaggaagaaaatgggaagaatgaatggaagggagttgatgttggttgtataagaacgcaatattgcttgctgatatcttgtaataaaaaaaaaaggaaaaaagaaggcaataaactaagtgctttctgtgttagttacctctcatgacaactccagttttattttatagacagtctcataggggtaacgtaacttgttctggatcatgtaagtagtaaggggaagaactgagatttgaacccaggcctgggtgactcttaaagccaatgtgtacttttcattctgcctgcttgcttcatgtatggaggttttggcagtttttgtatgaagcaccttcttcctaaacctgatactgctcagtgcttgaaatcttattttacttaaagcttataaataaaatggacatgttgcctcatcagataagttaggaatctgtacctttttcgtaatgttctctagaggattctgccactacagatcaaagttggggccactgctcttgcttcttttcttattcatatctttaaggtggtagagttgttattagcacttcatctgaacacttgcttagctttttacccccttcaagattttctttatgtggcatcttctcagtgaggtataccccattaccctatttaagatggcagtccccccgtattccttgtacccctcaccctgctgttttcccattttccatccacttgttacctcctaaaactatataatttcttgtttatgatgtctgttttttattatacatttcaaatgaggccaggaatcctttctgttttgatcactgctgtatcctgagtgcctagaataatgtcagatacatagtaaatgttcaaaaatatttgattgatgtatggaagaatgagagttttatcataattttgggccagcttcaaaataggttagaaagaaatgttctcagtgtctgctctttcatgaagtttgctttttgttcccatcttgtagggccggagtggatttggtgaaagaaatgctacctgtggtcgaatgatctgtgatgtggaaatttcagcaaaggaattgattcgttgtaaaagctaccatctgtctgaacttgttcagcagattctaaaaactgaaagggttgtaatcccaatggaaaatatacaaaatatgtacaggtatgatcctagattcttcagaattcatctgtcttgaaattaacaacagcaggacactactagtactatccttagtctggagggacatgagccagtggtgttgtagaggggaaattgtctctactactttcataatttgaactagtttacctcttgaattattgtaattgatcagtttatctccgtctccctcacctgtgttaacactatcttgatgtttcctaacagtagtttggatttagatttctactcttaattcatttattcaggaattagggtagatattttagaaatataaaaactgagcaatcattaagttagaggtattgcttgcttatttcttcctcctactcctctggccatctctcattcattcctgctagttcttcctgagttctttcttggacttctcttttctgactttgttctttctctaggtgatctcattgagtcttaggaatttaaataccatgggatggctatgcttcccacctgtgtatcttcaggttagacctccctaaattccacactcagtgtatctgttttacctattttacttgatatctaatgtgaactcccagcttgttcaaaattgagctctgatcttctatcctaggttcttcctatagtctttccttactaaattaataggtgtattttttccattatcactggaaacttccagagtcttacttagccccacatgtctgaggcatctttaattcctctctctgatatcccacagtagatgcatcagggtatcctatcagttctatcttctaaatagatctaagtctgaccacttcttttcaactgcattggacccatcctatccaagctgctatcctctttcccctggattactgggtttatatgcctatccccttacttttgcccttacccccttgtggtcgattctcaatccagaatcagagttatcctgctaaaatcaagtcagatgtgatactctgctcagaaccttccagtgactctctgtttcattcagagtaaaaactaaagtccttatttttacttacaaggtcctttacaatgtgtctctatgtcgttaactctgtccttatctcgtactgctctttccatcattctctctgatctagccatattggcctctttcctagtcctggamctgtcagatttgcacgcagctcaggacttttgaatgtgctatcctgtctgcctggaatgctctttccataaggcttgctccctcacctcttcaagatcttcattctcagtaaaatcttccactgtttcctaacaaaaatttcagtctctgcttctgatacttaatattcccgttgcttaacttttaacattatataacatactatatacttaatttctttgtttttttttatactctgtctcccccgtgaggacataagctccaggaggataggaagttttgtttgttttggtcacagccaatgcctggcatatagtaagcatgcaatacatactcactggatggaatgaatgaaaggatttaggtagttttcaggcttgtagttattatattacttcagtttttccttatgggattttgtgtgtgtgtgtgtgtgtgtgtgtgtgtgtgcgcgcgtgtgtgtgtgtgtgtgttttggagaaaagcattgggatcagtggtatgaatgaattcctagttacatactgaccttattttaaattgtttctgaagccaaggtgctgttgctctgaatttacttacacccagaattccttataatattttgtgaagttctgattataggcattgtttcttttaattacttgattctgtttcattcttacttttctgtacagtgaatcttctcaactgttatacctgttggaacacacctggaaagatgccaagttcattttgcagatcatgtgtgagctaaatgttcttccattagcattgcagatcactaacatcgctgggaacattatggtaaatttaacttagaaagggggaaaaagcatttcctgttggattcagtgtttgcttggggtagttgttatatgataatgagtctaaatgcatgcttataaaatgagtaacttggattctgaaagctggatttcttttgtaaaaggaagaactggttgggagaaggggaggaatgccaggtgcagcgtgttgaaatttgggtgaacatacggatcatctctctaacatctggatgtgtctttttagtggaatggtccatttgggagtaaataaatagccaagttgtcaatattttaagctctctttgtctcctttagctataatgcttaaagaaaacgttaggaataatttagtaccttttttttttttaaaaaaaaagcagaccgttattaggaatagttttgaaggaggtgctgtgactaaacttactgactcaaagttgcttttgttagttgtggttttgagctcaaatttaaaaaataaattccatttaatagtccaggacgctgatgggtggacgatccgagcgtaacgagttcttgttgcttcatgcattttacgaaaacaactatattgtgcctgacaagcagattttcagaaagcctcagcaaaaactggtgggtccaaaactgtgtagtattttgttttctcttaaccccccccccccttttaatacctagatagccttttttttctgtgataacatctgctttcaaaatagctaatcccttgtgtactaaagaaaccgtgtcaagtttattcccttgtttttgtgtggtcatttccttttccactttgtaaaaggaaaatgcactttgtgcagacaaaattatttgtgaaatgtgaaattctttgagggaagcattagacctctctgatgggtgaccatacatggaatgtgttctggcacctcagccctatccaaagataaatgccagttaaactttttattttcttaaacctatgagcctttatttttgtgttgcatttttctgtactagtatgaccaaggtcacccacagtcaggtttctgaagtagcctccatcactttggaactaaaacttagtttagctactgttttattagcactgatattaattaattcagaaatgggaattgaatgttagaatttgattcaggttctcatatttgcttgttttttaatgtacattatcaaaattggtatagggcatattcatttagaggactttaacttctgctgaggtattgaatgttggccagtaataaactacttaggaatggattttcagtatatggatgtacttgttttatggtgtccatattaataatagggataatgataatacctgcatgaagtattttatgtttttacatcacgaatgttagagtagtgattttaagagggctgttttataatctcaaattttatataacatgaaaagtggtatttttcaatattcattgatttaaaaatatgaaattctgtaaattcaaaaacacataaaaatagaattttcatatttgttaactcaggatatagtatttgtttaagaaattactatgcttgggattcatttggattcgtgaacatattacaataactgtctttcccaacagataggaccactaactgaaatgtttgttagaactaagtcctgcaattggaaaagagagaatcatcaaaattttaaattagttaattagttgctggctggtgaagttatctttccatttgatattagggagatgaagatgaagaaattgatggagataccaataaatacaagaaaggacgtaagaaagcagcttatgctggaggcttggttttggaccccaaagttggtaaggctgggcagtgaattggttttctcccagtattaaggaatttcttaatgtggatctaggcttgagaaactagaagactgaattatatcttatagatcagcgaataggtctcatgacttttatctttcgttcacgtgaaaatcttggttgccagtcacctgacatagacttaatgtgaattttgttatgctgtgttccaataaaatattatttatagacattgaaatttaaatttcatatagttttcatatgtcatgaaatattgtttttgatttttttccagccatttaaaaatgtaaaaaccatacttaagctcatgggtggtacaaaaataagtaggttggatttggtctgtagccgtagtttgtctaatacatagatagctgtccagtacatagatagctgtttgtcctgaccagttcagttgacagcaaagttgaaggacgtgcagacaataaccaccaaatttaactttaataggagaatatctttttccctattgtcatgaatggcaaagatgttttgtggtacacagagctagaaataatttttttttctttttttcttttttttttttggagacagagttttactctgttgcccgggctggagtgcagtggtgcgatctctactcactgcaaccttcacctcttgggttcaagcgattctcctgccttagcctcctgagtagctaggactacaggtgtgtgccagcatacccagctaatttttttgtatatataaaaaaacatttcaacccttcccaagtgtacagttcagcagtagtgttaagaatattcacattgctgtgaaggaattaatgtgaattttatctaataagttagttctgagtaggaaacatttttgacaaaagtgattttgttattagttataatgaaatggagcagtagtacttggtgttatgtaggtctgggtttgaattcagtgtgatcttgggctgcctgtttaacctctgtaagcctcagtttcttctgtaaaatagagttaagagtaatatctaccacacagggatttaaggataaattagtatagtgctggacacagaataaactatcctatatgtttgcaattattattgtcttaatagtggacatttatttttattcagtttcttctcaaggtgaagataactctttgtaaatgtcctacagaaatatagtagctttctgttcttcctttgcaagtaaaaagggtgggtcgttccactactgacatttatatatatgtgtctcttgtttgattttagctcagtttttgtacaggtaaatgtgccgtccattttattttttgaagctgttgtaaaagaataaattactctaccaggcgcggtggctcacgcctgtaatttcagcactttgggaggctgaggcaggcagatcacgaggtcaggagatcgagaccgtcctggccaacatggtgaagccccatctctactaaaatataaaaaattagccgagcacggtgttgcgcgcctgtagtcccagctattcgggaggctgaggcaaggggactcacttgaacccgggaggcagaggttgcggtgagctgagattgcgccatggcactccatcctggagacagagtgagactctgactcaaaaaaaaaaataaaaataaaaataaaccactcacttggttttatttggggtggggggtgggagagtaggtaggaggattcttcaaagaattcttgctttgaaggagagttgaacatttttttttttttaatggatgtgacacgtctcagatagctgattgggaaggtatttgctcataataatggtgtgctttggggacagctggggaaaggactggttgtagctggttctaaagagagacaggatctttttctccctcttcttttgtgatctggcttttcactaatccgcatcattttatgaaatggtagttgattctttttttccctttttgtctgtttcacagctctgggtagtgtatatggatagtatatagtttctaatatacttacagtgcttttaataatgatgttttgacaattctgcttttctttagactttttatgacgtggctttttaatttcaggtttttatgataagttcattttgcttctggacttcaacagtctatatccttccatcattcaggaatttaacatttgttttacaacagtacaaagagttgcttcagaggcacagaaagttacagaggtttgtatttaacctgggactcttgaaattgagtttaaaaaaattgcttaaagaaggaagatctgtgtctttttaaaatagttttattgtggtattattcatataccatatacttcacctgtttgaagtgtgtagttcagtggcttttagtgtattcccagagtttgcaaccatcatcacaatgagttttaggatattttcattattccccaaagaaaccttttagctgtcacctccctcaatccccatcccttccacctctaggcaactactaatctttttgcttttatagatttgtgtattctggacgtctcatataaatagaatcatacattatatggcctttcggtatctggcttatttcacttataatgttttcaaggttcatccattttgtagaatgtactagtactttattcgtttgtgttgctgaataatattccattttatatgcgtgtgtggtgtatgtgtaggtgtatacacatacaccacattttgttcttttttgtaattttttttaatacatggcagaagatgtctgtttgccctctagctcctgaatttatatgtcagttctcaccgcaagcttaggacctgtttttcaatcccaatttcatattcccagaagagagaatctgataggtttgcctaggttggtgagcaccccaggtccccgttacctgtgaccacaagagtaggttcacagggcacggatctggctgctaagggtggacctttctgtgggactagtggatacttttacagagaagatactgggtagacatccccaaaaggtatgactgcattcaattaatatttgagctctgttctgctactgtgccagcatggtgataattaatattatttagcctctgcccaccaccattttgcttattggagctttccagcttggattctggatatataatagaatcattttagagttggaagggacctcagaggtcatctaagaaatactatacatgtagcaatttatagatctgaatcattttcatacatggtacctcagaacagttagtgtcacacaggtagtagttgtagagctaggagtggattgtaaacttcctgactccacatctttcagtttactttttatctgactttcatagttgctgtaaataaattagaatgtgtaccaggatctctttaatagatttactatcatcatctgttatattggaaaacagtaggtccctattactattgtaacagtgttcacttgaagatattgatctctataaaatcagatgctttgtaaaggctaggttatcaaatggcattgacttgatgtactttaaaccaagaggtttatttttaattctgaacctttgaaagggcaaatgtgcctggcttttttctttgtagctgttaatagaatttacggaggctagggaaaaatggtctaatgcttcccctgctttttcttcctgtaaattttaatataagaagactgctggttgcttttctgaaatgttgctattcttctgccgattgcatagcaatttataggtaaaaggtactacataaatgttaagggatatgtatgtattagtttttagaaatgtcatggcctatttaaatgtgctccaagctccttttttttttttcttttttttttggagatggaatttcgctctttttgcccaggctggagtgcaatgttgtgatcttggctcactgcaacttctgcctcctgggttcaagcaattctcctgcctcagcctcccgagtagctgggattacaggcatgcgccaccatgcctagctaattttgtatttttagtagagatggggtttctccatgttggtcaggctggtcttgaactcccgacctcaggtgatccacccgcctcggcctcccaaagtgctgagattataggtgtgagccaccgctcctggctgctccgaactcttaaatttgctgatttattagcttttaattattagtctacagcatttacaataactgctatgattctccatagttttaaaattctatagcattttgtttggtagtaaaatgatttaaaatagtagtttagctgctagttattttgtttttttaatcctggaggtctgtcttagtgtttgtattttaaaaacaatttccccaaacatgttgttctccagttttgttgaagagagatagcatgtgtaaaaatgtatcccttttttttttttttttttttaagacagagtttcgctgtgtagcccaggctagagtgcagtggcgagatctccgcttactgtaagctccgcctcccgggttcacgccattctcctgcctcagcctcccaagtagctgggactacaggcgcccgccaccgcgcctggctaattttttatatttttggtagagacggggtttcaccatgttagccaggatggtctcaatctcctgacctcgtgatctgcccaccttggcttcccaaagtgctgggattacaggtgtgagccaccgtgcccggccaaatgtatccctttaaatgaaatctaaatttgtgtctaactacaggggtgggagatattgggaatgacagcctaatataattgggagagaagagggcaatcatgacctgttctacaaccctctcagctctttcttatactactcatgcattattgaccttgtataagataatagcttttcaagatgtgatcatgggggaaagctcctataaaatattactgtagaaatttatttcgcaaaagtttgatttgtgtgaaatttgttgtgtgtttatcaggatggagaacaagaacagatccctgagttgccagatccaagcttagaaatgggcattttgcccagagagatccggaaactggtagaacggagaaaacaagtcaaacagctaatgaaacagcaagacttaaatccagaccttattcttcaggtatatcttttcactaagaaacatttgagtgacagtctcagcttttacagtttgattatttatgagtaaacagratgctgggcaattgcaggtacttattttaagtttgtggataggtgaccatttaaaaatactagagtgcctcagaatggaagccacctttgtttacaaagattgtatctgagcaagatacttctggctcctgggagctttggagtctgtgtttacttgctgcttctaggaggttagggaatcatggatccaggagaatgggttgagtatattaattcttttttattcagggatattgagggtttccctttttattggagatctagaaagacatctaatgtaatgcttaaccatctgtaaatgttgttgtttgtcttttgttctgtgtggcctgcagtatgacattcgacagaaggctttgaagctcacagcgaacagtatgtatggttgcctgggattttcctatagcagattttacgccaaaccactggctgccttggtgacatacaaaggaagggaggtaaatggcgtaataacattcacatctctagatatgagagtatttttaactatacatgttatagtgtgggagagtcaagtttattacctagttgtacagcatcaaatacagtacccctctctttggatgacaggtttgagacaaataggcatttaaataaggtttcattaattcgtgtgtgtgtgtatttattattgaacatctactgcatgccaggcattgttctaggttctcaggatagagtgtcaagcaagacctaaacgatccctgttatgaggcttacattctacccagaatgggaggggtttggggttggggacgacatgggttgggaatgtggggtggtgagagggtggtttgggaaaacagactttaaataagtaaataaacatgtataagaaataacagaaaatatgatagaagtaaatgctctgtagataattaaaacaggatggtgggctagagaatgtttggatggctggtttagattggtcagggaaggcttctttgaggaggtgacatgaatgagaatgacttaagagagtttttttttgctgatggattagcttggagtgtgagtgaaaggtagaaatcaggaggataactagtagagccttttactaagatggaggaaactgggaaagaaggattaagaattctgtcatggatgtgttgcctttggcatgagtaatagaattccagacataataaggaggccattggatgtatagatccagaattccaggaatacatcaagacaggagttatggattgagagttattggctttaataagatgggccagataccaaatagaatttaggtacatcactttatggacactgtaagcttcaactgttttagtactatgtgcatgggtttttcttaatttgtaaaagaatagttacgctgaatattaaattccatttaactccctgtctgtgggtttaagactatttagccttaaaggaggtaggtagtggtcatgggaaaaatgcttatattggggggtctgtactctgaatgctctagagcagtggttggcaaatgatggccatcggggcaaatgcagcctgccatctatttttgtaaataatgttctattggaacagagctaaactcatttatttatgtatcatctgtggctgcttttgtattacgagagcagagctgagtagaaaagatggaggctcacatggcccgcaaagcctgatatatttactctctggtcttttttagaaaaaaagtttgctgacctctgctttagagtttagatcaactctgtccagtagaactttatgatgatgaaaacgttctccatctgcactatccagtgctgtagtctctagccacaagtggccagtgagcacttggtatctggctggtgccaactagctgaggaactggatttttagattgctttaattataattaaaatgaatttaaacttacatagactgatgtagctagtggctactgtgttggacagtgcagatctagctggcctatgaaataaacgtcagcatggtcagaatcactcatctgtggcatccgtatctcaaagatttgtcttagggcacagtgaggaagggcaaaacatgtattgaacgccagtgatgtgatagaagctttcctatgcattatttcactgaaattacacaagaatcctttgaaatagataataacgttttcattttttagatgaggaagttaaaactcaaggagataaagtataacaagtggttattttgaatgtaaatccttttagtacagtagggttgtctcttccatctcaagatgtcatttatgactctggttctgctttatattcgacctcttattacaggaagatcatgatttttggtacccatctcaagacacaggtctctttttacatgagaaagatataggtgttttaggggctagttgaagtgagggaagggaaggatgctttcagtttcttaagctaagtttactttaaaattatttaaattttatttctttacaagtatccagtggcttctgatggaataccatcttatttttgtattagaaaatgcactcactatgccccaactgggtgataatacatgggttgactattgagattggatcaaggttactcttaagtttctcacgagaggcaatagttgacaatttactcccttggagagtgcctcttgctgctgggaaatccctgttgttacattttccacattggctcagaaatccacaagcttaaaagggcactgttgataatgataagccccaaatttgtccaatgatctcccccactctcctaatccattggattttaagggcaatggttttctttagctggatttttaatagcgagtttaaacacaattttaatttttctgttatataaaatataacaataacaaatctttaataaatgaactataaaaaaccctgttctctccactaaaaaacaaaggatttcagacgaatctagaactacttgtttgtgatttaaattcttggtatctgctttcctcttttctctttaccctttgctgtttccctcaaataaggataaataaaactctggaaagtaggcctttaaagtaatatgaggctactgagaaataataattacgcagtttctcccaggaaatcttattctagaagaagatccaaagtcacttacaaatattatttcctaatataaaaatgatttttaaagtattggtgataattgttagcactggtggatggaagtagtctatgtgatatctttctttgggttagcgtctcttaattattaaagaggtaggaggagtgaagtgaaaatgagagccagtgtgctgagattttggaatacctttgtaacttattaaactagtattttttgtgacaagatacgagtgggcagaataatatagtaacctgcagatcttacaaattctttgcttttaaagtccttgtgggataaattagattaagtttcaagtggaaattaatgagaaggaaacctggtagcatgccattgcaaaagattataaaattttgcatttggatgtggattaatacacagcctagggaggccttgaagcccccttttcctttttatttttaagtctattttgtgtttgctcagttttcctggaatcgtgcacgtttggctctagcgacctaataatttctgtaatcaaatgtattatggctgctagaatactcagagtaattactaattgtactttttaaaacaggtttataataaaagtgctagtagttgtgtcaaatgggcatcaatattgtcttttcacaggtgtgatctttcacgcttaaactcttccatgattttgaattgctttgtggtagaggaatgagctaatgggtaaggaattgtatgagggatctcacagtgtgtacgttatttaaaagtaatgaagtcagtgtttcagagtactctgtggatctatagaaataccatctgtatttgtgtttgttctcaatgtgtgtgtagagaggcataaaaaagaaattgggcaagcctatggcactgagtggacatatatttttaaaccatgaagaaaaggggtatcagttgtcaaatgtctgatgtggtaattgaagtgattgttcactagatggcgatagacaccctgagatcattaatcaattaaggattttattctgtgaacaatagtgaaggcaatttaatgagttaaatctgtccacattttagacttttattaattttggaactattaaagaaaagctaaaactggcccaaaggattgtaatactctagtgtttaaaataattatgattttttaatcattagttatattgataggaacagtaatttatcatagcaagttaattcttctatcgagtagctaaattctgatttctggccatggagacacgatacatgactccctcagtcacagtatcagaagctaatctaaagggaattggaaatgattttgatatatgattttgcctttttgaatttgtttttttattgcgaaattttttattttattttattttatttatttatttttgagatggaatctctctctgttgcccaggctggagtgcagtggtgccatctcggctcactgcaagctccgcctcccgggttcacgccattctactctccctcagcctcccgagtagctgggactacactacaggcgcccaccaccatgcccagctaattttttgtatttttagtagagacggggtttcactgtgttagccaggatggtctcgatctcctgacctccggatccacctgcctcggcctcccaaagtgctgggattacaggcatgagccaccacgccaggcctattttattttattttattttattttattttattttattttattttattttaagaaacagggtctcactttcttgcccaggctggagagcagtggtgtgatcatagttcactgcagcattgaattcctggactcagacaatcttctcccctcagcctccctagtagctaggactacaggcatatgccaccatccttggcaaatttatttttattttttgtagagatggagtcttggtgtattgcccaggctggtctccaactcctagcctcgagggatcctctcaccttggcctcccaaagctgtaggattatagataggagccactgtgcctggctttattggggaatttaaaactgactatgtacttataagtatactcattgcataactttagtttaacgggaatatttgtcttgatggaataattagtacttactgacattggtattattttatttctctactctcttatttctgtgtccttgagaaagccatttttggtctggattttttattgcattttaaaatgtatgctctgatgtttaggtatagagtccatgcattttcattttcctacctgataggctgaaataagctttgccagcctgcttgccagttggtcgtagactgcctggcttttagttgtgttggagctggaatttgtgcacattaaaagtgtatccaaatcattaatgcaaacattacaatcttggcaagcctttctgggattttcttggtgatgtggtagcacctatcaggatcccttgggaaatggcactaggacagagggctctagcctttgttgatgttggtgatgaaagagaatgagtgactatgaagaattttacaattaaatattaagagaagtctttcatctttacctgtaaataaccaaaaatttcacttttgcaatctttttctttctttctttctttttttttttgtggggggcaggggggcagagtttcactcttgttgcctaggctggagtgcaatggcgtgatctcggctcaccacaacctccacctcccgggttcaagcgattctcctgcctcagcctcccaagtagctgggattacaggcacgtgccaccacactcggctaattttgtatttttaatagagacggggtttctccgtggtcaggctggtcttgaactcctgacctcaggtgatccgcccacttcggcctcccaaagtgctgggactacaggcatgagccaccgcaccccgctgtgatctcttaatagcctagtttttctttaaaaaagtaaaagcaataaaatattatagagacaactaaagaccatttcctccccatcctctctcatttctttttctttttcggaggtaacttgcccagagttggttttgtcattcttgcccatgggttgttcttttttgcttctgcaacgtgtatatacatgtggtgtgttaaaagtttttaccatgtatgtgtcatgctatacatattcttttgcagtttggaaaagcaggagaaaaactctactctgtatgccacattttaagtatattcatcttgatacatttttagatttgattcattcatgttaactattgtataatatttcgatgaatatagcacagtgtattttttaattctgccatcatccatatctttaggtttccaagttttcatttgtcttaattatttgctgttacaaacagtactgaagtagacaataccacctttgtgagagtttctctggtatatttctaggagtggaatttgtacaacatccacagcagtatatgaggctttattgataagagcagccatttaatttatcacagcaagctcatttttaaaaatcaagtagctaaattcatatgtctggctggagccacaatacgtaactccctcagtcacagtgtcagaggctaatcttaagagaattggaaaggattttgatatacaattttgcttctttgaatttttgtttagttctctgttgaggcattttaaacttactatatatatacttagacttgttgcataatccttgatattccacatccttgcagcacttattatctgagtttttattttttggtcagtctcatgggtatgaaagggtatctcattgtgattttaatttacattttaaaattattagttaagttgggcatcttttcatgtgtttattaactcttccattttcttgtctgaatagaacatagatgttctattttgttggattgtatgtctcttagtattcttaggtattcaaaagccaatccttgttttgtcatttgtgctgcagagatctctttcagtctgtggcttgtccttttactttatttgtagtctttcattatgcagaagtttctaattttaatgccagatatttaattttttcctccttacactatgtgggtttttttcccacaagaaagctttccctcctctagtgacgtagacattctcccctgttttcttctaaaagttgcaaggtttggattttcttatttaggtctttaatccttctagaaattatttttaggaatgatacaagttaggaatctaattgtacttgtttgcttccttgtagagttattgaacgttcctgtattgttcctgtattccaggggttggcagactttgacccatgggctaactcaactcaaaactgcctttttttgtaaattaagtttgattgggacacagccctacccatttgtttatggctgcatttgtgctacaacagcagagttgagtagttgccagagatactgagtgaactccaaagcctaaaatatgtcctatctggctctttacagaaaaagcttgcaaacccatggtctaaaagatagtcatgaaagagtagctcatatttccaacagtagcagatatagtcagtgaaaatagaggaaattacactaaaggttgtaagaaggaaggaaaacaatcttttggacatgtaaaaaatacaaagtttgggccgggcgcggtggctcacacctgtaatcctagcgctttgggaggctgaggcgggtggatcacctgaggtcaggagttcaagatcagcctggccaacatggtgaaaccccgtctctgctaaaaatacaaaaaattagccgggcgtggtggcaggtgcctgtaatcctagctactcaggaggctgaggcaggagaactgcttgaacccgggaggcagaggttgcactgagccgagaccgcatcactgcacaccagtctgggcaacagagtgagactccatctcaaaaaaaaaaaaaattgaaattttactgattcttagattgtcatatgagaacttccctcaacccaagtagagtaaaggggaggtctgtgaatcctctgaagttgtatgtaatattttgtgtgtctgtgcatatgtgtacttttttggaggagaggatgcatagcatttaagagactcaaaggggaccatgatgtgaaaaatgataaagaacgctggttcttatgtttcatttctggcctcttatgtaacttgaggggaaactttagccttaaaaatgtatacttttgtcacctaaaacatggcagtgcgaagaattttcttgccaaaccagacccatttaaactgtgtgggtggtaggagggatgagttctaattctgtctccagaatttttatagccaccattaagactacttttaacttcagctgacctactaacattttgattttttttaatatgagaatttcttttaaggctaatatgaaggtttaatgtattttggcagacatattttatgttaaaaaaaagcaatatcctttgttagtgatcatgaattacctatcactttcaaagttgcttacattataaaatttgaagccagataatttttaaatttcgtttctattgtcatatttcagggatgtttggattctaaattcccggcagttcttcagaactgataacacatactattcagctttattaattcacattctactcatttagaatttgtggtaattcagatggaatgagttgaaattcttcttagtacacattaatagttatttcagagcctaggttcttttcatataccattaaaaatacaggttgagtgtccctaatctaaaaatctgaaatgctccaaaatctgaaacttttttttttttttttttttgagacagagtcttgctctgttgcccaggctggagtgcagtggtgcgatctcggctcactgcaggctccacctcctgggttcacgccattctcctgcctcagcctcccgagtagctgggactacaggcgcccgccaccatgcccggctaatgttttgtattgttagtagagacggggtttcactgtgttagccgggatggtctcgagctcctgaccttgtgatctgcctgcctcagcctcccaaagtgctgggattacaggcatgagccaccgcgcccagcccaaactctgaaactttaagtgccgccatgatactcaaaggaaatgctcatggagcattttgtatttcagatttttgaattagggatgctcatccagtataatgtaaatattccaaaattccaaattcaaacactctggttccaagcatttcggatactcagcctgtactgtagaaacaactatctacatttaagtaagtggcattttatctgcagatcgtttatattgatgaacttgtactaaggaaccatctgtttgcttgtccatttgtctacattctttcaaaaattgatgaaagtaatgttggtactttcaaataaaggtgaaaaaaggaagctgtaatttggaaacaccccatggaagcccagtccagattataacttagactttcagtaatttgagagaaatgcgatgataaaaattcaagtatatagaataatttatgcttatatatgcttgcattataataaacaatatatacttatatgaaaaatatatggtaagcatataatatatatgttatatataatctattataacagtgttgcatttatagagattaaataagtgggttacacttaggcttgattttaattactctatatgcttgaaaatactgagtatttctttcaaaatggctaagatgttagacttgagacaaattcagaataaccttattcttctttcttaatagttggaaactagcatatctctaagatgcatggatattggcctctgtgtgccttttaggtttttggacattgaaaggtacaggtttaggaggacacaagccagttgatgtaagagacagctgggaagagaaagactaggtcaaatcttgcctggggtctgtgagtgtaagagaagaaagctacatcaaggaggccatttagccatcttttgtttatcccctttgcatttgctgaagttttttgttttttgtttttttgtttttttgtttttgagacggagtctcgcactgtctcgctggagtgcagcatcgtgatcttggctcactgcaagctccgcctcccgggttcacaccattcttctgcctcagcctcccgagtagctgggactacaggcacccgccaccgtgcccggctaatttttttgtatttttagtagagatgaagtttcactatgttagccaggatggtctcgatctccttggcctcccaaagtgctgggattacaggcatgagccactgtgcctggcctgcatttgctgaagtttttgagtggtcaccacatcttagttttacctgtgctttaaggaatccaggtgtgggcacccgcacccctctcctacacatacattatactactaagtgtcaaaggtaataagatatggtcctggggttgtgagttggcctttccagtcttgctgaatcttcagtcaatactaatctttaaaattccagggcttctttcatcaaggaagatggaatttccttattctcaatccaaatttgtgcctttttccacccatatattggatttcttattactagatttttcacatgggtctgcataaactagtatcaatacttaaaaattttgtattaacacaaaacaaaagtctgcagcctcaaattatttctgtattctccaacctctacttcagtttgtcagggagtgcatttcagatgtttttttgttctacctagcccctaagccctgtgctctacatagtggatgtttgtttgccttacctctgggatcacactcacttggtagtttctgtagttatagatgggtagatagggaagtggtatattttttaaagaaggtcttgatatttaagcctattttgaatttataagaatggccaggatactcaaacaagaaaaaggataattcgtacatttgtagtgggaacctaggaacttttatctgaaaagatagggacagagtatttttgccttgtaattttgcctttttaattactgaaaccattgggaatgtggctaaggatgagaagataaatgctattaagactgaccttgtgtcagcaccactgatctctgctgagatagattaagtttcattactttgactagaatcacataaattgagtcctggaaatctttttcttccccacccctcaccagaatgagtgactttgttaacccaaattcattccatttttctccatatgtgaaaattttaaataaacctattttggtatctatttctttttcacaagccatgtgttatttgacaggtgttttgaagcccttgctttggcagtgaaccaagatgacagagcagtaatgatttggaaagtgccattccctccttgttaagcgataaaaagaaaagtgtgaagttattaaccactattcaccagtggcatagaaatcggtataaggtttaattgtctggttctacagttggtctaggtaggcaatttcctggatagtgcttctcttaaggaaagggaagaataatcatataacttcacttttttctcccatataatttttttttcttcttttcacaaattgcagatagatggattggagagaaaggatcactagaaaaccaaaatattgacctcacaggctttccctttcctcatctgcccaggtatacatttatgggtgacatggcagcactcagcaacattgcaaatttcccaccccccaaatgaatcacatgctcaagtgtttgaatctgatggtgtacaggatgttaccacactgtctccttatgttagccatgctgagtctatttattgctaattggaaaaacctacttttggcagcctcggctgcctggtggctttagcatacccgtcacaacagtatggtcagacccattaaagacacatccctgtcaaatttagaaaacaaaacaagctcattgggcttgttatggctcaggaccagctgactgagggaagactaatagaattagtaccttctgtttgtgtgttatcattgcagtgggcagcatgagcctgtgtcaatttgccagatcataaatactgtgttaaattacaatgaactgagattggtaagttgtgggagttttggaaggcggggagaagaatagttttatgtatgtgtgaagaagccgtttgattttcagccagggattcctgagccctgtggtcatggttttagagatcttagacttactttgaaatttagtaccagagtcaggttgtgcagctgtccttgtttcctttttattgttaattttgtggttgaattggcttgtatcccttttaaacttgaatgtatgagtctcaacattaaaattttttctttgaaaattctgttttaaaaagcaatatgaaatagaatgtagctgaaaagtgaatttttactcacatttttaaaagagcaacaaagcatgagtgatttccagaaatggtttctgtgtcatctttggaattcttctaattactaattcttctttataggcttgggtttgattttgtattacctgtttttattggctttgttgttttacatttgacaaaagatttgctgttttgaggctagtgatgagattgatttatttatttttttatttattttgccttaggactaagagttgagcggagatgggagtggaacaaagatattaggtttcttttatgatttggagtgtcagacatttggctatatttgtttcatgggtttttcatcgctgctgacttaaccacagacgacattttcagccctgtgcaggagggtggtgtgccttctgcaggcagggaggaggagggttggggtgtggtggcttagagaaaggaatcagctcatgggctattaataatgtaaattgttcttgaggccacatgtaacatttctgagccctgaccaacagggtagggtgcgtgttctatttacattggactgcatggcacgatgtgatggatagctgataatcacaggaaaaatccgggtatttcttctttaatgatgtcctgatagggcagaaaaaaataatttgtcttcagaagattggcttagagtggctgaatatatttaattcaattactggttcttgcctcatagccaggaattcttcaagtgatatttgctgagtgtgtacatggagggaaatggagacaaatgacattgcttgtgacccactgccttgagaggaaagccttcggtaatgattccagtaaaactagagctagagcttgggaagctaaacttgtgattacttactagtaaacaagagaaaggacctgttgtaggtgcaaaaatcttactgaaatgcctgagtatgcactggagaaagccctggactgcacaccaggggtgctcacccacttgtttactttttgtggctttgagcaagtcatccattctgcctttggtttttcacttgtcagaggggtgctagatgatgataattactgctcagtgggcttcagttacaaagcaccttaacatagagtagctatctactgttgtttctcagaacaacccaggggaagcattcgtgcaaggctccgagtacctagcaagtgtcaggcatgccacgtggtgctgctgttagggagacagtggtaaacttaagcattcaaggaccttgtcttcatggagtgttcagtccattaggtgagagctgttaatcaaatggtcaatgaataattatgtcattctgaaagaaaataagtgctaagaaaaggcacatgaatttctgagtcttgatagcaaaggcccttgacctggactgaaaagtcaaaattttcctgatcctttggtacttgagctgagatctagaaagtgtgggctggagttaactaggtaaagagttggaagaataagcattctagagtgagggctagcatgtgtagaggtcctgtggtggttggaagcattatgtggccagggcactgagaaggctgaggtagctgaagtatagaaaggaaggggagagtgataggaggcaaggctggaggggtaatcaaggtcacaccatatgggctttgcaggccacgttgaccaagaggcagatgttaatagttttttgggtttttttttttgaggcagagtctcgctctgtcgcccaggctggagtacagtggcatgatcttggctcactacaatctctgcctcccgggttcaagtgactttcctgcctcagcctcccaagtagctgggactacaggtgtgcgccaccactcttggctaatttttgtatttttagtagagttggggtttcaccatgttggccaggctggtctagaactcctaacctcaaatgatccacccacctcagcctcccgaagtgctgggattacaggcatgagccaccacgcccggccagatgttaataggttttatatgttgggggagattggctcacatttccattttgagaagatcactttgcctcagtgagttggaggggccagagtggatgaggggaaactgattagcaggctattattagaatagaattccaggcaagtgatggtggtagcttgactagtgtgatggcagtcagtggagggaggaggacccagatatgagagagatttaagagaaaaagtatcagtaaaactgggtggtatattggatgtggggcttaggatggggaaggtatcaaggtcaactcttggctgacttgtgtaggaagatggagtacctttcactgagatgaagagcactggaagatgaccaggtttggggcaggaggagggaaagatgaacagtttgatcgtagacatgttaattttgaggttgcagaatataaactggggagtcattggtttatagtcattgttaaatgaagccatggacatggatgagattactttgggagagaggagagagtggaaagagaagtgggtgtaggactcagtcttaaggaaccccagcatttaatgacttggtagaggaggacaggctttaaaaagtagaccgtgaaagagcagccagagaatgagaagaggtgggaaaacatggtgttgtgaaaccagtgaagagcatttcagggaagtagtaggcaactgtcaggaagagacactgatgatagttttgaaaaatttccattgaattttgggatatggaggtgatcttttactttagttggtgctgtttgagtgcagtaatggtggtcagactgatttgctataggaagataatgtaattatccatagtttatagatcaagaatctgaggcacaaggaagttacttgtaaaacagctcacctaagtgtcagaactggaatccaggctccctgttctgtatacctgctacctacagcttactgctttactaggtgagtgtgtggactgaagaggcaaacacagctgtgtccctgttttgcttctccctgagttgggatctattaactagttacttaacctcattgaccctctgcttcctcatttttaataatggtaaatgcccggtgaggttgttgggaaaattaaatgagataatgtgtgttaatgccttgaaatgcgtttgatacataataagtactcagttaatgctagctaaaaaataaacaaccttctaccgttctgtctgccctctcctcagagcctcttacctccaattacatttttctcttgtttaatgcttagcagtcttctctaaaaaggccagtttgtatgctatttgcccagttatttttcaagtttgtgtttttactttgccatttctcctgcttttagtgcctttgtccacctacaccactaatttctgtgtagtgtaatttctgtcagtcttcctcaaaactcactttttatgactgatttaaaactgattttcttcactctgcaacttaatgagctcagcttatgtttacatttgtttcttcttaggagcttgatattcatgagtttgcgaagtttgttcactcagttttactaaatagattcaggggccaggcatgttttttcatgtccttcagcaacatgtagtagaatgctttaaagtagtgggtacaaaatggcaaacagtatttttatgctatttaagaaatagctctttcctgtcactttcttctcattacagtcgtaaggtgcagttattactaagtcctgccagtgttacttccaaaatattcggattaatccatttctctccattgacactgccactgctctgattagtttagaccaccatcatctctggccaggatcactgcatcagcctccctgtggtgtctcccttctactcttgtcccccccaatctattctcaaccctatatttttaaggtgtaattgcatcatatcattctgctttgattcctcattgacttcctatttcagtttaccttggactccaaggtcctacgtggatcacttcacctctccttttacctcatttttgtgcctcctacctgctgctccctcacctgcacccctgctttagtccagccacatgggctaccctgttctttcagttcttcacacacatgaattctgtccctccatagggaccttgtgcatctggtttcctctgcctggaatgctccttcccaggcttggtgcagggttgtatttttctctcttcaggtctcagcttatatgtcaccttcttgtgtgtgcgtggtgttttttttgtttttttttttgtttttttttttgagacagagtcttgctctattgcccaggctgaagtgcagtggtgctcttggctcactgcaacctccacctcctgggttcaagcatttcttgtgcctcagcctcctgagtagctgggattacaggcacgcaccaccacacccagctaatttttgtattttttgtagagacagggtttcgccgtggttggccgtgctggtcttgaactcctgacctcaggttatctacctgccttggcctcccaaagtgctggaattacaggcgtgagccactgcgcctggccttatgccaccttcttgatgagacctttcctgactactctttctaaatagatccatccagcacaccgccatctctcatttttaaataaaaaattttttctcactaattttatagggtgaaatatacccatgtgccaattttccagaattaatacatgttaagattttgtcataattatttcagattttaagtaaaagagagcattacagatagttgaggttggtaatgtgtgcccttccccagtttcctcctttcctctccagaggcaactgttatgaagctgatatgtatctttcctttttccatgtttttgttacctatgaatgtgctcacttaatttatgtggatggtatcttatcatttttcagtttgcaacttttttcactcaacattatatttttgagtgatatccatgttgatgtatacatatctgatcacttatttgaactgctgtatagtattccatcatacaaatattctacagtgtatttttccctttctcaagtgatggtcatttagattgtcgtcagtgttttactgttatgaaaagtaagcattcctctacttgtctatttgtacacaggtgcaagagtttctctgtcatgatcttttctagctcaacaccctgtttcattcccattttggcactcatcattttgtaatcactgacttatgtgtttgcttgtttatatacatcttccttattcagctgtgagctccattggggtaggcagtgtgtttaactcactcctgcaaacacagcccctagcatagaccttgacacatagtaggtgcttcgttggtatttgttgaattaagtcagctacctgctttccatctgttttgtgtagttcattcctttggtttttgagctttggttttcagatttctgaagaaaggtgaagactgatgaggtgagttgccaaattctatggatagtgattataggtgattaggtaaacctggcatgggaaggagctgaggaaaaaaagctataaataatttgttttggtttaaacaaaccaaaatctcaaaatttggagatgatggttggcaaggaactatgtgtactagttttggttattgaaggagctgggtttatcagctgtgggctccttccacatctgtatcattgccttattattataggattttggagaggggtgggaggattttgtgtttattttctaaaattattctatgtgaaaattagaaaattagaattatggtaggtgtaggagatatggatcgtagattaaaaagcatgagaagaaattgggctgttgatcttaaagcaagattgtttaaatcaattagttttttaaaattctcctttttattagagttcactgaatcagtgcatgtgttctgtgttttctgtttgcttttgaagctgttcagtgttttccttaccatcatagacttcagatttaactacttgatgttcacctactgaattcacatgtagagaggaaagacgaattcacgggaacaaacggatttcttaaaatggagattgctgctataatcacactttggacctctattctagtacaggacatctcattttatccactagtagcctgtgtaagccatttgctgataaattgaatcactgtaattatatttgaagttagctattggaggaaaaaatgtagctatagttaaatactatggtaatgcctcctaatttattctttttcattttggagtatactgtttctcccctcctccactcagtttagtgtggcacatttgactgcccgccccccttaggttgggtatcagttatgaacttccagagagaattaggatctggtctcactgtctcctttgcatgtaaatagtaaataattagacatgcagttaaattggagacaataatagctgagatatattaagcatatgatcctgttagacactgttctaagcactttatatgaatagtaaacatataagcacagtccaaaaaatttttttctaactgtataaaatgtaggagtcatgttattttgaggtttatgagaaattgtaatcttcaatttctagttagtggaggtgggcgtggaggagaaaatgtttgcatttattacatgtgtagaaatgtactgaactgagaaaatctaaatggttacaggctagtcatttcttagtatcctgcctattactcatccactcccttggtaaaagctttaccctgttcctataagtgggagctgggtggaggatgggaagcaatcctcaattgagttagatctgactttgcttgattgtgtggcaagttagtatggggttttatgtcattattttatttcccttttatagttgagagaactgaagtacagaaagtataagtaacttgctcaagatcacagagctagtgaataaatggagccataattcaaatctaggcagtccaagcattcttaactgccacagtacattgcctgtgtttttgagtatttgcctgtgcaacaggcattaggagatgggagaaaatagtgttgtatcttcacagtacttggagccatttttgtttgaaaggatgtgtactgtattagtgtgtgtcatcctgggttggttagcatttgctgccactttatagattttctgagagcttcaattttccttttatatttcctcagtcttttgacagcagtcataatggaatttgaatggtcatagttaatgtggcctttggaacagaattcttaaggaagaggattgggtgatgaagcaagggtggtaagatggggaatgaggaggaattctttctgtcgtatgtattttgtggaataaaatagtgatgccatgcaccacagctcaaacttggcatggttctggaagatgtctttgtgtagcctgtctgtaccactcaccatctgttataatggtgaaggtcataggttgtttgccttaagcagaataaacaaatagatacagaaaatgtattcagtaatctttgcttgatgagcagaagctagcagttgtttaaaacaagtgaaggggataaaaactcccctaacttttatttaccaatcacatcgcaaagcaaaaatagcctatttttaggctgaggctccaattatgttaagccttgaagataatgaaacagtctgacacaaaagagtgtggtgacgcaagtttgtgtggtgaaattccaagacactcactgactttttaggattctgcacggtgaatattaagctcctaaagtgtttgttgcccggaaacagcgctttattcttttacatgcagtgtaatgaagtgaacctgtgttgtaatttgtttcttgcaaggaaaagggagaattaacacacattatctatctttgtgtcctgtctttggcctcttgtgtgtcccttttatgtgctgaagccaccaagtcatgctattgctaatactgcatattaccttctgttttagccactctaatttttcttaatgctttacacagtaggggtttccagtttttcaactaattttgtattgtagatttcaccgaatttggagggtttttcttttctgtcactttttcctcattctatgtaagaattactcttagcttttggacccgttcataatcatgtcaggtgatgtttttccttggaactaattagtttcgggggtttgaaatatgtgctggcacggggtttcattggctggattaatggaagttggccatttgtgctctcccggtctcatgttgccctttctatttacaggttggtaatgggcttctgggtttttattctgctgcctgtagtcttcttgaaaatgaacctgaggtgctgaattctcatgtgatgggaagtgtaatgcttccttccagggcagcctgtcttcttaattcctgaatcttgctatagcctaggtcccaaggaatcagattcctagagtcaggaggttggtcatcttccatttggtctcagaattttcctttccaaagagtagtcataagaactaaatgtgggaaggcagaaggaaagacctatcaacatcaaggtgccaaagttacaagcctctggcattggtggttcatggcaggatttgatgaagttggggagggaaggggacttgaaggggataaatgaactcctcattagattcagattgaagtgcactgatgtgacctgtggaagagctgaaaacataaaatagcactcaggtgattgataaagacagcctggttggatgaagtggaagctaggaaatctctggctgggtgcctgctatccacgtacagtacttactctatttcatttaatctcctgcagccctgcgggtgggggctcttatttctttttacaaatgaggaaaaagtcttgaagggattaagtaaattgccaaggcctctttatttgtaagtggctaaaatgaatatggcttctcacatttgtgccactcttctgaaatacaggaaacacagacatcaacagtatttatctttgtatgcttactaaggaaaatactgtgtggtacaaccactgaaaaggctataatagcttttttgttattgcactttaacagagagctctttcttaaaattacagatttttaggaccaaattcagttcagtcgtctggcctactatgtgccaggtacagtattgaatcctggggatatgaaggtgagacagaccatggtccctggtccctgattatagtctgagttgggagtagaggtggagggaaaggaaagaaattgccctgtgaacaaattccatgccatatgactaaggtaaatctaaagaaaaaaggaaaggtaaacattgcctagagattacagaatgatgcccatgcccacagaatatctcttactgtgagatccattgattctttggtcattgccaggatttgtccagagaggtacgggatgtcgtctttacagggtgaagcccaagaggaaccatattatgttacaaacttgggggcttttcttttctagctagaggtctaaactcaggagggtaaccaagttttttgttttgttttgtttttggtacacaaagaatcttctgtttctacatccagtaaactttttgttttcttaattttaaattgtcctcaggctgtacctttccttacccccatctctgaccaagaagggtggcagggaaggggggttctaattccaactcagctactaatttaggaggtgaccgataacctctacagttccatctgtcatagtgcctttcacataactggtactcaataataagtgtttgccatgggacaacagaacttgaaatcttctgtgattaatttgtattgatttttggggggcaggaactggaagggggttagttttttttaggatgaaaagttgctgcctcacattccataacagtaacacaaattatggataaatcattaagtataaatcacaactcaagataagtgaaaaaaattttcaaatattgaagagttcttttataaattccatctcctagtgagatgcattacatctcagcccagaatgctgaaggttcttgtgattcctagcacagtgcctcatctttggtgtatgatcagtgaagaataatacaattatgaaatgactactagtaatctctgaggacttctgaggataacaggtgttctgaagtttgccaaacttggagaccaccttcccttcctagaacagatttctaggaaaagtcttcaggtctttttgatcacaatacgataggaattgtagggaggacatgaagaaacaaaagatcagtcagaatgtttcacacactctcaattctctaataaacacagtactaagcagtacctagacattgctctttgcctgaaggtgggattctttagtacctcatacagtaaaagatggtgaacctttcagtgctttttttcagggcaaaaacagcagggtcatcgagtcataactcttgtaatctgggatgcaagttatgtaaccatgtcaggattttcttgagggtttctgtccagaagatggaagacaaggagtgttggttgttttctaaacagtgaactctagaaatttatagatgaatgaactatacaatacaattctagagaaaactgctaagcaatttttcagcactttatggcagtcaccaaggatcattattggctcacccagaacaggtactgttggtattttttttcttttagtcttaatattaggcttaaattagcacatgaaagtgctagttttaaaagttaaaagcagttgaatatcaacagtttcatgtgattcatcctaatggtttttattatttttttctggttataaaattaatacatgttcattgtagcacacttagaaaaatagaggaaaataaaattacagtctaacaatctattttatgcacttccatctttccatgcatatacatatgcacacgtataaatctgttcaccagaatattttcaaaaaacttactgtggattatagttcatttttagagactatctggctgtttaaattgaacctatcataaacatttctctgtaattagtaatttataaactaaatttttatgatttcaggagatagatgtcacgtaatttatttatcaatacccctattttaggacttttcgtattgttttcagtgttttacaattataaataaatagtgctgcaataaacatcttctacatgaatcctggtccacatctgattatttccttaaaatgagttatcaaaagaggtattttcaggttaaaagatgtgaattctgaaaacatatttctaaatttcttaccataaaggatatactaatttcttttttttaatcttttattgttacttttttatttaactttaattttaagttcatgagtacatgtgcaggtttgttatacaggtaaacttgtgtcatgggggtttgttgtatacattattttgtcatccagggattaagcctaatacttatcagttatttttcctgatcctctccgtcctccaagcctccaccctccgagaggccccagtgtgtgttgttcccctccgtctgttcatgtgttctcatcatttagctaccacttataagtgagaacacacggtatttggttttctgttactctgttagtttgctagggataatggcctccagctccatccatgttcctgcaatggacatgatctcattcttttttatggctgtaaattagttcaaccgttgtggaagagagtgtggtgcttcctcaaagacctaaaaacaactactatttgacccagcagtcccattactggatatataccaaaaggaatataaattgtgatattataaagacatgcatgtgtctgttcattgcagcactattcacaatagcaaagacatagaatcaacctaaatgcccatcagtggtagactggataaagaaaatgggggtacgtacatgatagatatactcatttctgcttttactagcaatgtgtgaaagaacctccctgataaaacatcgccacagttagctgttacttctaagaccaagagaaaaaacaggattgaccaattttgtttttccacctttgataagtttactaaacaaagatatataatttggttttatcgaaggacctgacgaagtttttcatgatatctttgttgtccaatcaaacaatgtgaactgaatgcagatagaatcagggatctcttgtttgcagaacaactatactctggaaaggttttattagtgggttattgtcaactgggagggacaccttgtgtggtgaggcttagtgaccctgtcctgaacaatgttatttacagtgattttgatgaaaacagaacatgagcttaacaggtttccaggtatgccacaaagtgagaaggatggctataagttcttctgtaccatactgtgggctccctgagcaagggagctggagtgctgagagcattccttctggagtcaaactgctacctattagctgtgtggctttgggcagagttacctaacctttctgtgtcttagtttcctcatctataataaaacaggaatcaacagaatatttacctcatgacgtttgttgggaagattaaataagttattaaatgtgaagcactgagagtagtttctggtccttagtaagtgatcaataaagatgagctgctattgttaatctttctctcagatggtagataacacttcttaaatgaatgcctgagtcagtgtcataaatgctttgtatgctggtgggatgggtccatattgcaaatgaaatgtgatgtgtaagttttgcatttatgttttataatattagaaccgtcatgtaaagatagggctgagagttatactgtgtagctccagaaggtagagatacggtttattgataggaattagtgataagatactttctaccaattagctctactcaatagtggagttgccctttcaggtagtggaagaattcaggtacaagcttccagaccattacaagtacataattgaaaagagagggcttctttggctagaggtgagactagatgacctctaaagtcccttccaactctaggctgattctgtgattttgagtggcatatgtaggattatcacatatcatgcaataaggccccacgagtacatctttggaagggttgatgctgctaatccttgcccactctgccctctctgcttcagtttctttcacctgttgtgtgtcagcctgacagtggcccattcctcagcttgattcagttttacagcccagcttagtgtcccaggctgctccctcctcagcagcaatgcctagaggatgagtatatgaaccaagggcacatttttcataagcatacaagaaaatagaagattgttgcctgcaaagtgtatctcagaattgtattttaaaaaaacaagcaacagttttgaccatgccagatgtactcttgtcgctttattcggggccaagggtggactttaccttttttgctcagcagctctgggcactgggtttctctgcttgtctggtttcttgcctaagttcagcatcaatattctaatcccctgggaaggagcagttgagcccacactgttgtatatactatgtgggcttgtatacctttggctgagattatttttctgtcatgaactctgattccttgccttatgctatttaaaggtagcttcaaaataaagttagaaagctgaattgggagcccaaccaattgctttttcttttcagggttctttgctgaataatttctgacacatcaattgtgtaattgttttgtgctgctctccccatttataatatttggagcattggctttttgccacacttgtcaagggtttatgggagttagtgacacgtagtatacaaggttctttgagattctttcatgaaacttggtattatcttgaaagcaaaaggtttaactgttcatttgttagatgactagtgggattttaaacagatataatcacaccatgtcttttttttaaatgtgatgttacgtacatatgaacttttactgctcaaattttaaattatgtgtttttttttcttttttgtgtttataaaatccattattagcaaatacctcaggaaaactttagagtgaaagtcctgaaaaaattttccactccatgttttttaatgttgtggtttgtccttagttttgccatctggtaatgaatggttgaagtgataaactcctggcaccaccgcattttgctgttgatactagtgtgtgtctatagcttgtggtacagaagcactaagtgaggtccatgctgtacagtgagaagccgaaagagttgctgctctgtgtgccaggtgggttaatatgttttagagaaagcatctgtggaattttacagtggatgttcttttgtagccgtattaattttactccttttgagtagtatcattttaccagccagaatctagagcacgcacatgcattatcagagtgatttgaaacagtggtgtacacacgagcactgtggggatggttctgatgctttcaaggcctagagtctcactgcatatattctgagccagagtgttaatcctactgccttaagaagcctttgcttctccttttagtctttagagtttatgaaaccaacagctttgtagtcttcaataggaggattgtacatagagctctaaagattcttggaacatagaaaccataaagaggaacgtgtctgtgtttactcttgtgttgtgttatatgcacagtgtagaactttttaaaattgaaacaacagaggtagatgatattttaaaagattactaaacattagatttttagactcatctcatttaggctgaaaggaaccttctagtccagccccctcattttacagatgaaaaaatataagtccataaggtcccactgagcctgaatcagggttgatgtaaaacctagaggtcttccttcccaagccagatctggttggatctcaccgctcttgtaactgctatagaacaccactgtagcatttagaaagtactgaatcattatgtaagaaaatgactctctcagtaaaacagtgtagttgttgagtccatagtccaagcaggttttatcgtttgtattaagtaacttcagctgttccatagtcttcagaaagtctgagctgactatatttattttatccaccttttacccagttaacagaatgcttactctcttattgccacttaaaagtcatctggaagactcatgctgataatgtaatgcatggtgaaggaagggggtaaagtaggaaaacataattattgcatgcacggtctttttaaaggctcttttctcctctttttcccagtttagttgggtagatctgatttatatagcattttccccccttttcctaaattggataagagctggaagactattcaggaaaagctataagctatagcaaagcgtgtgaaaagacagtagtttgtgcctttctcaaccttgttatagatctgtggatagtttggagtttacaaaactgtacttaaatattttctttaatataggttagggacagatttctatttgctattgatgactgtcaaaacaacttccctagaatgattgtcacagagcatggggcctcattttctgatggagaaactgctttggtttattctcactgtttttacatgattatttcttattttctcaagtgcttatgacatttaaaaaatctgtggttgagaattgtggcagccagtattatgagaaagagaaactaggtgcctgtaaactatttaaatacaaacaaatgatagcaaaacttaaccaggaagaacatgagtttgaaattgttgatgaacgtgatctaggcctaagacaagctgaaactgtatttctcattcattctttcttaaccagaattgctttaccttcaaactcaagcaaatcttttgtttaatccttgagaattgatacttcagaggatttctttatttcagttattgatggacattattcttaggattcagtactgggtcaagatgtgtgttttttcagcaatgtttgactgaatcccaagctttctcaaggcatatttaaaaaccagtactggtaataggcagacttacatacagttttatcagtttatctctgcttttttgagggagagggagtttcagctaagttgggtttgtgctcgtgaaatacaatacaaaaagatttgaccaaataactttctaatcatccttgctgtatgtatattttggtaaaatcctgctcacagggaaaatgtcttgttaatttttggttacactaaagacattctgagcaactaactttggtgtgtagggctaaaattacttgaaatgctgagattgtattgttttgggaagaacttaagtagcattctatttgtgttaaatgttcttgttaaggcaatggaaaagatattagttgaatatattttttcaaattaacttttttgtctttgtgtttttattttaaaaagcttattgtattgtcttgtattaaaaaacacataatggaaaatttaccatcttaaccatttttaagtgtgcaggtgcacacaacacaggtgcactacgcaattcactgccagttacagtagagtaagaagtagatatttgcctttggggatcttgggaagaagactgctatctatctctaatcctcatggaatccttaagtggtaggtgccaagggctaaggtgaggggggagaggtggagggagttgtttaatgggtacagagttgagctcctttctctataaagcatttaagcttttttgttgccattaattgcttctatgggctaaagaaactgaaagtgtgggcaggtaatcacttggctactaatataaagaggaagtgaaacaaaggactggcttaatggttcagggtggaaagtatacacagttaaaagtaatgttatatggtcttgtaaatagttgtgcatatatccgatgtcaataagaattagtaataccaagttaaaagaaaagcattattttaatatttgtataccttttggaaatgaaagatgggattatttaaagagcaaaaaactaaagatgttctagttggtaagtgactttatttgatgtgatttgttattcggatttacctgtgattagagtggtcatatattcttaatagtttcttcctttttgtgagacaaggtaagagcagcttggcatctaagttttggataatgtgttgctacttgattttttttttccccaagatggagtcttgctctggagtgcagtggcacgatctcggctcactgcaccctccacctcccaggttcaagcgattcttctgcctcagcctcctgagtagctgggactacaggcgcccgccaccacacctggctaatttttgtatttttagtagagacggggtttcaccatgttggccaggctggtcttgaactcctcacctcaagtgatctgcccgccttggtctcccaaagtgatgggattacaggcgtgagctgcttgcttttgagaggcatcctaaacatgttggatggcctacccttattttctgaactaaaatatgttaaaattaatttggttttgagaacttttgaaaaatcatctgactttaatctagctaatatgagtttttttccctatgctctgggcactatcctaagtattttacatacattacttaatcctcatagaaaccctgtgatattatttttccttttttacagaagaggaaagcagctatagagaggttaaattgctcacttaaggtcatagatgtaacgatggaattaggatttgaacccaggtggttggctgtgggttgacatttatcattttaactgctttgtgatgttactccatactgagcatgtaaatgttcttggcactcagcacattgtaggatttaaacaaataacatttatatctgttgagcttcttagaatgactggagatgaagtagtctgctataaaaataagataggaagccattgtactggacactactgatttagctaattgatttcaatccaggaactgattagacatttctttctttctttctttctttttttttttgagatggagtctcactcttatcacccaggctggagtgcagtggcgccatctcggctcactgcaacctctgcctcccgggttcaagcaattctcctgcctcagcttcctgagtatttaggattacaggtgcccaccatcacacccagctaatttttatatttttagtagagacggggtttcaccaccttggccaggctggtctcgagctcctgaccttgtgatccacctgcctcagcctcctaaagtgctgggattacaggcgtgggccaccgcgcccggcctagacattgatttctaaccttgaggtccatgtgtgagttccaagagaaactaaagaatgacctcagacaatcatttagcaaatgatattgttttgttcatgtagtatggcttttgtcctctgcttttatacttgtacaataatagaatttaagaactggtcctgacttggtctaggtagtcaaattcaacctctgcattttaccatttgaggaaacaggtaaaagaaccttcttaaggtcactaaaaaaggaagtgccagagccaggatttaatgcataatagctcacactgacctagttttaccatgagccaggcagtgttctagaggctttatatatgttaactcattaactcctcagaacaagcctatgaaacagatactgctatatacccacgttacagctgagaaaactgaggttatgtaacatacacaaagtcacacaactagtaatgagtagagccaggatgcaaatccagtcattttggctccagtttgtctccaaaccctcctcatggttgtaacatatataattgccatctttttttaagagcaaaaatggttgaatatcagccatttcttatagttcaatctgacatagcttgagctctttctatggcatttcagtaccttaccacaatgcgtatttgtggttattattatatcccacttgatcttggtatatgatccttttaatgtgctgttgaatttggtttgttagtattttattgaggatttttatatctatgttcatcaggagttcggcctgtagttttctttttcttttcatatctttgattagctttggtatcagggtaatgctggccttgtaaaatgaggttggaagggttccttcctcttcacttttttggaagaatttgaaaaagattgctgttctttaaatgtctggtagaattcaccagtgaagccaacgcatgttggtccagtatcctgttgaatagaagtggtgagatcaaaaatacttatcttgtttctggtattagggggaaagcatttagcctttcggcattaagtatgttgtcagctgaagatttttcttgtatgtcctttttcaaattgaggaaatacctttttgttctactttcttgagggttttttaaaaccagtaatgagtgttggattttttcaaatgccttttctatgtctattgaagtgatcatgagattttttttgttttgttctgttttattttttagtttgttaatatggtgatttataatgattgcttttcaggtgttaagtcaaccttgcatttctgggctaaaccccacttggtcatgtctatgaatactttatttttggatttttatttactaaaacgtttagaatttttacatgtatgtttatgaggaatattggtctgaaattttcttttcttgtaatatctttgtcagtcttggtcagactagggtaatgctgccctcacaatgtgttgagaaatattccttcctcttccattttctgggagagtttgtgtagaactggtattatttcatctttaaatgtttggagtaattcaccacagaaactatctgggcctggacttttatttgtttaaaaatttttaactacaaattcaatttgtttgacagacagtcaagttgtctgtttcttcttgagtgagctttagtataatagtttgtgtctttcaagaaatttgtcagatttattggcacgaagtttttaaataacattccctttttatccttttaatatctagaattggtaatggtgtcatctcttattgctgatgttggtaatttgtgtcttttctttttttccagcgatggtagtcaccctgaactctgtcttctggctcttcaagccagaagaaatgggcatcttgcctggtgcctttcctttttaccaattgtagacatccctccatttttggcaagtttttcgttgtgctccagtgccttcaggtagtggctttttacattgtccagaggttatcaacggtaagaggctatttttgcccagtgctgaagatggcatctctgggttttggttttgtaacattctagcaaagccagacatgctttgctgcagtgaaagtgtggaactggataattgagcagcactgtttattcattgttgcctttattggatctcatatggaataaccccactggatattagagtaaattacagagttaggaaaaggtgaaaaagagaaatgtcgggttagctcttttcaaaatattttcagtgggagaaattgttgtcactttaaaaagtgagctttttaaaaaacgaacattttgagtactgaatatgttaagcttctgaatgattttgagtgcttttgcttgtcatggggaagtttttcaagagaagatgaccttttaggcctaaaaacaaagcatttctaattgcttaatgtgtattgtatcaagtaaattatcattaggtcatattaatgctatgatacttaaatattttatttgtagtggaatccattttctgatcattttatactgagcatttatgccaattttagtatatattgtaattcaaattaaaaaatgctagaagtcatcttaggtctctggatctcagcctggtatttactgagtagctgtcaggagccatgcactgttctaggcacaggaggttcagtggtgaatgaggagcttatattcttagaagctcagaaatctaaccctgttagcacactgtagatggtcagactcacatgtacttgccctaatgccaatttgttcatctgaaatgagaagtacagctgttaattagactggtgaggtcgaactgagagattagtgcattttctctttatagacaacccacatgggaagccaaattacaatcacaaggttgcttggtgagaatggaatcaaaacaaagggacttggatagataatccatgattaggacacacctgccacagagactatttgggttttccctaagtagtgctgagcagtaaagcttgccagtgtctgggtcttcagacttatttttatgctgaccattttcctttgttcacaccatctttttcaaaccaagctgcaatacagttcactaaatgacaagcacattccaggcctgcttcctaagattaaacttagatcacctttggaaacatgtagaggcttccaaattctgagcttaggtacacacctgtagagagtctcttgtttgatttcaacagagtgctaccttagccattgtgcaagtgcgtttttaccctcagagggtatcatttttttcccccttacatccatggtgtgggggaagtgtttgagtcccttatagtggtccccatgtactgccaataataccgttttattctgttcaagtggtaatggaagatttgacttctgtttttttatatgatttactgatgccaaacccttattaaatcagtccccacttctaccatgtttccacaggagaggctaatctgtcttaataaggtaaaatgaatttatttgaaaatgtagtaaatgtaataaatagctaaacttaaacctagaaagtcctggaacccaagcatacatgtttgatttttgttgttgttgtttaatgaggggatatactggaattctctttaaaagatccagggaacatgcctttagggatgaatcacatgccttgaggtctaatagagacccaaacattggaattgtgagccattttcacatactagattcttatattgttccttcagttattgtctgtacaccagtggcccacaatccaggttaaagtactactcagtttgctgttaaaaaaagtaaacgaagttaagacccagtgatagccatggttgtcatattttcagtacaaataaagtggtatcactgtccatatatccaccaaaacctatggtcagccagcaaagccttggcaggtacctgtttgcaggttccttggaggcaacaaccataacaacaatagcaatagtgaaagcacatagtgatatatgtgtgtagtgctttgtagttttttcacagagccctgtcacctgaattatctaaatttcacaagtgcaatatataatgtgtaggtatgctggtaaccatttctgctttctagtcaaccataaccttacctacactcttttgtactataaatttttggcctgagaaataggaaaatctattttccccattcagactgccaaaataccttcttttatggacaaatttaattatttcgtgaaattttaggctatgcttctaaggattcttaacaccaagtttaaagtcttttcttgatttattttttttaagctaataaaaataccaggccattctcaaccattttttagtctccacaccattcttaaaatatatcccaattaataacagttttccttacattacttgtgcagatatcagtgttctgattttgcaccgtccagtatggtagccactagccacaggtggctatttaaataaattatttaaagttaaataaaaattcagtttctaagtcacactagccacatttcaagtgctcaatagccattatgtggctagtgactacagtgagtacagatatagaacatttccatcattgcaggaagtactattggaaagcgttgttctagaaatctaattcctgcttagttttgggggggaagatagtcaaacagttctaccatttatcattttatctgcaagatttatatttctttttttttttttttttttttgagatggagtctcactgtgtcacctaagctggcacagtctcagctcactgcagcctccgcctccagggttcaagtgattctcctgcctcagcttcctgagtagctgggattacaggtgcaagccaccatgcccggctaatttttgtatttttagtagaaacgggatttcaccatgttggccactctggtctcgaactcctaacctcgtgattcgcccaccttagcctcccaaagtgttgggattacaggcgtgagccactgtgcctggccaagatttatatttctaaataaatctactaaacctgcctagatgatgtaaaatactattttacatatactttttaaaaatatacataaaacttggaggctgaggcgggccgatcacctgaggtcagaagttcaagaccagcctggccaacatggtgaaacttcgtctctactaaaatacaaaaaatgagccaggtgtggtggcgtgcacctgtagtcccagccactcaggaggctgaggcagaagaatcacttgaatccaggaggcagaggctgcagtgagccaagattgcaccaccacactctagcctgggcaacagaacaaaactctgtctcaaaaaaataaataaaaataaaacattatataaaccttttattttcttagcgcctcctaagttataggtctcacaggtaagcagcaatgggaattgaagtagacactaatgtaataataaaaacgtcccagcttctttacccttcagtggatatttgctgaagtgcaacagaaaagataggtgcaggtacactgttctgcactaaacagaaaacacgtagccatcatataaggagaagcgaccgactgacagtaatcttaagatgattcacataattaagatttcatgatgcaaaaattcaggtcagtcatactctcagataaaatattagttaggggatttagcttgaaaaggcacttggcagttggagaatctctcaaatgtatagctgatattaaaaatgtgttatcacttgttaggttcttaagtgttacaaattaattcagtacgataataaatttgctttttctctttctgcttatatattcacattgtacagaatgaaaggaaaaatccagactaacatccaaagactgtatttttgccatgagtgattcagggaacttgaggttttaaggatgtagtatcctataatatattcagtttaactgggacaaaacatccagagaaacccctttgatccttgcctgtgtaagaatggtctcatgagtggctgaatataatggagaggcatatttattgggggtgaccagtactattccatggtgaaggacagaattggagctttgtaggacagaggtatatctggatacatactaaattctagataggtgaagaaaattgtgtgaatttcgaaaaagtgattgccttttacaaaaaacaagagcaaagtaccacaaatactggcagttgttacattagtgtgattctgtatgattgaatgtatgtttaatccctttttcacttttaaaagtcattactttcttgcaaagttaaacaatgttaaagggcaactgtttttttaaaaaatatatttaattgacaaagattatatatgaaaggtgtacaatgtgatgatttgatatgcatatacattgtgcaatgattaccacaaccaaattaacacgtccatcactatgcatgctgtaccatacatacccagaacttgttcatcttataactgaaagttcatcccctttggccaacgtcttctcatttcttccactccccagaccctgataaccactcttctactctctgcttctttgagttcaatgtttttagattccacatataagttacatcatacagcatttgtttttctgtggctggtttatttcacttagcataatgtcctccaggttcatccatgttgttgcaaatggcaggatttccttttttatggccaaataatatattccattttgtatgtgtgtatacatcccacattttgttcaaccgtttatccctcagcggacacttaggttgtttccatatcttggccattgtgaataatgctgcagtgaacatgggcgtacagaaaaacctcttcaagataactgatttcatttcctttggatgtaattttttggggaacctccatactgttttccataatggctatcccagtttacattgccaccaatagtgtacaagggttctttttcttcacatccttgttaacatttgttgtatatagctagcctaacagatgtgaggtgatatgtcattgtggttgtgatttgcgtgtcgctgatgattagtgatgttgagtaccttttcatatacctattggccgtttctgtgtcttctttggaaaaatatctattcaggtcctttgcccatttatttttattttttatttttattttattttatttttagggacagggtctcattctgtttcctaggctggagtccagtggcacaatcatagctcactgcagcctcaaactcctggactcaagtgatcctcccacttcagcttcccaagtagctaggactgtgggtgtgcatcatcatcatcaggcttggctaatttttttttttttttttttttttttttgagacggcctcacctctggcccaggctggagtatagtggcacagtcagggctcactgcagtctcaacctcccaggctcaggagatcctcccacctcagccaccccagtagctgggactacaggcataggcgtgcaccaccatgcccctctaattttttttaaagatggggttttgccatgttgctcaggctggtcttgaactccagagctcaagtgatccactcaccatagccgccctaatttcttttttaaaagcagggtcttgctgtgttgcccaggctggtcttgaactcctggcctcaagtgatcctcccacattagcctcctgagtggctgggattacaggccattttttaatctggttgtttgtttttgtgctattgagttgtgtgagtttcttatatgtttcagatattaaccccttatcagataatatggtttgcaaatattttctctcattttgtaggttgtctttttgttttgttaattgctttctttttagtttgttgcagtcttacttatttatttttgctgttgttgcctgtgcttttggtgtcatatctaaaaaaattattgccaagaccaatgtcagggagctttttttccctatattttcttctaggagtttatggtttccagtcttacatttaagttttagatccattttgagttaatttttgtatatagtatgagacaaggatttaattttattctttcgtatgtggatatctagttttcccagtaccatttattgaggagacttttctttccctgttgtgagttcttgaccctcttgtcaaagatcggttgaccatgtatgcaagggtttatttctgggttctctattctgttccattggtctttgtatctgtttttatgccagtaccatattgttttgattaccatagttttgtaatacagtttgaaatcagggagtgtgatgcctccagctttgttctttcttaagattactttggctatttggggtcttttgttgtggttccatacaagttttaggattgttttttctatttctgtgaaaaatgccattggaattttgataggaatgacattgaatccatagattgctttggggattatggatactttaacaatattaattctcattgtaaagatgataattcattttatgaggccagcattaacctgatattaaagccagataaggatgctacaagaaaataaaattgtaggccagtatccctgatgaacacagatgcaaaaatccccaataaaatactactagcaaactgaatttaacagggcattacaagaatcatacatcataatcaaatgggatttatccctggtatataagaatgtttcaacatatgcaaactagtaaatgtgatacaccacattaacagaatgaaagataaaaatcatatgataatctcaatagatgcagaaaaagcatttgacaaaattcaatatcctttcatgataaaaacccctcaacaaattagatatggaaggaaagtacctcaacacaataaaggccatgtatgacaagcccacagctaacatcatacacaacagtgaaaagcagaaagcttttcatctaagattgggaacaagataaggatgcccacttttactacttctttttttttttttttaatctttcaagcttttatttaaatgccatgatccaggatggattttagatcttgttgaaagcagccacatccatggactgcacgtagtcctcaaaagcagtgatctgctcctccagcatatctgttccgactttatcatcttcaactacacactgtatttgaagtttcttaattccgtatcccactggaactagtttagatgagccccagactaagccgtctgcttgaatgcttctgacgcgctcctctaatttcgccatatctgtctcatcatcccaaggtttcacatctagtaagatggaagacttggcaacaagtgcaggttttttkgctttctttgattcatattgtgcaagacgttcttcccttagcctctttgcttcttcactttcctcctcatcatcagatccaaagaggtcaatgtcatcatcatctttactatctgtagctccacttcctgtagtgtcttccacatcggcaggaccatacttgcccaaagctttcttcactcctggcaggctggccttttccttttcgtaagacttgatgtgattataccaacgtagggcatgacacaagtcggcaggcagtgggctggacacggcttcaaatactgccacatctgcttgtgatggcacatacccctcgatgtagctcttgtccgccaggtaatcgttgagcacctggaggccggcggggcttttcaggtctctgaaacccatggtgtcggctgtatccgagagctggggagcagcagaaagagcccacttttactacttctgttctacatagtagtggaagtcctaggcagagcaattaggcaagagaaaaaagtaaaaggcatgcaaatcagaaaggaagaagttaaactgtttgcagatgacatcatcttatatatagaaaaccctaaccctaaggattccaccaaagaactgttagaactaataagtgaattctgtaaattcggaggatacaaaatcaacatacaaaaatcagttgtttctatgcactaacaataaactatccgaaaaaagatattaagagaaaaatctcattggcaatagcataaaaaagaataaaatacttaggagtaaattaagccaaggaggtagaaggcctatacattataaactataaaacattgatgaaagaaagtgaagacacaaataacatggaaagggcctgtgttcatggatttttttttttaaggcctttccgttaggtcgggtgatatgtgtaatgttcacagagaaagcaagtagtccccttttttctatatgcattttagatcttctttgctgaagtaacagcttgttataagcatgagtatggaaaagagatttttattcgtatttaaagaacatcagtaataaaaacatttccctagctatgacaaagaacagcctttgtttaagggttaggtatgtctaaagaagtgactcttgttaagaactaaggaataaaatataattcatcttatcttgtgtagggaaaactgtcccaacttgaaagccgctgagtgcctaatttacatttaaagctgaagtaatgaagcctttatttttttgccagaaactcccatttctctcccaaatacattctctatcaggaaaaaaagctcattattttgcatggtaatgtgtctttgctgatgcagaaaagcaacataattcaggatgaagggttaatttaaactttcttatgtactcttttgcagataattagaattatttctcagaatctaaaggtgggtttgcagagtacaccaaaaagaatagctttatcctggtgaattgcaaaggaaaggtacagtcctttactcttcaggagaaagaggttcctgaaaactgtggttggatgtagaaattaactctgagaactttagacgtcatagaaactatagttgcaggaggtttaaagtttagagtgtgtctatggaaattcttaagaacaaacagtatttacattcatttaagtcttctcaatgtaatacaaatgaccctttatactcttttatttagtaataagggatccattttctttttcatttactatcccttaagggaaaattggctttgttgcagataagcatgctttgagacatttcccctcctccactatggctaattttctttgacactgttcgttgcctttctgatttttaaatggagaaattgttgacgtccatctccctggagctccccactcacatcctgctccctcctgctgacttagatgtcgtcagtttggcttcattctaaaaatctttatttctgttccaacattagcttttaccttcctttcctattctcaactgcagcttcatctttctctaattatccccaacaggattgaatcatagttttgtgcaatttacatatactgaaactgaatgaaatttttgaagttgccccaaaaatacacagaagtaaaattgagaatatgcaagttcagtttaataagattagatatgagaaattagtgtcatatcctgcaagtgtatatgaatatgtgcactcattttacgtgtatatacagcccccactcatttatttatgtatatgtatatatatatatatatatatatatataaaacatttaacctaagaagaacttgcaattgttaagctgctcaagaactttcagaggttctaacacagttgcacatttcagcaaaagcaggcaatatgcttactgtcaatcggtggcataatcgtttattgagcagtgctttggatttgtgaacaaatggacttattatacagccttttggagcctaaatggttccaaagacaaaaatcttctctgctactccagcataagggtttcagatcataagtagcagtcaactataaattccggaagccagacctgtgtcatctatcctcattccttgaaacttgggggtatcctagatgaggtaggagatgtcactgaccctgcccaactggtagtcatcagactttggaggaagcacaaacaggttggaacttttgttctgtgagtacgctaaactgttaaagccttgattgtttttgttgttgttgtttgtttggagatggagtcttgccctgtcgtccaggctggagtgcaatggcacgatcttggctcactgcaacctccacctcccggttcaagcgattctcctgcctcagcctcccgagtagctgggattacaggtgtaggccaccacacccagctaatttttgtatttttagtagagatggagtttcatcatgttggccaggatggtcttgaactcctaacctcatgatccacctgcctcggcctcccaaagtgctgggattacaggcgtgagccaccacgcccggcctattgtattgttttttaaaatttatccctggaattggtttgtgtttttattttttaggaatgattatatacattgaccttgtgccacatgcttcagattttataagaagtaagctgggatgttccaagttccgtgttgcatagagttcttatccatgaaaaaatgtccaaaaagatgatttagcaaatttaggattatttcatcctaatttggtattctctatagtgggagttttagagtgtttcttgtgataatcattatagttaagatttattgaatgtttactcaaaaaagttgaatttttctactggttttgggactacttgggtgagatatgtgaaatagattcaaatattgaaatattgaggtactcttataacagaaaatatcaaagctactgccatagtttattagaaatcaggagaaagacttttttttattgttggcctgaatgagctgaagttcagagtaagactgtggtcattattcattacctcttttttttcaaacactaaaactcttgggtttctgtggacaaggctgctttttaatggcatgttctccaaacagctgttaagcacccccctccccaataccacagaccacatctgttcccactgttgattagctagagggtggagaaaagagaggctgtagcatgtgtaattaccagtaattaattcttgttgagcctcctcatttccttctattctaactacacctactcttcttcctgcctctgttgtaaattctgtttcatgttagctacttgtggaaaataatcttgatggttatacagctgttttcctaaaattttatattcacctaacagtgaggcttttatttttcttctggtggcagaatcatttaataaggcatgccaaataagaaaataccaragtaaccaagcatatctcttggggctagctttcctgcttatgttcttttactgttgatactatttccaactgtcaagaaattatttttcagatatatcctctgttaaaggaactattgcaaggcatgatttagtgtgaggaaaacaaacgtaagacacggtcctggtcctcagtgttaatgtgcagtgtatggaaatataactatgtaaattaacatatattaataatatagtaatttccaaaattgtcaagatcataaggtggaggtagtcttctactatttttcattctctttgggataaagttgggctgacggaaattcaactttgagcgttattaatatgtcatggtcaaagagagatatcaaaggcttgctctttaaagaaaattcacagcatatcttcttatttacaagtcttaaaagcctagattttctgtaatcccagcactttgggaggccgaggtgggtggatcacctgagatcaggagttcaagaccagcctggccaatatggtgaaaccccatctctacgaaaaatacaaaaattagccgggtgtggtggcaggtgcctataatcccagctacttgggaggctgaggcaggagaatggcttgaacccaggaggtggaggttgcattgagccaagatcgcgccattgcactccagcctgaatgagaagagatagactccctctcaaaaaaaaaaaaaaaaaaaaaaaaaaaaaggcctagattttcaaaaggtgttgctttgtgtgagtctactttcaggaggatgaggtttcaagaagacatttcaaaactgctttttttgtttgtttgttttaaaatttatttggtctatcagtcaagatcctggcaggaaagagatgacattggtattaataggatttgataaagagattgttcacaaaaatgtgggcaattatagtgaaatcacaggagaattgtgtgaactctggtgctagtcataggagggttgttatatgaagagagtctcttttttttgttttgcttttttgagacagaatctcgctctgttgcccaggctagagtgcagtggcaccatctctgctcactgcaacctctgcctccatggttcaagcaaatctcctgcctcagcttcccaagtagctggaattacaggtgcctaccaccatgcccggttaatttttgtatttttagtagagatggggtttcaccatgttggccaggctggtgttgaactcctgacctcaggtgatccgcccgcgccagtctcccaaattgctgggattacaggtgtgagccaccgtgcccgtccgaagagagcctcttgattgtgggtggatggaccccgccatcccctcggaagagacctgttgcccttcctaatgcccttttgtttctttttctttttcttttgagactgagtctctctctctctctattgcccaggcggctggagtgcagtggcatgatcttggctcactgcaacctccacctcccgggttcaaatgattctcctgccccagcctcccgagtagctgggactataggtgtgtgccaccacacctggctaatttttgtatttttttagtagagatggtgtttcaccatgttggccaggttggtctcaaattcctgacctcaagtgattcgcccaccttggcgtcccaaagtgctgggattacaggcgtgaaccatcacacccggccttccctgtttaattcttcttagcatctccactaaacacaaaccaagaaaggtgatttttctctttgttagaacttcttaggaaaacttcactattctcttattccatctgttttggggttgaggagagctgttatataagaagttattgttagggtttcttgtattcctgttgtaatattctcaagctgacatatttgtgatagatcaacaaagcagtaggtattttgtaccgctacctaagcaataaaagcaagtatgtaatgctgtagtaccagagttgtggtttttcccctgcacaatatattaactaagcagaaaatttaaaagaacaaagacaataaaagtaatgtttgttagtggtagtttgagatatttcaggagagatgagatgtgaagaaaagcaatggccatatttagaaagctgcctcaaacccaagagtatctattgaagtaaacttgatgacagacttttttcctcttcatgaatcattgtattcctataaaagcgaaaattcctcttcatctaaacaaatggcttcaacatctgttttcttagtttctcaaaagggtgtcttcggcttgcatttttttttttaaaagtgtttatctgtttaaaatgaaatatcgtcaaaagcagtttgtacatcaaaatccaagttggtcttcagcttgtaagaattagttgagaattatctggtggtgttgatagtggtataggggaaaaaagaaattacattttgtattctgcataggtaagttcttcttcctaaccatattctttaaatttttttgacttacatttaattttacatgctcttagctttggaggaccgattgactaggaaacttgatcgttgagagcgcattccaacgttttaatgctctgggttctgaaagtattttaaaaattagcagctggagaattattctgttagtcccattgactaggaactgatctgtagttggtttgattcttctcttgctcccataatcagtttccttctaccatgtcactaagagaaacacacttataactggttcgtaaatgacttatgtgcttttctgaagcactttttcaattcccagtctcctgtgaatttgtataccctcaatggtgttggttttatcttttttaatctttaatctcttcttgggtgacaggccaccatgcccttgagcccatcctgccatttaaaaataaagaatgagaagcagctgaaatgctggctcttttgcagctgacaggaatcagatctattgcttagattctttatctgggtacagacatgccagtggtgtgtgacttgttctagccatgccatttgcagtcacaaggtttaagaggatgggagtagaggaagttgtctccaagagaaagaaagattttttttttttttttttggatgtaaaggtcaaggagaaaggctgtagatcagcacatgggttcccactgcaggtcacaggactcctggcttcttaccacccagtggaatttctgggccatgatagaggtgtttgtctttccgaaaaggttgcataggctcctcccacccccatccaccccacagctgtctgttgtgtctgaacagtggcttgctctgaggttaaaggtccatgaaaactgtgagacatttgatgttataaaatctaattagtgacaaaagcaattaatataatcacttatgacttagtttctctggaagggtatacttatctttattgaataagtataaatggtaactgctagcaaatggcaccaaacttaacataaaatagaactacccccacctctctcctcctctccagtgcagaagagaggcagtgaaaagggtggttatggttatgtaggtgtagagggctctaggaggctcttgtgacttgattggtgttcagtctccctgttgagcccatcaacatggcctcaaggaggggagctattgcaaaggttttgcctgctgtttgttaagccacagcttgtagttttggttgcacatgacaaagcaaggtgctctccttttttgaccttgttcagaggcttaatacaattatttgtattaagcactagccacctgttaggatcattctcattaaaggtcactgtgtggtgcctgactgtctgactatggcagcctgcatcagatttgctagtggcccctggtttgtgtgacacctgccaatagtaacagaaagaatggagatctgatagctcaaagggaacagaaggtactagaggaggaatgaggaatcaggagaaccatggagcacctgccactctagcaccattaccatggtttttggtgctaacttgcctagtctcccttttctctggctaccccttcagtgagctgtgccaggcatttcgaagagttctgttattgtctgcatgctgatattgctttggtttattgatattaatatattgcatccctgttaagcgttgaatttcttgtacctgaaattccttacatcccctctgctgaatgtcttagcttctgtctgcttctctgtgatctccattgaggtgttccacaggcatatcctattcagttccaaaactgcccttgcagttctggttgccagcctgtttcccttccctgattcccggtctcagtgaatgatgacactgtttacccagttgttaagccaggaacatgggtatcattcttgactcctatctcttcctaatgcctcaaatccagcccagtgccaagtcttgtagattgcacttgctaaatgtctgtgattctctgtctccagtgtcactgcaattatgctgttcaggcctcattacatctccctggacactgcccccctcaagtattctccagatgttttatagccagagagaactctttaaactgccaatctgcttatgccactccccagtttaaagtccttaatgtgacttacaaggcccttcacatttgggcctctctcccaccctctctccatttcccctgaacattctagcctcaaccatacattttattttctttgcctttgtaaaaaaaaaaaatttgtttttttaaaacttaattttttttttactcaccattcagcatttccctgtgttctttgcatcttcacaaacactgttcttccatcctccttttcctgttattccctatactcaccttccccttatacattatctgtttttatggacttttctctaactcctgccccaggagcccctgttatgtacatgtgtgtgtatgtagtatgtgtgtattttccaattgcctatttggttctctgctctactgggggttatgccctataagagggaagggatcatgtctgaatcattcacagttgtgttccctatgacctacgtctagcacatgagaagagtttagtaaatactgttggtgtttgaatgaatgagttccttcttgaggttctaaatgacaagagaatatagtgcttcctataattcatatcaaattcttgagccttggccaaattagagagtggaaatgcacaggctgggtgcagtgacttacacctgtaatcccagcactttggggggctgaggtgggaggattgcttgagtccaggagtttgagaccagggtaggcaacatagtgagaccctgtctttaaaaaaaaaaaaaaaattagccaggcttggtggggtgcgcctatagtcccagctacttgggagggtgatgtgggaggattgctttagcccaggaggtcaaggctgcagtgacccaagattgccccagtgcactccattctgggtgacacagcgagaccctgtttccaaaaaaaagcacaaagttcaaaagtgaaggagattgctttcttttaaagcagtgagtagccaaacctcatatatcctttatattgcttcttcatattctgtatctccatcctaaattacttttctcaacttgatctttgtttgatttaaaatttctctggattcttcccagcaaaagtatagagtataatgggacaggagaaaatgtgattgataaatgggaatatgtcatttgattgattcttaaatatatagttgacccttaagcaacatgagtttgaactgtgtgagtccacctatacataaatgttcttccacctctgccaccccagagtcagcaagaccagcccctcctcctcctcagccctactcaacatgaagatgatgaggatgaagacccttatgatgatctacttccacttaatgaatagtaaagatattttatcttccttataattttcttagtaacatttttttctatagtttattttaagaaaccatttttttctagtttattgcccaccttcatattgtaagaagaacaatttttctctagtttgttgtttatatgtatataatacatataaacatacgaaataatgtgttaaccgtttatattattggcaaggtttctggtcaacggtagactattagtagttaagttctaagggagtcaaaagttatacatggatttttgaatgcaaggggattggtgcccctaacctccgcatcgttcaagggtcaactgtatttattctagagtcatgcctgaacatgtgtctacaacacatgtttctctggacagttgaacacgtttacatttccctaaaactaggcagtctttctcagaagattttttttaagtgggacccctctgtattttaatcatagctagctcatagaatctgtttgttgaacttacagtagaatggaagtgggcaagggatgccactttgtaaaaaaataaagagttgctttaagaggccgtctagaaagtgtggtcatgatagaacataatttagtatttagctctggtactgagcaagggaattaccctctgaggtattgggcctaaaacattctccctcgtctcacttcatttgaagaagagagtaattatggacactgcaatggctattttgtcacacactgatcctaagaaggagctttctagagatcagaatgcttctgtcaaaatggtgacagcaccaccttggtcactgtccaacttcgggttctccagactaccagctgtgtgctcttccaggattgagcttcagaccaggtgtttagtaatgacaagggacagcttgttaaatctgccatttgtgggagctgggagctcaaagttttctggtcagattttcccatgaccttagttataaagaaaacgttacagattctagaaaatgccaatgtcctttttagcgtattacactgattgcagtgcttcagaattgcccaacttcattatctgagcatagccagcctgacgccttcttctcaaatagacaattatgatcaattaagcacttttaggccttatagaatacttaattttattagccaattatttgtgctttgaaagagttaatggtagctacccaagccattattagaaattagaatgtcccaaaatagaaaggctatttcctttgtgtgtggcactgcagtggaaaatgccaagcatagtttttactgagttaaagggtgagggaaggcggggtgggggagaaagttacatgtaaatcatttagccattaacctaatgggtgggtttataaatcctattactataagcccttttcatttccactgaggcctggtgcatgcttgatcccactaatgtaaaattcattccgtctaagtgattactgaagtaagacactttgagtcaattttaatcaggttgtgtgaaacttgcttgagtgctgatattcactaaagcatggacatagtttggccgtgtcttaattagcccccctggatgagttatatgaggagtcagtcaggaagccaaatctctgagccttttcacatatacatgtttctgtgagcaaaataaactgtaggtaggggctgaaaacacccacctcaaaagcaaggggcaaggacctttgggtgagtgtgtttctagtcttaatgaaaattgtgaatgttaagaaatctgaaagttctattcttacggtgaattggagcatcctcaatggtacttatatttaaacaaatcagaatttcaagtttgattaaatatgtggatcttctttctagaaaaatgcacgtaagcacacattcaaatctttgctgacagtttcaggggattttcagatttcttgaccttaggttaatacctactgctccagttttaattttagtatcttaggtttttgttttttttttaactggggatgtaatatttaggattgtataggctcatattgagctcttgtgtcagtgagtagatttggttcaagtgtgctttaaggccagctctacaagctgtccactgtcctgtgtcagatataacccgaagaatggcagcaatacttgtaaattcaagtgaaacatataggacatgaacttctaaactggaggttggagtggaagaggaatggagaataagaatgttgtgaaaggaaggtttctttaaaggtgaaaactgagttcttaaaagtcagcatgtgaagtgggtttttaagaatccacaggatgaataaatagtcatgctggggacaagaaattataagacacgttataagacagggaagaaattcacttttcctttcacacattcaaaggcatagtttgtagtattttaagttttgggatcaaaataatagccctgtcaaactgtagggcaataatggagagatactcataaatcgtattaaatttgtctttttgggaggagaagcctttcagaaattgttgtttattcagtgttttatattcttcatacatgagctaccagaaggtctaggttgtaaattaaggatttaaaacaaaatcagtttatctggaaactatagttgtatgggagaggtacacttatagtcaagtttataattaatgggcctttgtcattggaatagaaattcttttctcttgagtgaatatttgtttatataacatgcattgtgtttgaaggtgggatcaaaactgattcactcttcatttcttgcatggaaaaagccagcatttaaatgtgtactgtgtgtgggcttaattgctgctttttgtaaccaactttagggtcctgttgttgtggagatgcacttactgatcgataatggtttgctcttcttaagctggaccactaggagttttcctccttttactagagcctaaaaaataaatatttattgaattattactttgtgccaggcatttcgttaggtttaatgcccatgatatgatctctgcctataatttgcttatggtctcttaatcttaccttttgtaagagagtggtgtgttgtggtatgcacagagtactttgggggatacataggactaggatattcattaatatcattcggttggggagtctcgagaaggcttttctgacagtattaagttccttgtgaaataagtagatgttaggtaataataacccctaacatttattgagctcttatgtcccagagaccatacaaaacaaagtacatacatcgttaaatttaatgctcacagtagccctattaggaagcttcagttgctatctccattttacagttgaggaattggaaggttagagaggttatattgtttgcctgaggtcatcgcacagcttattagcagtgctattaggctttgaacccaggtagcctatattagggttttccagagaaacagagccactaggagaggtgggtgggtgtgtgtgtgtgtgtgtgtgtgtgtgtgtgtgtgtgtgtgtgtgtgacatttattgtggaggctgtcaagtctgaaatctgtagggcaggccggcagcccagggaatagttgatgtttcagctacagttcgaaagcagtctgcagcagaattcgttctcccttgagagacctcagtcttttccttttagggccatcaactgatttgatggggcccgctcacactgtggtggatatactgctgtactcaaagtcaactgatttaaatgttaatctcattttaaaaaaatacctttacagtgacatctagactggtgtttgaccaaatatctgggtaccgtgacttagccaagttgacacataaaattaaccatcacacagcctaacttctcaactcacatttttaaccacttggggaaagagcatgtaaaaacacagaagcaagaagaaaagcatagcctgtttaatgaacctaaaatattttgagagggctggtttgaaggtgcatgtaggaagtgttagaagatgagataggcctcaactagatgagtctcaaggacaggctcaggggtttgaattttatttcaagaagtacattttattatagaaagaacactggcaaagtgtgaagattggcttgggaggtagtgatgctagagacaagtaggccaagagagtgatgggtgtctgaaggaaggacatgggaatgcagaaaaggtgccacattggaaagatgcagtatagttagtgtagcatatgtgggctcattggattagaaaggaaaccatttggggccaggcgtggtggctcatgcctgtaatcccarcactttgggaagccgaggaaggtggctcacctgaggtcgggagttccaggccaacctggccaacatggtgaaaccccgtctctattaaaaatacaaaaattagctgggcgtggtggcgcctgcctgtaataccagctactcgggaggctgaggcaggagaattgcttgaacctggaaggtagagtttgcagtgagccgagatcgtgccactgcactcccagcctgggcgacagagcaagactccatctcaaaaaaaaataacaataataaaataaaagatagaaaggaaaccagtccttggttctggttgaaggtttctggaggggccagttatcatgtttggagctggttaagggtttggaggagatgggtgggatttagaatgaatgcttatgggaccaacagttgaatgtgtgcctggatagagaaaacgctgtcatcagtgtgtatcactgattctcaaccggtgcagttttgctcttcctaggaagtgcttgacaatatctggacacaattttggttgtcacagctggagagaaggagagcacacggcatatgtgtgtactcatactactgatgaaatctagtgggtaggggctagggatgctgctaaacatcctgcaatagacacaggatagctccttataataaataattattcagcctaaaatgttaatagtactgaagttgagaaatcttgatatatatgtagatgtgtatatatacccccgaagtgtggaaaagagatctcaacaggtgttggatgttattatgtattttaaatgtacccactcacattaagtgcataaagatgtatccagacaacttgtgagaacttacgtgtttctagttattttacaaccacatagccctcaaaagcaacctagaatatggaaatatatcctcacaacgctaattatccttgttaggtacactagtacttccttttcctaatactgaagaagtaaatgtgattgaaatacaaaccaaccaaatataatgaagagacatttctacatgtcaaagttggattctagatttttagacctgtgaggaatctcaacctcttcattttataaatgaggatattgagacctagaaagggaaaccaacttggtcccaaatcacttagctggtaattggcagattaaacaagtgctctgatttcagaccctagacttaaaaaaaaaaaaaaaaaaaaaaaaaaaaaaagcacgaatatttgtataacattttatctttgcaaagcactttttaagcctgtggttctttttattcttacctagctcagggaacaaggtggtaatatcaccccaatattagagaaaataaaactaaggtttaaaggcagtaagtagcccagtatcacagaagtgttaagtagtgaagacagaaagtaccatgcttattaaatccatagcccatatttcttgaacatttttagaggaagacacaaatctaagaataacagagaataggaaaaagacaatctaatagaataaggaggaaataaatgttcatcaagtgagagaactgagtagcactgagtcctgcttggcagttgctgaaatttggaatgtggaatgcttaggtaatggttggattatcaaatatcataatatttatattaatatttcacctgcctttctctttcctagccttcaaaaccatttatattttactacccctgttatgctaatgtattgtttaatttccagtttatttctaattttatatcatcggtaatggaagaatcctaaagccattgagatttcagttgtcattctctttttgcattatttgtttagaatttcaccttactcaacattttcttaacttgtaggattttctttgtgtttaatatctgcatcatacaccaaagtgggtttcttgttaataagtaatactatagtagacatgttttcggaataggaccttgaaactttttttttaagctgtggaaagctggtgttttctctctattgtttagtattaataaatactcttttagtctgtaatagcatctaaaaacatttcataacctttggatgcattgtgatacaacagtattctattttaacaagatacaaagactcaggtgttatcctgaacttattaggagaacctacaaatacacatcttagtagtagttggtcttaggttgttgctgttgttaaccttggcacacacaaaaaacatctttctgcttagtaaaccatatcgtgggtatattcatgaacacattattttctttagaaaacaatttttgatacacatctaaatttcctttctagttcccactacccttttccagctttcagaagctcagactggggttaaaattccttttcgtattattttaattattgctctccccacctccacccctttcctgtttccccctcctcttttcccctaacggcactgttctgcaaagcctgcaatgattgatatgatggcagtgctgtcattctttttaaccaaaaaaaagtcatttttgttctagttattttaatagagtcccattaaagatgtattgctgactgaaatatcggcgtgaagggctctcactgagctgagcccaggaattaagaagtcaggaaatcggctgctgcattgcaagagagccttgtgtgacaccgagtctcctgattggggagatcattactgctattatgactcgacttgcgtaggaattttaaattccatctgaatgtcagtaataaccctcttagcaaattatcctgaataaaatcacgaaggcattttatataataggtgttgaattactggatagatttgctaattaaatactctttgttctgctgcagttgacattacagggtaagatcttgaacaattattctcaacagctgtactttgttaagggaaaaattaaccacaaagtttatttttttatacttgaagttggcagatttttgaaatgtgcttgaaaaaattccatcatccaattggtaatgagtagataaatatgcaggtgttgctgtgaaatcagataactgcagactgccttattaatgaatttagcaagcctttatagccctgttttctagccgttagcacttacaaaatgattttctgtcagaatgggcagctttaatattacacttgtcacttcaaagtgaacttatgaatggtcatcttgtaatcattgtaccttgtgtctagtagacctttctgggtacttgtggctatttttaaaatgtgtttcttcaatggggaaaatacctgtaatgtataagtgtttgattgttgacttctagaacatttatgtggtatgagggttttttttttttttttttttttttttttttttttttttttttttttttttttttttgagaaggtagtgagacataatgaaaagaaagtgaaacataaagtccagcttctggatcaagcttttgggcaaaatctcagagcctaattttcctcatttgtcagttgggatttataatactgtgtaccccttaggattattcacttagcattctataaatatttattaacagctcccatgtaccaggccctctggtagatagtaagaatttggtagctccctgagtagataacatctgagccctccccagtgagcagtttgaattgagggctggacttgagggcagctttggagtgtttctgctcattagcacttggataagcattggactagagaggtcactgtgatacccaccatctagaactgcttagtgaagaaacatgagaggttaggggtcagactggttgtgggttgtcttgtatagaatgggctgaagagttgacaaactgtggtgaggaccttgaacctgagatggaacattatcatcagctgctagtgaggcccactgaaaagatggtgaggtccacagaaatcggtacaacctctatagagagctattgggttatatttattttaaaaatttgaaacataacaacctttgacccagcacacccacttgtagtaatttatcttgttactggcagatttgtaaattacgtatgtatagggattgtttgttgaagtatggttgtaacagtaaagagtagaaacaacctatatgttcattaatagaacactagttaaatagattatgttctatttatacagtggggtactatgtagtcattagaaaagaataaggcagctctttatgtgtgaatttgaaataacctctaggataagtgctaggtgaaaaaagcagttgcggcatactctatagtttaccatttctgcaaaaaaagacatccaccaaaagatttctgccaccaaagagaaaattgttttggtagcagtcctcaggttatgcatggcaatggttgtgagttggtggcaggatggagtaggggtggatgatggatctgaaaggtgaaggttgccagttcacattgaaggtacactcagggatgacatagtagatttggttcatgttgtgaaacaagagtagaagaaattggttattgaatatgtggagttgtagtaaaaggttgacaaactgctcctcaggtattttattgaggtaacagttacgttatggtgttgtccattgtgatgaagaaagctaagcctagctaactgtaagaggcagagggtaaagaggactcttgataagtaattctgtcctcactgtgattaatttgccttgggttggtctcattattgccctttccctaaaggaattgtcaaatattctccmacaatgcatttccctataatttaaatgttaaaaaatgaagatgaagttggggagagtgactgttttttatgttagctgaattttagtgtctagtggaaaagtaattgggattactacaggacctatcagtcacctggcaaacagttttttgagttcctattacagtgaagtctgcacttaggcacaaacatgtggtctgacctccaggagcttgtagtctagtttggggtgggtaggtgggagctaataacgtaaagcatcattcaagtactagtaaaataattcaaacacagatgagaggagagagacaggtatgggctgggccagtcagctcatgcaggaaggatttgagccgagggttgtaaaattcaatgataggaaaaggactggggaaggaattccgggtaggagacacactgcatgagtgaaggcatgaaaagatgagtctgtacacagttaactgttggaagactgggagatttattctgtccagcaagaggatctatgtaaaagaataacaggccatrcaagtggaacagtggtttaggtgcagttgcagaatttgttcttgaccttgtaggcatcggagaggcattgaaaacattcaggagattggtaatgatattcagggtgagttgatgagacctaaagccagtagagacgcgagttggttcatcctcagtgacaacctcattgctatggagtcaggcgctttccaccttgcagccggccctgctcagcatgttagcttgcaccctaggcatggcccttcatggccaccgtgatggttgccactgctccaagcagccctcagtctaaaaaggtagtcccccaccgcctgccccctcaaatcaggaaggaaaacctttcagagaagcatcctacaggaattctccttacgtttaattggccaggattctgttcacatgctcacgcctaaactgatcatagtttccagaatggaattgccatgattatcttaggccaatggtccttaagccagcttgcaatgtaagaaaatgtaagaaaactgttggggccagatattgtttgttttttttttttaagatccccaggtgattccactgtacagtcagtattaaaaccactggcttagcctcatcagaattcaccaccattcaccaccccccaggtaggagaaagggcttccttgtctaagaacataatattaatacaacgaacatctgaacaaaactgggagatagtaataaaggggagagggcaataaaaaatggaaagtaatgggtagatataaaagatactctaaagacaggatttacaaagctctgtaatagggaagacgagaaagaaatgacaccatgaagcttgagcttagttgacaaggaggactattgaagtaggagaaagaaatataaatgaagtaaatctttatttggtctattggaaaggtgacctcagctttaggctgatgctttgaaagatgggtgatagcagagaggcaatagcatggagtgactaagaccccatactcgagtcagaatgcttgggttcatatccttgttttgtcattctaggacactaatttctctttgtcttttggcatctaacaagagaggatattaatagtagctaccccttggagatctaggggaatgaaatgagaaaatgcacaaggtgttccttgcacagcatctagcacatgtattttaaacgccccccccgacacacacactttctctctgagtcctaattatgtcatattactattttttaagaggctgtttgttaaatatgtgttacttctgatctggctcaaaataatttatatcagtttttatttctatccacgttgtaacctaaatatctctgatctgtagctatatgggcctggggacagacttatcaacagatatccacgttcgtcttaattcactgaatgtttcttgagccccacctttttactgggtactggggtagctccaggcaatatagtgaaaatccatctactctctttcttcaatgaatttagtctagagaagaattttaaatgtagtgtgcttttttttgctttttaagatcctgaataccatgaataagaattgccagatttgaaatgctttgttaagctttttttaggcatgcagttctatttaagtattagtaatgagaatagtttgcttttttgccatgttatagagatattttattgtgtgtgtgttaaacatatatatgtatatatatgcatgcatatctctggctcagaatcagcatagaggcaaacttagattatattgatgttactgttattttaagggctgttgttagaaaaccttcaagagctttagaaatacatggaaatggcaaatcattgaaagttacctatctctatgtgcttctatttatgtctttataattgtgtaacttattaatcttgacttttgtttcatttagattttgatgcatacgaaagagatggtacaaaaggtaatgttgagcattttcattgtgtaaaacttaaatatcataactggtaacgtttttgtattcaaggaaaattgtaacccaaacagactggaaattgcttcttaggttgcctagtttaacatttataatccttcctaatggattacagcttttttcttttaccagtgctgatatgatctagcccctgcttgaagcctatatgtgagtgtttcaaacaaattagtaacagtgctaattagagtttatttccaggcctttatactgtatgtgctctagtgttgtttgttatgattgattttttttggcactcttcgtgttctactaaatactgtttgcaactgtattaagaatttaatatggatttgtgcccctgaatttatagaatccattatgtttccgcttcttaaattgccatgaccactaagcatgtggtacagtggataaatatagaccccatttcctagtcttttattctcttttttctcattatttaatttggtattttgtttcagttgaaactagacacaattctccttccactccactctctattttaagaaaatttgagagattttcttgatgtcaggttgcttgcctttctggtttataggggcttaatctttaattgtataccctgacaatataaataataattaacataaacttttgaaaagtctgtggagcctgtaatttctgtagtatggaaaatctttagtttcattgtatgtaatggtcactgtgtttttgttaatttttataatttttgcttttcatcagatgaatcttgaagttatttatggagatacagattcaattatgataaacaccaatagcaccaatctggaagaagtatttaagttgggaaacaaggtgagataattttatgaaattatctgctttacctatttttgtgaattctgtttctaacatggaacactataaattcatgtgtatatgaatgtgtgtgcttctgaaaataataaacttggtgtctctcaattcttctatttttctgtctttctttattatttttttctgagacagggtctcactctgtcacccaggcttgagtgcagtggtgcgatcagggcttgctgaagcgttgacctcctgggctgaagtgatcctcccgcctcagcctcccgagtagctgggaccacaggcactcgccaccatgcccagctaattaaaaaacaattttttttgtagagattttttttgcccaggctggttttgaactcctgggttcaagcgatcctcccaccttagcctcccaaagttctgggattacaggcatgagccaccatgcccaatcctcttttttttttttttcgtcttgttttgttttgtttgtttgttttgacacatagtctcgctgtgtggccaggctggagtgcagtggcgtgatctcggctcactgcaacctccgactccctgcaacctctgactccctgcttcaagcaattctactgcctcatcctcctgagtagctgggattacaggcatgcaccatcacgcccccctaatttttgtatttttggtagagacggggtttcaccatgttggccaggatggtcttgatcttctgaccttgtgatccacctgccttggactcccaagtgctgggattacaggcatgagccaccgcgcctggccccctcttgtttttaattcctattccagctgtttgtttcgagggtgaaattcaaaggttttttttttttttttctttaaatggtagatacatttttcctttgaaaacagtctaagtgttatatgtttaagatgtgttcacgttagtacttactacattgtgattcatatgtctggtaggattcaggtgcattttatacataaatacctacatacatacatatacactcacaactgtgatttttacaggagtacttaaaatatatttgaaaagtcaaggggacatttaaaaataatcatttgtagcctcttaatagcaatttgcaatcgcaattcacagtgttttagaaacacttgctatgttaagatgttgtccccatgaactaaaactaagatgtcatcttacaaactaacaacttcctatctttccctcctggaatatgtggaatttgaatggtagtcttcacttgacagcaagcctggcacattgtgctcatactgggccttgaaaagttgagtattttccctggaggtgatgttctgtgccttgaccctgtcagaaagagcagaggactctttatttgttcagcatgtagttgtttgcttatagtcaaggtgttaagggaggtcttaaacattattttaatagtcaaagtttgacttctttatttctggtcacatatttagttgttggactgtctattcactaactaactgaatagtttgaaggcaagtactgtatgtatgcattaagtctttacattcaacaaggactgtttcataattttcatatattacctggggctgatccagccagtcctgtcctttggttgcatgggatgatctattattgtctctctctctctcttttttttaatctatttttrtccctgcagttttcaatgtctttgctttatacccaatgtaatatcatgttacatacaagccaagtaaaattccaatgttgtrtgacttcaaattctgtttagattaactcttgggaatttgtaacatgttcatcttctccctattagatgtttgagaagctaatactaatatttgaaattttcacaggtaaaaagtgaagtgaataagttgtacaaactgcttgaaatagacattgatggggttttcaagtctctgctactgctgaaaaaaaagaagtacgctgctctggttgttgagccaacgtcggatgggaattatgtcaccaaacaggagctcaaaggattagatatagttagaagagattggtgtgatcttgctaaagacactggaaagtgagttcagctttcagttttgcttttcttgtttgtcttttaaaaattcaggtgtgaatgatgtagagaatgcttatgaatctgtcaagcccaagaacacttctttgttatttttattattcttattaataagaattattaatcattcttatttggaatggaattttataggtagattaaaacttagaaaaagccaaatttgctcagtgagaaatgcctgctctaagatacgtctcatgagtttttaactcatagtaagggtaaaccttcacacttcagatccttatagagttggtttcgttgatgttggtttgttttgctctattgttgctattagaaagtgccttgttttgtgctcctgaatcttcctagagcctcttgagggacataattgttaagattttcccattttatggcttaaaatgttctgggactcaaaatgggccatggagtgagactttgttcccacccgtatgatttgtatataaaagattcttactaataccaagttaagggctccttctcaaatcctgtgtgtacctcagaattagtaaatatcatgattgacctcctagctttgcacctgagactgaagaatgtgataataaggcctgcttctttaagggtcatattaatgtataaagcacccatttcaaaatgaatttttaggccgggtgcagtggctcacgcccataatcccagcactttgggaggccgaggcgggaagatcacttgaggtcaggagttggagaccaacctgcccaacttggggaaaccccgtctctactaaaaatacaaatattagccaggcgtggtggcacatgcctgtaatcccagctactggggaggctgaggcaggagaatcgcttgaaccttgaaggtggaggttgcagtgagccgagattgcaccattgcactccagcctgggcaaagaagtgagacgccgtcaaaaaaaaaaaaaaaaaaaaaagaatttttaggtgcttcatgtaccgtcttaatttgtgaccttgaccaattctgaaagtagaagaattttttatttaaagctaaagttcacatcaattttaatattctgaatgttggcatttataaacttgttttctagtcttcctcttgctatcaagttgggagattgaacaattattgcttctgcaaaactattcttgattaggcaaagttgaccagctgagtataggtcactgtgagccttttaccaaatgtaaaaatgtttgaaatgcttcattgcccccaagtgtacccaaagaggaaagtactttgtatggactgtggattagagtgttctcttcagctttgtgttttctaagaaaagacgcatcataatagaagtaaatttctcttgagttagaaatgtattagtaattaaagctatacaaatgtttttgtcggggttctttttctggcaaattataatgcagctgtcaaactctcgctctgcattttctcagaaatggataaaatattggctttcttactcctttcctttttctttttcctttgggtctggttgaataacatgaagtttttaaggaatagcgtaagggagaacactgagcaacaaaatgaaggtgaagaaagaaaagtttgaaatctttgttttttaaaaaaatttatgtaaaggacttcatatttctactcatctagcgcatggtgttgtgtacaggttgatgaactactgtaccatctgataggcgcannnnnnnnnnnnnnnnnnnncgatgatcgagttcgactgcaagtagttcatcaccattggtactaaaccctttcagtttttagaatctgttgcaaaagttcagacagatggtagcttttacaacgaatcaattcctttgctgaaatttccacatcacagatcattcgaccacaggtagcatttctttcaccaaatccactccggccctacaagatgggaacaaaaagcaaacttcatgaaagagcagacactgagaacatttctttctaacctattttgaagctggcccaagagttagaaatgtattagtaattaaagctatacaaatgtttttgtcggggttctttttctggcaaattataatgcagctgtcaaactctcgctctgcattttctcagaaatggataaaatattggctttcttactcctttcctttttctttttcctttgggtctggttgaataacatgaagtttttaaggaatagcgtaagggagaacactgagcaacaaaatgaaggtgaagaaagaaaagtttgaaatctttgttttttaaaaaaatttatgtaaaggacttcatatttctactcatctagcgcatggttgttgtctcaggtggagatgatatcttgatatcagagataatgtcttggtgctttgtgaggaaagtgaaatatttgtcttctaaaattttatcttatgaggagaatataactgcttgtgaattttgtaattgcataaaaatataatggaacacatgcttttcttcacattttatataaaatattagctgccacataaaaaatgatctgtatgtttagggtcaaaccccacattagaaggctggcaaactttcggtagagttggtgttaaaaaacaaatagtaaccgccttttygacattaaccctcatattagctcttactgtagctaatgttaaccacatgttaatctaatggcatttctcttccttcttctcctttactagtaaaatatattaaaaaatcaactgctgtctttgttttgtttttttttttttttttgcagctttgtgattggccagattctttctgatcaaagccgggacactatagtggaaaacattcagaagaggctgatagaaattggagaaaatgtgctaaatggcagtgtcccagtgagccagtttgaaattaacaaggtaaatgtagcatttattgctgagcccagctgctgtcatgtgtttttcacctccttcagatagttgaagaaccacctcatccttgcaattgaaataaattctagctggtgatgaaagctgcttaacaactatctcacagattgagtattagcatacctcttccagccacaggtactgccatgtctgccacagagaccttctctgtctagtccttactttaattcttggaagacttgtttccagaggtcctatggagtgatacagtttacattccagaggtcctatggagtgatatcactgtatcactccataggactggagaacactactttcttcatagttcccctaagtaatagttgtttggagtgtaggcctgtaagcttattgtgtgcatgtgtgcattcatgtgtgtgtttaacttcacagatggtgattcttttggggacaaaagttatttagggacagtcttagttgttgaaaatagggaatattttttcttacctaatttgaaaaacagaatcttggtttccaaagtattgtgtaataaacaaaatgttaggttacaaatttattcccattttagtacccttatatattcagaagctaattttgcaaatacaatgctacccattttgtggtagatttcgttgtcaaagtgcatacaaaaaaaataaaagaatctaatgctgacagtaaatggaagttttagaatgaagactcattcatagtactctgtgctaatgtaatgcttgtcatttttgcacatttctgtactgttgaaaacatttttatattgcagcaattacagtgttatttagaaatatattttcatttaacataaacattttcccacatttttatattaccttaaaaatcaaattaatcagtgtattaaaaagatgtatctgtttcactgatacatctttatttaaatttgttgattatttaatgttttctattataaataactctattgaacatctttgtttatttatctttttgcatttggatgaattactttcttattttaggttccttgaaggaaaatatttgagtcaaaagatgtgaatatctgtatggcttttgccaaattgctttgtaaaaggatgataccaattgataatagcaaaatatgccagtttcaccacagttttgcatgtagtggtgatgatatttaaataaaactttgctaccataatgaatatgaaactgtatttcacagttgcattgaatttgcatttctttgattcctagaagggatgaatattttcttacagtttatgtttattcttaggtaagttgtttcctgtaccttgactatggcatccttaatgtcatgaaagaagacatttgtttatacattagaaggggacaatgtttcttgtcactggctctccactttaagtgatgaagtgtacacatattggcatggaatcactgtgtcatctagaaagtagattccttttagattttgttttctttctcaaaaatttatatgagtaagagttacgacttaagacttcttttggtcagtttttgcatcaattctgcatattgtatccctgatcctgtctaccttcctagaaacttgggtttctatcacaagggcttccagggatgagtttgggagtgtcagtcctagcatgactgcataattggcaaaataacactgaacacatctcctttagggtagtgggcccacactgtaaccccctcatatgaatgatgacacaatattactagtgtgcaaaaagaaacttagagtcataggtatactgacagtgtctgcattcttttaagtttttattattgaaatttctagacttatgtaaaagtagagagcatggtatcatggatcctcatgtattcattagtcagcttcaataattatcaacttatagtgacattctattattaacaataatagttaatacttagtgtctagtatgataggggctgtgaatagatttttctgtggcagaactgaaactgtgacttactgtctttatattctccatatcacttagcatagctgttggcaagtagtagttgttcagtaagcattgaaagaattcatttgcttatttaatcatccattcagcaaacatggagtacctcttatgtacacaatgctgattctgggatataaagttgaataaggaatacgtggtccatattttcaagatgctggtggtctattaaaagtatttactgtcggccgggcgcggtggcttgtgcctgtaatcccagcactttgggaggctgaggcgggtggatcacgaggtcaggagttcaagaccagcctgaccaacatggtgaaaccctgtgtctactaaaaaataaaaaattagctgggtgaggtggtaggcgcctgtaatcccagctactcaagaggccgaggcaggagaatcgcttgaacccaggaaacggagattgcagtgagctgagatggcgccaccgcactccagcatgggcgacagagcaagattccatctcaaaaaaaaaaaaaaaaaaagaaaagaaaaatgtatttactgtcccattattcttaactttcatttaatagagaagaatttctgcagtgttgatgcaagtacagtaaattctgatgaaagggctatctttattgtagttctgtatctatttacagtaagctattcatttgttaaaggtgatatatcctgaacatctttaacatttgtctaaatgcttgcactatttaaaacttgtgagctattcagtttctacattttactgcttcgaaaggagagtggaatggaagagtctatgtatgtgactggttgtggatggtctcatgacaatatttttttttttttttttttttttaggtgatgctggtagggcttgaaaatgacaggttaaattagggtggagacatgcatgaagtgatgggatttacctttagagattttagcccgtgttgccaaaagcaactgaaaaacagcatgtgtgattttgctgaactactgcaatcttagcttaaatatatttcacaaagtaacacaaaatactttgcagctgatttttatagctctggctaacttgagcctaaaccaccaggaagcatttttttttttttaaatgaagccttctaaaactagcttgtaaagtccccaaatagcctacatctaataattggaaagtatgtcagctgaaatttagaatttcttaacattgcactgaagaataatccattgaagaagataatggatttcttaagtactgttatatcagttaagatttttatattgtattgcttgtccaagacaatcaaaacttcacgtattccaagtttgaggagattcaaatacttgggagagtttcctaggcactctgctaccctgagtatggaatttagtaagtttacataacttgggcatgtgcagccatgtttgaggacctgctttattcttctacatcagttctcagatttcttggtcttaggacacctttatactcttaaaataattgaagaccccaagagctcgtgttgatgtggtttatctcgatatttagtgtgttagaaatctaaaaacatttgttaatttatttaaaaatagcaacaaactgattatataattacaacaaatagcatttctttctatgaaaaatagctatatatttcaaaacaaagaaaaatttagcctgaggagtggtatcattttacaattttgcacatctctttaatgtctagctcagtagacgacatctgggttttcatttctgcttctgcatacaatctgttgtgacatgtggtttgggatggagtataggaagaaatccagtttaacccaaacatgtagttagaaaaaggagaagtattttagtattttttttctgatagttgaatgtattcttctttgatcctgcaccagacgtctacagatggtattttcttcgtaatgtggaatctgaagccatatcaatgaacttttcctgttctcttatattaaaatctgttggtctctgttgtactttgaaagaatattttacccatgcgtggcatgagttgatcatttgttaaatgttggttccctgaattatacagtatactccaaaatagacacattcattgtacaatatcaaaaattacgttttaaaatattcgtacttatatcagaaaagtttttaagtattgggaagctttccggctcacagaagtagaaaagttttctaaaattctaatttgcacttgaaagcttgaattttatcattgacaatatatactgtcagatttttttttttttgccttgaagtggcaggctcactttttttttgagaaattgtctgccagatacccaagtcagaataacagtagtttgcccattattctttcaagtaaaaattatattctgtgaaaaaggcagctagtttagcttgcaactcaaacagttgcacaaatgctttcccttgagcaatctttgtttttcagatgtgccttgtgtgtactttgttttatctcacaaaatagtagacttgtactcaagggttgagagctgtttttttttgttttgttttattttactttaaatcctgggatacatgtgctgaacgtgcaggtttgttacataggtacacatgtgccatggtggtttgctgcacttatcaacccgtcatctaggttttaagccctgcatggattagatatttgtcctaatgctctccctccccttcctccctacttccccggcagaccccagtgtgtgatgttcccctccctgtgtccatgtgttctctttgttcagctcccacttatgagtgagaacatgcggtgtttggttttctgttcctgtgttagtttgctgaggatgatggtttccagcttcatccatgtccctgcaaagaacatgaactcactcttttttatggctgcatagtattccatggtgtatatgtgccacattttctttatccagtcagtcattgatgggcatttgggttggttccaagtctttgctattgagagctttaaaaataattcttactgtttcatcaaggacattcttaagtgaaagtgtttttttttaactatgcatggtggtgaagaatacagtgactgttagtacagtttgatagtaccatcctgattcatgtttataaggcatcagcagttttgcccactattgcttctgtatcatcagtacaggtagtatcgttatgaaaatagttttgatctctggaccccctgaaaggatatcaggaactcccagggctctgcagtccacactttgagaacgggtgagctcatccagcagtaccctggtccccatcctttctcttgtcttttgaaacctaccccttccagggctgggtatccccctccttttctttatgcatactgagttccagtctaatagaatgcgtttttttctcaccttttgcctttttgtttgtttctctgcctggaatattcttgcccccattaccttttcttaaaatcttgcttttccttctagtgccagcttagttttttcttccatgatttcttctctcaggtggaaatcattcttacctttctaagttctctccataacactttgttcacatctcctttatggcacatatagcttattttagaggttttttttttttttggaggggaggtggagggtagagagtcttccactaatagcagatgactgtgtcttattcatcctgtggtactttataatactggaacaaattattctgagaattattacagatggagtgaaataatttattccgcaaatatttggctgctactgtatatcaagcatcgttaggaacactgtgcatgcagttgtgagcaaggctgacattgttcctgttctcgtagtacttactttctgttacaaattcattctacctctgtagaggttgattgacagcatgagtaaatccagtgatttctagtgcctttgggatttattaaggccagaggagcctttgagaaacaatcattaagtcagagtagccattattcatcagtcccaactgatcagttaactcagtgagataattgcacacattaagactgcatataacactgaatttatagtcttaactttttatgtctaagtatcatgtgatatggcccattaacttatatttcttttttgttggggttgcatctggttatgttagttattgaacaaaggagagaggagtcttgaagatgggatgtttaaagattctgtagcaatattttctacatacagcttctgtcattttttatgtttatgtggctagtatgattctagcaaagatgtttttagtgtatatctgtgtaagaagggttttattttaaggcttagaacttttttgttccctcttttaggcattgacaaaggatccccaggattaccctgataaaaaaagcctacctcatgtacatgttgccctctggataaattctcaaggaggcagaaaggtgaaagctggagatactgtgtcatatgtcatctgtcaggtaaactattgacattcgtaagactctgacacctcttaagaactgaaagtaaaatccaaattaccacagtgtcttatttagcattctccccaataattgatgttgtaaagtctggttagtttcatagcatttaaaaaacattagaggtgtggcatatgtcattaggattttcataaaacatttatgacagatttgtaacagtagctactcttttaaccctaaattaactttaatgcaaatgtaagtttcgccatatgttcagcagtagtcctcatttatctctttccttttgcagcagttcccattataaatatcagtggaataataaaagaataaatgccattttttccctagcaaatgtccaaataattatgtgaaaaaatatgaactacatgattatacggagaagttgagagatcctatgaacataccctatgaggaaaccacacaattcaaccagtttttttttttttcttccttcaagtggagagggcccacctccttacccttccttctccgtttcacaaggtacctctaggccttctggaacacagttttaagccactaccagttcttttgataatagcatgcctataatgggtgaggagagagagtaagagagaagagcagttttttgactttcgaagcccttaactattttaacaaaggagaggtctcatcccttctatctgtaaagataagtcagggtcatagcatttatccaaattctttcaaattacaatggtatagactacttaccataaggtataatttatctgaataaaacttttttaaagaaattaagttttatcctaattgttattgcattgtgttgttacagtaaaaaaatgttttacataaacctaaaaagtaattgcaatatgattgatatttgtcaaaccacaatcaatgtgtttttaaatcagagtcttttgaaaatttaaaagtagtctgctgatacctgctatatgctgtggatgtacataacaaatgatttaagtacgtggacaggaatcagcacttgactctgtctcccccctagggttacccttgattaagaactgttacagaaagccaattcctgcaggaaaatatttccataaatgtctgactcgctcaagcccttaatgtgctttgcatattgcctctgacaagtctcatctcaaaaaaacaattttcatattatgcaaataaagattttggtaaataggctaggtttttttttttcacttatgtcttcacatacatggaaaagctcttagattggtgatgagaagaacagatggcagcatacaactttgaaaaattatataggttcagtgaaatagcattaataatgaaatcaagccacaattgtgttttggccaaacctgcaatgaagatgtgtggtaacttataaaataggatgatcattgtatttaaaagtctgttttgtgtcccttgatgtctgaatgttaggtgttaaggttcctttttctcaggtcttattgatatgcataggctcaaaatgctgttgctaatgtagtacagtacatccaattttatgtatttttagcaatttccatccactggtatgtgccttatttgctttttaaaagtatgattcatatttctttttattaacttattctccttaacatatcccaagaaaacctataggactttaatttgcctttgtaccctacccatgggacatgctccctttcaacctgtttgctagccaaatctgcctaaattttttgcttttaagcactcaaattattctgtttcataatgcagccatatttttagaatatgcttttgaaaatgtatcatgacacttttttttttttttttgagatggagtctcgctctgttgcccaggctggagtgccgtggcaccatctcagctcactgcaacctccacctcctgggttcaagcgattctcctgcctcagccttctgagtagctgggattacaggcacgcgccaccatgcccagctaatttttttgtatttttagtagaaatgggatttcaccatgttgaccaatctggtctcaaactcctgacctcacgtgatcctcctgcctcagtctcccaaagtgctgggattacaggcgtgagccactgctcctggcccatcatgacacatttttaagaggactgtttgctgccttaagcaagggtgtcctccaagaatagcctatatcctaaacaggttttgttttgttttgtttaaaatttacgtttaggaaatagtaccctactgataacttattcagatgggttcagagagtaatgtttttggtatgtaatttatattgtaggttgttagcgcattaaacctatgtgaattatttgctcagatcttaaatcaacttccatttgttggctaggttttaaatccataactatttaactttcattagacataatttccataaggcatgcctttaacataattattttaaggggcccacttgtctccagtttaaaatattttcccattagtttcctactaacgatgactacctagttttgtatgaatcgactgcacctggttgtctctctgaagtatgtactttgtgaagttcacaaattactacatgggcacttgaagaagaccagcgttgcttcttaatctgttcttaaagatgtatgccacgtattcttgcacataccatggggccctgctcaggtttgagaatgaaatctttgaaggttattattatttttttttaattttgagacagggtctcgctctgtcactcaggcaagagtgcagtggcatgaccacagctaactgcagcctttatctcccaggctcaaatgatcctcccactttagcctcctgagtagctgggaccacagatgcatgcctccatgcctggctaacttttttttttttttttttttggtcaaaaaaaaaaatgggggtctcactgtgtcacccaagctggtgttgaactcctgggctcaagtgatccttctggctcagcctctccaagtactgggattacaggcatgagccactgtgtccagccgaaggatgtatcttaggtcatagcctaaatgtttttccaatacgacatagcaaaacctgtcatctaaccaagtcttttgaatttagccatgttcgagcttagatttttaaaataccctaagaaatatgtttgtgtcactttttgttaaaactagtcttttgtgtgaatatttagaataaaaacgttttaaactgaaagcatgctcagaaagttttcaactgcttttttgaaaaccatgctttactatgagaactactgaaatattagaaagtaactctaatatttttaaaggcaggtgcctttaaaaaatattttacatgtataaattctattttaattcaccattaaaaattgttaaactcaacattgctgtaatcttaagggtagaccaatttttcataattccgtaaattgttcagattttatgtgtttggtaaaaggcagtctaaatacaattgagttgtgtgaaaagacactgccggaggattttttcacgtggtttttatcattggttgtcaccttattatcatcttaacaattcaagcttctgaaagagcaagaattaaacttgattaattatgcctaattccttttactatgttgtaaactcctgacaaataataataagtcttttaatctgagtttgcttcctttttaggtatttcattttgtcttagaacaggtagaacctggttgataaacaggcccaggttgttttcatcaggagcctagccagaaaaagaggcccctgcctctggtctctggtaaagacagtggtgtgtggaaggttgcctctgctttgggctgggtgctgagctggaaagggactgattgtagcaggaatgaaagaataggattcacattataatcagttctgctgagcagctgagcactgtgaatagttataacttactagtttgaatattaaattctgtttcagatgagaggaagagtgagtgagttgttggatgttgatccagtagagataactttttggttcagagatgatggtgacatcattcacaaggctggatatgggccaattatatataatttcacagcttttatttttatagagtaaaagagaaaacccttgaaaagaggctttctgacccatcttccttttcttgaggaggaaccaggtaaatgataccaaatgacatgcccttcattccagtggccagatatttggcttttagagccctgccactctgctaggacactacgtcatttttacttcttactgtatcttgcatataaattactactctatagatttcatttccccactcttttccacttgttcatttgcttctcagtgatacatggctctcatagaaaatattactcccgggatctttgagttactttgactagaattcttgcctgaagggatgacattaacataataaaaaagaccatacacatgtttttaaattatcactccttaaaaagcctttctggctacactaattgttactaagccttctcagtgtttggtgatatggcaggtgaaattatttaatctggtcattgctatcttgttggtttcaagtttttgcaaaaaatagaacacaacatatactggatttatattcttggacactggatgagatctcaagattgagatgttgtccttgattttcctactcaaaatgttcaacaataggtcaaaaagaggtcttgatgtttagaagtagatacataaaatttaaattgttgcctctctgtttgaccaagcaagtgtctgtgattgagttgctcacaactttacctgtgtcttctttttacgtgtctttttatcatatcttcttttaggatggatcaaacctcactgcaagtcagagggcctatgcgcctgagcagctgcagaaacaggataatctaaccattgacacccagtactacctggcccagcagatccacccagtcgtggctcggatctgtgaaccaatagacggaattgatgctgtcctcattgcaacgtggttgggtaagtgtcccaagctcacatagaacctcacatggtaacaggggcacatgtagtcttccttgtctcttgagatctctgcttatgggcatggtattgtgtctggcacttctttgtttatagtttagaatgtatttttgtggttgtttggtactgtctccactcatagactatgagctccacatacttgctactgtaaccacatgcctgcttcatagttgatactcactgaatactgagggaagagagggaaggcaaaagaaagggtaaagtgaagatttcaggtgccgttacagtcaccgagtttacattgttatagctttaattagtgtacctccatttataaggagattgatgctatcttgattattggttcatcttgtctctgtcgctgaaggtattttcatgtcaaatgagaaaacatggctttttaacatgaaatttttaatttttaatattcaattcattgtgagaatcctactctataagttattctaaaaatggacccactgttatcctctaggaattggctgatttctaagttatcatcatccgaggaggtaccagccaaccctgagacctcagtattactttggctttttgctatgtcaccagattgtctccgttgctgtgtcattattacttttgttatcttttgcttagaaatgtatttcataaccagccctgatttcatttttagatgaccaagtacataaagagttacattgcttttaaggcctttcctctctcttctgtggtaagcaaagatgagtgttttcagagtactgcctaatgtcctgagatggctcctcactatttgtaagtcaagcccaggtgccactggcatctcacaaactcttaactttggcaattatagacttaactttccagctcccacctatgtatccagccttatttcttattcagtctacgcagtgtctcccaaatatggcactgcccattctgtccctgcttcatggaagattctccccctctttttactaaaacatctagctttagccatgggctttgacagcatagggacccgggtttcagtgctggttctgctattcacaagcttctgaaccttggtctacaccttagctccttgagtcatggaatagagttactctgagggagaaataagatgatatgtgtgagatgttcagcacaaggtctcgggcaaaggaaggactccgtgagtggtagccacctcccacccttcttttaggcgtcagtagaaatatgttcatattccttcagtctgtaagatttgtatatacttagtgctcaactacgtttgtagaatgagactggcttttccatcggtgaattatcaagtcacatattttctgtcctgcacctgttcagtatgtttctgagctcctccctgctacccccatcgtcactaccccgtcaatgtttactctggaagtggaagctcatttttaacatttgcctaagcaaatattaggaagataaaattctaccaccaaaattatcatatgtattctccaagatgagttgtatttgatgatgtttataaatcctcagctgggaagagaggactgtaaaagcaaggtattttttagcttcacttttttctctgctatacattgagcgtttgctctgttggatacagtgataagtactttgcatttgttatctcattcagtccttgtgacaacctcacaaaggtatgttggattaactccattttacagaggaagaagccaaggtttagagaggtaactatcttggtcttggcacataggtagtaagtagccggctgtgattccaaaggttgtgatcttaactactgtgctaaacttgattgcctgttcttagctctaaaaggctatgaaagatgttttcaaccaggagcagggtggcatagatgtataagcatggggggcttcatgtttttcttgctccctctatttctcactgtactcccccccgctctccactgaaaacctctgagtaaaaccattttttaaagagtagatctccgagtttttccatttgtgtcttcaaaaacctggtgtaaaactgttgcccttttcttctttggttttgaattttttggtgacccagcactgagaggaggtagatggaacaagccttgtctcatgaatgacatttaagataaggacttgcgtagccttgtatgtcagcaaaagagctgagcaataaagggtgatggagcctgcttgggtggattggcctgatgcctgcctggatgtgtcaaggccagacatactaagagggaccagactgattttgttagttccagaagtcatagttaagatgatttttgtttataaattgaacagtagcagattttgacttgacagatactttattataactgcagctgctgtatcataggctgccttatgaattcagttttcacaaattattttcaaagccagtagtagacaagtgggtcccatcttcagaagtttcatgttttatctcattattgaccaatctcaatctacacagagaaccctccagacttgcacacggtcccacccatatacccatcactcctgcctcacaacctgaaaattctctaggtgcagccatggctgtgtggacactcttctgggcagtcccttcttggtgccatgtagccaagtcaagctgatgggagggaatgtgtcctcggccttgagggatctgcaactgctcctcacttttggctactttttctcattttttttcttctgccacttgacagtggtttttatatcgcggatgtgtgaagttgtcatcattgtgtagtcctcctctcctgcttgtcctcttctctcatcctaccctgtgcctgcaccagcagtatatacacagccatctatattagtaacaaatcttgtagtyctttccttctgcccccttccaggagtttcagcattaatgaagtgtaggcccacaagtccccatcatcatgaagatctgtagaaaacattgaagctcaccaggcagatctctgcaggcattagcctcctgctctattcaggagctgaatttcttatctgcaccctttattcctctaccccaaataaaaaattagggtggctattcagtaggggcttcgaggcccctgttatcagttctactgtagcctgtgtatttaggaggagggagggagatggggaagtggtggcaaagtaagagaagtgttagggggtacgtggtttctaagaggtgcaagctgtaggcataaaattactgtaatttgtttttaaaattctaaatctgttttctttatataaaaaaactgcagctagtgaactgacaccgttaaataagttgaagtatacaaatgtatacataaaatacaagccctccaactgcctaatcacagacataaaataattctcttgcttttaatgtagtttttatctttgattaatgaaatgtattgtagtattgaaactttagtgaagtttgatactttgtccttttagttagtacaaagaaatcaggaataatggcataatttcatttaggaaaattattaagctcatgattttttatttttaagactcttttgtggagagcaagtatatttttcaactacttttttctttctctattgcttttatactactttccttgaaatgaaaggcaagcatcaagtgttggtttatcctatggcttcactttggaaattctctatttctccccatcaagatacctcctgaagtctgtctggtggcatgttgcatggccaggtgttccgtatggggagaccattttagtgaaagggagagaggatagcctattaaatgagtgaatgaataaggctcttgaattgaaagagaataatttgttctaataactaatggtcctcattatcccacagtaaaatatgtatcatttttctgaaacccatgcaagattattgctattgggcttaaataaagcaaaattttactcttttccatctgtgaataggaaaaaatatagtattactcttcttatacaatagccctatgggaaacatggccactaaaacttgaaactcttagcttttgttctctagactatagatttttctctctctcattctattgaaagctctcccgtattctgtggatgaaatattcacagtatgctcaaacatccaaatagtcttccatacctagctgactaggccagtgatgagaatagtctaaagttcatttttgaatttcatctttgaataaatttatgttttatgtataacggtacttagaattatatgtaatatctctcctccaatgagcaatgatttgtacagtagttataaagaacctttcttcggggtcagtgataaaatttcaggcatttggctatctgggcagttttctcattggtcctgagaaattattgaggtttgaagaacatgagaatttagaatttaatctctgaaaatactgcttaaaagaagacagaacacacttaacccagtgtgttctgagttaaattggaaagcaaaaatttccttttaaaaaaatgatgcataccactcatatcacagaggttagtttttgtcagtagacagggttcagtaatatcatctaagaaataagtgcgacagtgggtgaaacagggccaagcgatgtttgggggtgcttttgacagatccagggagatccacctacaaaaaagagagtaaagtacagatgggtaggggtagaatgatgccgccagtgagtacttcaggtattactttgtcaataaagaattttgccttttttcattattaagctcttataaaaataaaacatgaccatttccaaactgtaaatattttctttttctgtctttttattttttatttttttttgagaaagagtcttactctgtcacccaggctggagtgcagtggcgctatctcggctcactgcaacctctgcctctcaggttcaagtgattctcctgcctcagcctcctgagtagctgggtttacaggtgtgtgccaccacacctggctaatttttgtatttttagtagagacggggtttcaccatgttggccaggctggtctcaaactcctgacctcaggtgatccgcctgcctcggcctcccagagtgctgcgattataggcgtgagccactgctcctggccccaaactgtaaatattttctataacataattaatagtaaaattaaaaaatgttataccaaatgcattgcagaatgttaaaggaaatcttatcagctgataagagcatctcttacaagatggagtgccattccaagcatatcatccagtggctcatgctcccagtctagtctacttttgtattcaatattaattgaagacctgctgtgcctagcaccataataggcactgtgaaggatacaaagttgagtcagttatggaccctttattcaaattacagcccagtcatttcgttgatttcactgttgtgggcaagtctagtgggcaacacagtgtatgtcccaaaaaaggtgaaataaagggttatcaaatttcaaaggaagcagaaaccactcctagctgggcccaccacggaagagtttataaaagtagaggcattttgaggcattgctggaatgggctgtggagaggctagtgtgaagttgggaatggttgcccaccctactgcttaccaattcttctagcctgatgaactgcaggggtaacctgtgttatctcagccacccccaaagcactttagggaattcaaagagagcctctttaagggtttcagttgaacggtcctgcatctcagtctcaacaaagtgagcacacagtgggttgcttctgtgtcgctagcccacaatagagggccagtagtgacactgctcatctcacataagcagtgagacctttgagaactttgaaccaaaccagagcatgtttagaataattgctttggaacttttgtatgagttatgtaacaactctggctttgtaacacttagaggttttaaaggaaaattgcggatttctcaaattatttaaattagatcaattttttaaaaagataaaattgttttaattaagtacaccaaagtgacatttatcaagatcgtgtagcttatagaaaaatggataagacctaaaaatgggtaaggataaaaaaagctgaatactatacagcattgtacacatacacgtacactgtattatatatgtgtatgaataaaatagaaaagggttaaggtgatgaattataggttccccctttgctgacaaaatattaatactgttattttattattaataagacagttttttccaaaaccagaagtaaaacaatggttaagcaattactaactcaccttcatttatttatttatttcagatggttttgggggaacggttagtgtttggttattacataaataagttctttagtggtgatttttgagattttggtgcacccaaagcagtgtacactctacccactgtgcagtcttttatttctcacccccatcccacctttccccccaagtcctcagagtccattgtgtcattcttttgcctttgtgtcatcatagcttagctcccacttatgagtgagagcataccatgtttggttttccattcctaagttatttcacttagaataatggtcttcattttcatccagattgctgtgaatgtcatatttttttttatggctgagcagtattccatggtgtatatatatgccacagtttctttatccactcattgttgggcatttgggctggttccatatttttgcagttgagaattgtgctgctataaacatgcacgtgcaagtatctttttggtataatgacttgtttttctctgggtagatacccactagtgggatttctggatcaaatggtaattctacttctagttctttaaggaatctccacactgttttccataatggttgtactagtttacattcccaccagcaatgtaaaagtgttccctttttaccacatccataccaacatctatttttttttaattttttgattatggccattcttgcaggactaactcaccttttagaaggtgggtggttagggaccttgagcctagctgtttttccccagcatctaccaacatagctggaagagaagtaggctgtgttataagacaagcaatctttggactattatttgtgttattttatattccaaatatatttccagcacagagttaccatcttttctcaggtttaaaaacaggaaaggaaggccaggtaccgtgcgtggctcacgcctgtaatcccaacactttgggaggcaggaggatggcttgagtctaggagttcaagaccagcctgggcaacatagcaagaccccatctctacaaaaaataccaaaattagctgggtatggtggtgcatgcctgtagtcccagctactcagctgactgaggtgggaggatcacttaagccagggaggtcgaggctgcagtgagctaggtcaaggctgcagtgagctgtgatcgttccattgcactccagcctgggtgacagagcaagaccctgtctcagaaagaaaaaaaaaaaaaaaaaaggaagaagacacttgaaaagcttcctgccaagaaatacacatctcgttaagttaaaatttatatttgtgtctattgtcaagggcattaaaaccagttgattgaagtcatgagaatgctgctcatcaggctttttattctgtcaagattttgagaattatcttctccaggaaaataaaaatcttgggtattcatttaaaccaaaggctcggctattatttcttctaaaatactcagaaattttccatttatattatgaagaggtgtattgttggtgtgaaagacagttttggttgtctgacacttatacagtaaattgtttatctttaaattggatctgtagtattttaaaaacttgttgggctgggcatggtggctcacgcctgtaatcctagcactatgggaggccaaggcgggtggattacttgagatcaggagttcgagacaagcctggccaacagaacagggtgaaaccccatttctactaaaaatacaaaagaattagccaggcgtggtggcgggcacctgtaattcagctgctcaggaggctgaggcaggagaatctcttgaacctgggaggcgaggttgcagtgagccgagattgcgccagtgtcctccagcctgggcaacagagcgagactccgcctcaaaacaaagcaaacaaacaaaaaaatacaacttgttattatggaaaaatgtatattatatatatatatatggtagtagagaatataaaattttttctagtatcacacatattaaattatagggtaagattaaaccctcatatactcatcacccaccttcagtattctgcactggtggccaatcttattattcctctttcccaccttcccctattattttgaagtatatcctatatatttattttgtgtgttaatatttcattttgcatttccttttttttttatttagagacaaagagtctcactctgtcacccaggctggagtgcagtggtgcgatctcggatcacgacaacctctgcctcccaggttcaagcgattctcctgccttagcctcctgagtagctgggatcgcaggcatgcgccaccacccccggctgattttgttttgtatttttagtagagacggggtttcaccgtgctggccaggctgttcttgaactcctgacctcaggtgattctcctgccttgacctcccccagagtgctgcgattacaggcgtgagtcagtgcgcccggcccattttgcatttctaaaagaaaagattccccttttcagcataactacattattatcacatcacaccaaaaaacctcacaattccttcatttcatctaatttccaacaagtgtttatatttccgtgattgcactatgaatacactttttttaaaaagctccttgtttggattggaatccagtcagggtcaacttggtagttaatttctatttttttttttcctttgttgatcctcccagtttgttaattaaagaaactgggctttttgtcctatagaatttttctcattctggagtttactgatcacatcctggtggtatcttttaacatgttcctctgtctcctatgtttcctataaatagttagatctaaagatgtgattatatttaggctcaatttattttattttatattttctaaaatataaaatacacacttcttcctaggcaatggggtttatgtctatttgagtttcaatgcattttgcaacaaattcatagatgtttcataagaaatatttagaatgcaattttctcacctttccaagtgtgaatttttcatagtataacatgcatacagaaaagtacacaaaacctaactaaactgcttgataaattttcacaaggtcatcatgcactagtgtagtcattactgagctcaagaaacagtacattactacattcccagaaggcccctcatgtctcctagaaatgatcctctacatacctggcatctaataacatagatgaggtggatttttggggatattacacaaattgcgtctttgttctttgtgtctagactacttttactgaatattgtttgtgagattcatccatgtggttgtccttcctttctgtaaattctatataatatttcattgtctgaatataccacactgtatggctatctactggaggtacacctatgagttgtttccacatttgaggtattttgaatagtgctgctttgagagttgttgtacaggtcctctgtcaaacgtaagcatgtatttttcttggggatgtactaaggagaattgctaggccatcagggacatgtatgtttacttttagtagattctgccagttttccaaagcggttctactcgtttacacttcctactagcagtgtttgggtgctccacattcttaccaacacttggtaagatagtgttttccatcttcattttacatggtggcatagagttgtggttttaatttgtatttctttgatgactaatgaagttgaacaccttttcacatgcttcttggccattggagtatttcctttcgtgaggtgcctgttcaagtctttgtctgttgtcctgttggcttttctttttcttattgatttgcaggcatttcctatgtgttctaattacgagtcttttggaagtatatattacagtttgagtatccgttatctgaaatgcttacgaccagaagtgtttgggattttttcggattttgtaatatttgcatatagataattagctatcttagagatgagacccaagcctaaacatgaagttcatttatgttttatatacatcttatacacgtagcctgaaggcagttttatacaatattttaaaaaattttgtgcctgaaacaaagttttgactgcaactcatcacatgaggtcaggtgtggaatttttcactcgtggtatcatgttggcactcaaaacgtttcaaattttggaggatttcagatttttggattagggatgttcaacctacacaaacatcttttcctatttggcatgctttttaagagtataattcacataatttaccataaaatgctaaaatcttgagtattatacaatcagttatctaggcacagacacagaacattttcatcactccagaatgttccctcgtgcctcttcccagtcagcacctctgttatagtagcaatcgctcatctgaaatctatcagtataagttagttttgcctattcaagattttcgtataaatggtttcctacagtatatactctttttgtgtgcaacttctttcacttagcatggtatttttgagattcatctgtcttgttgcatgtagcagtattcactctttcattgctgagtagtattagctgagtagtattatggtagattataccagttaatccattcacttgttgatggacatctagagtgtttccatttttggctattatgaataaagctgctatgagcattctgtggatatagcattcaccatttgaaaattatttttttctttaatcatactaaattttcagttcgcatattgtcctctaagatgtccagatatatgaaagcctggactcatgcaaaagataaatggtttacttcctctaagaaatttttacaaaaaaatttcactcaatgggattctgttaattagcttccctcatagattaaatgatccatattacaaacaactgcttgtaaataccagttactccctttactcatttggaatttcatttatgtggattttccctcttccccacttgcatgaacatatgtaagggttttactgtagttatttgctgttgcactaatagagaccttgtcttttgaaggaaggaaagtatttgattaaatgtatcagcctctctaataacaatatgtctcaagttatgaacagtttaaaaactccttgggagtgggggcaggtgaacattctaaaaacaggcataatttacaatggttagaaagtgcaatggtagaaaaataattttgtgctaaatgtcacactgggggtgtgtgtgataaggctatggtgacttaagtaaagacagtactgctaaactcatacaccctgatgcctatgatgttactttctataaatacttcttgaaacatgagagttttgatcctgttgccaaaataatgtgagatcctagaaattttctaattataaatgacagtattttaattttcattccactgcctcttttgtaccctcaaccccagcacaaatgagtccatcactacaagccacataattgaattaaagcatacatcatctcagcctattctggggggaaaccacggctgctcttcctccagataactagttttgcaaagcccaggcaggctgcttcttccttcattctgtgcctcaccaaaagacttaagtcacctgtcaagagctagcctaaaagaaatggaagttacttttctcaaatggggcataaagtttgttcctttaagccagttcagagaaagctttcagtagaagcaataaggaatttgggattcagttttgcatttcttgctcaaagactaatgtacgcagtgtaacattaattatacggtgtagatgcatgtagggcaagtgcagtaataaagattttgctttaatgtcatttttgacagaagtgtttaattttggagtgacaacaattaaaaatggaattatatgtagctgctgttttgcacattttaaaattcagaatctctacctgtaggtggcagcaccagatacttgtttcttgtttcactccagacttaatgagtttagggtataagcagtaaaactttaaagtctactgaaacttcgaaataagctgctgttaccagttttgtgagaatttggaaaaactaatgtatgtgttgactaagtttggggcttatttaaccctggattttcaccttttcaaaaaagattccagcagcaatgatccttacttttttaacatgacattgtatgttttcttaaaatgatttaatttagccctctgtggtttgcctgttgaacttataactgctctcccaagaaaataactttttaatggcattttggtatttaagtaacttgtacaaggatcattatatacctaatattttaagctcattacagtctcttctccctttatatttttacattttagcattgaactatgaccaagagactattgagattgaagctccttcccctggggaaaaaaaaaatcaccttgggaataaatctgaagtaattagctgagccagttgactttgttactgccatgggaagattgagtgatttgtagaaatggatatttagggtagacatttagagtagacatttcacagggcctggtatttttcgcaagttgcagccagtcgtttgggtgtttctccatgagtaagtaacaagatggcccacacccacttttagcttactctgcaggcaggctgtcccgggtcagtgcttgcaggttcatgcactcaggtgcaccaagtgagccatggctggtggggaggggtagagagtagctcctcttggttccttttcgtagcctggccaattttgtatatgtgcaaaccagcattgttttgttcctttatttttggactgtgaaagaaacttgccttttagaaaaatcttgcttattttctttttccttatcttttgattagtgttggcctgggaaattgattaatagtcatagggtcagagaaaaagtgaagctgctttctcataattgcaaataaatcaaaacattatgtgaatacttggattcacaactagagtttgaattagcgacagttacccctcactacagagatgaactggcctcattcagcggtgtggtctctctcaattcctctgaccatccttagctttaaatgtgagagtatatgtattcccacataattctctaatttactatttctcttaggggttaggtaacttgtaaaataagaatgtatagtgtcttggtgacaagtggcccatgttaacataatttatgtcactaatgaagaacagcttttcaaattgttctgaatgtgtattctttgtttttatcatatactaccactttaggaaatactttaattcctacaacgagtagctattaacttcatatgcagcatgaacatgtctcatatagttttctaaatgcataatcttgagcgagtacagtctggattaaatgatgttcattcactattttattttttcattgaaatgacatttatttagtgcttgccacgcagtaggcagcgttgaactcggtttgttctatattatccaatttaaacttcaaaagtgtatgatcagtgatgctacctccgtttcgcaggtgagaaaagtgagactctgtgtctcagttgtcttattctttgtttggcccctttcaactgtgaagagtcagcctccagtattttataattactagatgtcgcttgacagctgaccaaataggatttaggattctgtcactgaattctgaatgcatctgttagatttatctacctatgtagctgttgataaattttaaacaatttttagatatttttggtatttgtgagcttttggcttagtgactgttttatattacttatttacctttatactaaaataagatagttttctcttagatttccaaaagcttttccttagatttccaaaagatagaaatattgtctcttataatcttttcttgaaagcatcccttagcaatccctaaaattctaagaaacagtgtagaataattatttttaagtataaattcaaatagtaaattttggcacacatgttttgaccaagggtaaattaaattggttggcctaaaaatgtttcttttctttaattagtttgtggaaacaaaatagcataaacatgcattgattgatttcttatgttgttttgaatgaaatatggaaggtatatttggtttcaggattctcagggacattttggcctgtagaatctgtagacccattgtttttgcacatattttaaatttctgaatttcgaacatcaagaaaaccatgttgcattttgtctcagatgctgctactgaattttaaccactgaattagattgcaacctacatgctgttaactactgagccaagatgaaatcgactactgcattgaaatcagggttagctgtgtctgcacttgaaggagttgtaatggcagtgaacctgttttctttaatgggatttttattccctgattttattctcagttttaattgtgactttgattttaagagaatttcttagtacacatttatttgaggttttcattgtaactttaagagaataataaaaaacatcctatcgaagtaggtgcttccaaacccatatgttcagtggcatatttctgtgttgtgttgttgcagttacttgttttatttataaagtatctcttgtaaaaagagaagtcatttgtccatgtgcttttgagttcaaatggttgtgtgtatgtgcatgaatttaaaataattttttgtgggagttttcttctttggggtatttttggaatacttttctgaatttgtttttttcttttacattaataggacttgaccccacccaatttagagttcatcattatcataaagatgaagagaatgatgctctacttggtggcccagcacagctcactgatgaagagaaatacagggactgtgaaagattcaaatgtccatgccctacatgtggaactgagaatatttatgataatgtctttgatggttcggttagttgtttctgtctttcattttgtgagtgaacttgtataaaggccttacccccttcccccactatggggtatataaaaagggcgaaataaacacacacatgttgctttcatgtgtttaaagaattttagcatcatgtgaaatctaccttcacagcttgcttttatttctgtttgaaaactcttacttgaatgtgcttgaatattgttttggcttcctagagtgcttgaccttggtttttaagtggaatcccttaaaaattctaaattatcttaaagtatttttattataatttcttaattagtaacctgtattgtcccactgtcaacccccatctattaagacttagaccaatatttttccttatcttaaatcaagttaatgggaactaagtgttttgggaaagtttgtgtttgtctttacacatcccacttacctccattttgcaaaggtactcttatcttttctgctgtctttgcatattagacatttaaaaagtcacagggagacattcctttcaagaagtactgccaaaaaatgtattattgaccttggatcagagcttgaaacttggccaatttacttgatttccactgcagtgttatgcatgtactagccattggcaaaggaataggcagcagaactgtgtaaaaccttgaaactgaaagaaaagacgccctttatctaaattaaaagtaattattttaagttaatttggacaaacagcagatgttttgcatttttttgaatcaaaacaaagcagtctttggaagcaagtgcaaggaagaggcagacacagatcagcaatacttgctaaatccttgagttttgcttcattacagctgtaaataagatagttaattgcatggaggcttgacgacttgcagatgggctaactgtggaagagccgatgtcaagctctgaaatctcttccacctggaattgcttarcgtggcgggtagggttatgtaccagattggagcaggaaaccaagatgtttaagtatcagaaaggaaaacaaatgcttcagaaatcccaacagttttgctatatattacatttgccttgtctttgtttaaaacaaaacacaacaaaacaaaatgttttctccaaatattaatatttatttatttcaaatttttacttctcctgcctccctcccccaatacacttcattttttggaaaaattgccaaaattttagatttgctaagcagacagtaagtgatactgtttttgtggtactacacttttaacttttagactttatttttaaaattaacttgacaagatgaaaacaaactaatgtgataaaggctcttgtttttcttcaagtttgtaatgaataaatacaaatttaaagtttttaatcagtatctctgagaaagaggtttatttccagtaacatgacttcactggtatttacagagggaaaattattttatccatagagtccctcgtatagtgaatgtaaaatagtgatttcagggttttccctttgactttgcactccattatgatgatggcaaggaatggaaggtatgtatgactaaagcggtctttgggaggaaaataattgagaagatagggttaacaactcaccaataaaacgaattaagaatattcaacactaggacagcatgtaagtttttaagcacaaaaacccttttatagcctcacagtaattttttgtatacttctcctgacttatgtagggaacagatatggagcccagcttgtatcgttgcagtaacatcgattgtaaggcttcacctctgacctttacagtacaactgagcaacaaattgatcatggacattagacgtttcattaaaaagtactatgatgtaagtatccataatgatattcttacatacacaacttattgaggtttggtacttgtttattggttttcatgaaactaaaattttgaaaagacttttgggaaaaattcctagtgaaatactattaatacaaatatgataaagtatgtaattttggcatattagcatgacaaattatttgataatttctctcaggcattacatctctttcatttacgagcagtattttaaataatgaaatttttacttcttttagaaaaagccagaatataattaagaaatgttttagtttattgttacctaaataagactaattaaatgattgcttagatctttggataaaggaagaaaaaaatcactattggctattgtcagcaagtagagccataagatcgtgtgtagtgatcttagtggactgcccacacaaaactaatactttgtgtttatgtagcactctaaacgactccataccctagttttttgaggaaatcaaatatcttttaaatttaaatgcagtttttctggcattcaaaagagaatatctaatttttataaatttatagtaaaaatgccagaacagtgagtgatttgtcttcattggaaagaaggcttttattcagagtttttgtttttaacgcatttcacatgaattagtttttttctcttcaaaaattaaaaatttcacatttcccacgtgatttttcttagtgtttcagtatgtcatttgtcatctaaacaaattttctgttacttgaaagtttactgtaacttctttttaaaagctacattggcaacacatttcaaaaaaaaaaaaaagctcatgtcttagttaaggcctatgacttttctaaagattgttctgtactttttactcgtattagttaacatataatagcattttcttctttaaaatagaactcattatgtgaaaagtaactatcagatcattaagatgaagagtaaaaacatagagttccagtattatgattttggtgttgaatatatttatcagaaaagcaagtcagtttgcctaaagattattaaaaaataataattatgactacattttgggaaaatctgaaacattttagtgaataatcctgtgctgcccttactgaacagtggatgggaataaaagttggctgtggggtcacattcctcagtaggtgagatgtgcagcacatgaaaatttaggccaaatcaaaactattcagctcctcatttacaggcctcattgaacagagtatgatccttgcttgactcttgggaagaattctgagctttctctctgtgtttagtctatcaagatcttcaccatggaaatgttaatactagaagaaacttatctatttccttctttaagagggaatagtctgttttgactaagttgcaaatactctgaaaaatgatcttctgtatagctagaaatatgccctgactgaaagactgatttctaacctaattgtgtgtatgttgtggtggtggttatataagtatttttcaagctaaataacctacttttagggatccagatatttaacacaaggtttctagagcatttgctttaattgtttttttgccagccatctcactaacatcaagtaacaggttattgtagttagctgcccacttgattgacatttctaagggatttctgatcaaaatagccatatgtcactcctggggttaaaaattgatatgactgtcttgaaaattaggaacttatttctccacgttatgatctgaattatatgtgattggatggcagagaacgaaatccgttattcgttcttatggcctcatgctaaacaaatatttcaaatattttccagatcagagcttttgtacaaaaagcccctgtacctttaggttctactttattggtagaccatcctgtttcctcctagaggtacatggcattgagtttcttttgttattgtgccttgagtgatactgattacagttattagttcagtgtgatatatcatggtgatggtaatccaattggagactaatctagcaagtgtactgaggtaaggatattgatagtaagtattgaggttaagtgattgtctctgaagctaattaccaaaatggttttctcctatttagcaacttaaaaaatactacccactggacataaaagttgtttgtgaaatgaaggcaagaatctcaatattgttttgattttagtcttagaagcactgcaggagaagtcaacctgcactgagaaaggaaggtatcttcatgagaaagggactccaggaagatgaatggaatatggtacttgaccaaacactataacctgcgaagaagcatagttctagatgactaagaaattagattgtcaagaaaaaagggacaaaagtttggggtaacaaagtatacttctaaatcactttaattttggaaaagtacatcacattctgttaccttctgtcatgaattaacaggactgactaaatatgatataacaaatatttgtttaagtttatctgagaagcaaactgtatcacatcataatattttaataaatattggctcctttatgggagaggagaggctttttgctcctcatctgtagcaatgattgtattccctgaattctagtttcctataacatttaaactttgatatacatagaaatacagaaagcactgagccaggatattttaagtaatatattaatttctttaggaagaagataactctgtgctttgtcttgagatttgatgaagtgttgaaagacttcgaggtagcacagaaagccttatttctaagttgatttcatgccctggtccttgttggttcctttgtataaagttaaaattgaactggtattttttgaaaatcataaaaaggcagcttaaagacaataactctaagcttttagggttgtttttgaaagattccgttttacagtgaaaaattgatatgtgttccccctccccttaaattctgctccagaagagcaaatagacatacacacacaaaagggagagaaacactagctaatctaaattgggaaatgaagagggctttttttaagcatgaaaatttcatcatcttgtcagctggcagaatgcctgctgtgtggattcacaaaggctaagaattacactttcatgaaattttcctcactaactgccctggttaatttgaaagataacccactgttctaattcattcctcaattgggcggtgcaggttttatctttgatctgacaaagcatttgtgttaatcgttttggccctccactagacactcttgggattgtgcttttacaataaatgtgtctgtgatagctctttagtctattatacttacaatagatccatagaactggtaattaattctccactgctttggaaatgggaagaataggtgtagctctgtcaagtgctgctgggaagtttgtttagctggttcatttttgaagtgttcccctcagccatccaagaagcagccacagaagagagtctgagattgagaagctggcctatcctgatgacttgctgataaatgggaaatgtgacccctcttggtacctgggaggaggatattgggtcatttacattcatctcaagtactgttctttttaaagtatattaaactctcattttaatacttaaagagccatttgcctctaacggtggagcctctagaagatgcaatcgtaatagtcaactcaaatacgttcctaaattttcactgatggcttatgcaggttttagagtattctgattgggtaaagtgtgttccccaccagccttctagtgtttctagccacttgtacattatatgagtactttactatgatttttaaacattgcgatattgctggccctagatggggctggccctccatctcaaagaacacatgaacagcttgttggtaccatgcatatgataacctctgatagttgctagggccagaaattggtggtctcactccatagaaagttgttgtaggctttataatctcaggattttcctgaattaagctttttgaggacaggggctgtgctttcttttctgttttatgtgtgatctctgccacagcccttgctctcagaagtacgtgtatcttgatgtttagtagccaaggaactgacaagtaaaggttatattttgctgttttttccttaaatttttttacattgctgtcagattggcggaagacttattagtggcctacaggattcttgggttaacacaaaattctacaatattttaaggtcatgaaagccatgacaaataaagctctttgttacttttctattttttacggcactgacaactctgcatttcagtatatgcctgtccccaactcaatagctttaatttgttttttccccaaaccaaataccaggcaaagaggcattaaccagaaatatcatcatgatgcacaatagcacctagcctaaatgtactttcattgtccagatagaagaatctatctctatataacgtggcaaagaaagtggatgcctagctttgttactctctttctgttctctccttgtatttttctcttttacttcttagtatattgtgtcataagccacattttaaaatctcttttggacccacatttatgaggaatttaaaaaataatgtgcagtgtatgtcgccttatgatgcaaaaacttccttatgcacacgtttaagcacttagggaagaagagagcatttgaccaatgatgctgagccttagcatggtagctgtgagttcttttggacgaggccacacaccaggaagtagagtaggatgttttgtagtgtatgaagattccatattaagcttgtttttcatctttgcaagttaaacaaaaaaactttaaaattttaaagtggatatgcattccttgaagacaaaattaataacaacccccaagcataatgttgttaagccagggattgaattagagctgccttttatcaaaagtgcaatgagggcagggtaaaatattggttaaaatatttgctccacaaaaatacccatttagcatcacaagtaagcacaattcatggctcccaacaatacttgaaaaagggtaattttgttaggaatgcacaaaactaaataaataaatctgataaattagagatgaagcagsctcccactctatccctcctgcccacacccatgtaaatcactaacagggcttctcatttccattgtctttcacttctcaacagagctatcttgtgcaggtggacctgtgagttttagagccatgcagtggcattcagtaactctactgtagtttcattgcaaatatgcagtgttcaataaccctcaaaatttctcatttcttacctgtggtgatgtggtttgatagtttttaggttataggttgcaatatgcagtagaatcacaggtatattagttcaaaaagtttaagcacttttggaattattgtttatttccttgcttctgcatttatatttagaacatttaaatagaataaatttggtttcttttttgtagactctaacagcataattataagtggtacaaaggcatacaaagaagcaatagatatccatcccacccattcaacatcacaggcagcccaatccatgctgcccagcagcgcttgaagaaggataatttttttaggaatccatagaactcatcctaaatcttgttaaaaccaaatgaaaagaacatattgaaaattagtatttattttcgcttcatagtatttgattgggaagccaaacataaatgaatgtcagggataccaactgcatttttaaaatgtgatattctttatgtttattccttttttattgttaatttttagagatagagtcttattctgtcacccagggtggtgtgcagtggtacgatcatggctcactgcagccttgaactccagcaatcctcctgcctcagcctcccaagtagccaggactacaggcacatactaccatgcccagctaattttttttttttttttttttcgagacggagtcttgctcttcgcccaggctggagtgcagtggtgcaatctcagctcactgcaagctctgcctcctgggttctcgccattctcctgcctcagcctcccgagtagctgggactacaggcacctgctaccaagcctggctaattttttgtatttttagtagagacggggtttcaccgtgttagccaggatggtctcaatctcctgacctcgtgattcgcctgcctcggcctcccaaagtgctgggattacagacgtgagccaccacacccggccagctaattttttattttaagttttgtatagacagggtctcactatgttgcccaggctggtcttgaacccctggcctccagcaatcctccctccttggcctcccaaagtgttgagattacaggcgtgagccaccatgcctggccttaaatgtggtattctaacaccagtgtccattcatggagggttggtatgtttttattcatgaatggctgatttttgttgttattgtcgttgttgtcaagcaagctcattttgagtcaggtataacattttgctgctatgccatggcatgttctcacagaaaaattaagaaacaagggactggtggtgattggaatagaatctcattgtaagtaatttatccttgtacaaatctaagtgaataacagatcaaatccaattccctaaaacatgccagctatgtattctatacaagcagcttatcatggtatatagtattaattgttgtaaaggagttctaataagcaaataagttcagatgcagccatttatgccacttgacttttatccttcgtagaataactaacatttacctgtattttctacatttatcagaagacccctttctcttttatttcatttaatcataatcttatgacatgaacccggtttggggaggctcagatctagagcatgattttgggggactaacatggaaccatcaccaaattctgaggtgctgaaactgcagagaatattgttgcctattgaggactaacccccagagccactgacgagatctgagcttgggccgtagtctctcccttacccatatcatttcccacatatggatatccaccctcctaagttttttgtcggggatggagaactatatgggataatgcacttaaggtgctgagaaagtgcctagagagagctcgttattaattatcactgttccaatctgagacatagtgaatgaacatggctcagctgtgttccttttgtgtgctcagaaacaccagagattcagacctgggccagggccgtgatgcccaggtcttttcaaggtatctccaaggtattcatctggaagcttttgtcttatgctctccctctcacatccatttagaaggataccaaactgtgctgtgtttcctcttggccctcccttcagtttgccagtaaagtagtttccttttcagtgttggtgaatagagtctcaaagtcagcattgggaaatggatactaagctataactccttcaaggcaatagcacagaatactgcagaatactacagcacagaatattacaatagcacagaatactgcagcacccagtattgtgcctaacgtgataggtgctcggtaaattttattgaatgagttcacgatgtcctgagaggttggtgctatcaagtgactctcccaggtcacacatagtagcatcaagactgtgaccatacttggagaccctagtccggtatcctgcccataataacttggaagacagccagttatggataccaagttgcttagcatcttctttgcagtcactcttagagcaggattgatcaagagccttcgctattcgcattacaagctaggccaggtcacaaggctgactggggcatgagtccagaaggctgatgatagccatccagcaatggactagtacagccattgaaaggaagcacgtgttgaacctggggtttcagcgacttctgttatggtttgcctcctctgacgggaaaattgaaagctttctgaaatgctgaggaaatgccataggagttgtcagatatctgaaaacaagtgggtaaaaacagaaaactacttgtgccaaaacagtagaattcctttcttcagtttgatttctctaacctggtgtatttaggaaaaactcaacttcaggtctaactccagtcatctagagctactgtcttgtagtagagtaagaaattgaaccagaacagatttcatttaacctttcaaaagtgagattttcacacagttgaccttcttgacttcaaggaacaaaacgggactatcagttctctgctgcatgcgtcaacaagagatgggaggagagcgccccaggcgatggctgtttttcatatttggtttgcccagagaatgtacattttggttcacatatggaaatcagccctttgtagatagttacagataggaatttccagatgatcctgtctaccttagtcttgtcttaatggaataaccatatttctgtttaggagtgggttaattcagctgcctttccaaggtaccatggaaaaattctctaagcctggattccaagaaatactactattgatgagaattagagcactggtgtttttcaaatggtgggtgttggtttgttttgagcttggcataaatcacgtgttgaccttagcttgcttttttttttttctttgagacagagtttcgctcttgttgcccaggctggagtgcaatggcatgatctcggctcactgtaacttctgcctcccgggttcaagcgattctcctgtctcagcctcccaagtagctaggattacaggcgcgtgccaccaccctcagctaattttgtatttttagtagagatagggtttctccatgttggtcaggctgatctcgaactcccgacctcaggtgatccacctgccttgaactcccaaagtgctgggattacaggcgtgagccaccatgcctggctgacctcagcttgcttttgaaaaccagtgtataactttttgtcttggttcaaaactcatctgactcttgacacttcttccaagtttttgttttcgtttttactgtgctatagtgtaactctcagggtgggtagttttgtgaggtccatcacccagcttgtttcccggaagatccttggcctcattcagaccattcaagtgctcatggtttcttggctgtttgaggagctcttgatgtttctgggaacctagatgatttgccagcccagctctcaggagcccagcctagcagggcttccgtctccatccaccatcaaagaatgttcaagaatcttggcatcaagtggcaagaaaaaaagaaaactacccaggatttacatctatatgtatactaacgatttataaatcatgtggataaagttatggctaatcttttgaggatgatttctctcaactacagctttccctcaagagccacttcttccagaaattgatcagcaaagaaagatcaaaggaaagcccagattcaagagagacctctttaaaattttccagcaaaatagattctcttactgacgaatgtatgcaagtggtatagcacagtggttctcaaaccttttggtttgtgggacctctgtatactcttaaagtactgaggaaaatgaagagttttagtttatgtggatattctttttttgtcactacaccaaatctggtaatgatatggtttcttaaaggttatttacaatgtggaatctgaaatcatatcggtaaactttttgtgctctggtatattaaaatccattgctctgtcttgcactttgagcagatcatttacccatgcatgattttgtaacatcatgccttggtcacttagaaaatactggttcactgacatgaagaatttccaattcattatatagttttttgaaatcgcatttgttcatatcatcaccagtctcatcagaaaagtctaaatattgggaagctgttgagctcatcgtggtggatacaaatgttccagtgaaaactaattgaaagctagaaatttgtcgttggttacaaatactgtcagttggtttttcttgaggttacaggatcagttggttaatttttgagaagatgtctgccagatacccaggtctggataaccatagttatctatccgttattctttcaagtaaagatggtattatttgaacagagtggttagttcagcttgcagctcagacagttacacaggtgcttttcctggaaacaaatactgtacttcaacacatgataataaaaggatatatatttaaaggttgcaatttaataaaattttactttcattgaggactttctttagtgaaactggcttaattttctatttgttagatcctgagcatgtgatgatgagaaatacaatgatgaatagtacagtttggggccactatgttgttgttgttgttttgagacggagtctcactctgtcccccaggctggagtgcagtggcgcgatcttggctcactgcaacctctgcctcctgggttcaagtgattctcctgcctcagcctcctgagtacctgggattataggtgcccaccaccacgctcggctaatttttgtatttttagtagagacagggtttcaccatgttggccaggctggtcttgaactcctgacccaggtgattcacccccctcgcctcaacctcccaaagtgctgggattataggtgtgagccaccgcgcccggccacggggggccactactttgattgatgctaatgtgccaggagttttacccatcattgactttgcaccattaatgcaaatgtcaacacagtgaaaaaacaccaataatatcatcgtaatattataaaaaatgttttgactttatggactccagaaccttcacctttgactgtagcaatttatcctaaagaaatgtaccccaggccgggtgtggtggctcacgcctgtaagcctagcactttgggaggctgagcaggcggatcacctcacgtcaggggttgaagaccagtgtggccaacatggcgaaacctgtctctactaaaaatataaaaattagcctggcgtcttcgcacatgcctgtaatcctagctacttgggaggctgaggcaggaaaatcgcttggacccaggaggcagaggttgcaatgagctgagattgtgccactgcagtccatcctgggcgacagagtgggactccatctcaaaaaaaaaaaaagcccaaaatttatgtgcaagaatatacattgatgaattattctttttggtagtaaaaaaaattggatatatctaagaataaatgtttattaaatacattatgctatatcaatggaaaagtatatgatctgagcaattgtagcaacattttgtgagaataaagacacaggaaaatgtgagataaatgttaacgggggagaaaaggaggaaacagattagtatataaggaatgattcagttatgtgataaagatactatgtacatatagacaagtgtaaataaataattggaaagataaatacaagaatgttaatagtgatcatcttgagtggtagggatatgggtgttttaatttgtgtctttatatttctgttagtctaagtgttgtacaataagcatgtgttacttttggggggaggggtgttgtttgcattttgcaaatttatttttaaatttatattcagtacaattcactctggtttacagttctgtgagtgttgacaaatgcatagaatcatatatctactaccacagtcaagatacagaacagggtcatactttctggcatgatcttccatctgcgacccaccatactgaatatgctgccaatcccaaagatgcacagaatgaaactttgtaaggtgtgtgtttctttgcttggcaaggagtgggtaggtacatgatctgtgartataaaatgaaatttgaaggacaattcccccaaaggacattggaggaaaattctaacatttccattggagcttygtcacaagaaaatttcagctctgaggatttgggaaagaaaactaaatcatatcttcaattcatttcgtccttccagtgggtcatgaagacagagaacttcaacgccatgatcagtggttccaacagtcaagtagtcatccctacgtatactaggggtggggggcagtgttccatgtataccaaaacccgtgcatactgaagtcccacacttgaccccgcagaatcctcggataggaaaagccagctcaccatatgtgtgggtttcatgtggtttggtctaaaacaatccatgtataagttgacccacacagttcaaacttgtgttcttcaaggatcagctgtatatttactactatcgctttctagaaattaaacctagatattaagccatgtaaaaagataactttcctatattcaaatatgcatccattttaacctactcaagtctatagctgagtttgttcttttacaaatttgagcatgtatatagattcatacattcaccaccacaatcaagatagaaaacagttcctacaaaaaccctaaaaactcccaaaatagtcctataaaactccctcctgctattcctttataagcacaccctccttcccactcctaactctgtcaactatgatatgttctcatcagtagaaatttgtcttttcgagaatgtcatataaatagactcatacagcctttgagactatcttctttcccttggttcattccttttattgctgaatgtattctatcatatggatctgtcagtttgtttgatccatttactcactgaaggatgtttggattgtttccagtctggggaaattatgagttcaggtgctataaacattcacgtacaggtattttgtcagtgcgtaagttttcatttctctaggataaatatccaggggtagggttgctggctcatatgctaagtgtatgtttcaccatttaagacattgccaaactatttttcagaatggcagtatttttttcattcccgtcagcagcgtatgagagttccatttactgggcgtgctcactggcacttgatattgttggtattttttattttagacattttaatatgtatggaatggtagctcatcatgatactaatttacatttccctaatgactaatgatgttgaacatcttttcatctgcttatttgtcatccttatatccactttggtgaagtgtcccaagttttcccccatttaaaaaaaattggattttttttttttattgctaagttttgaaagttctttatatatcctagatacagatcctttgttggatatgtgatttgcaaatatgttgtcccagtctgtagcttgtcttttcattctcttgatagtgtctttcacagagaaaaagttctaatttttatcaagtccagtatatcaatatttttcttttattgattgtgcttttgatctcatgactaagaactcaaatattatctatgtctatgatccattttgaattaatttttataaagttagggcagagttcaatttttttctttggtctgtgtgtgtccagttgttccaacaccatttgctgaaaagtctgtccttcttccactgaattgcttttgcacccgtgttaaaaaccatttgagcatatttgtgtgggtctatttctggactctttgatctcttccattgatctctctgtttattcttttgccaataccacacaccttgattactgtagctttatagtaagtcttgtatagtgcaattcttccattttatttttttcaaaaatgtcttaattctagtttgtttgcctttccatataaattttagagtcagcttgtccttattaacaaaatttttattggaattgtgttaaatccgtatcaattggggaacaattgacatctttattatgtcaagtcttccaatatatgaacactttatgtctcatttatttggatcttctttgttttcttccattaacattttatagttttcagcttatgggtcctgtacatgttttgttagatttatatacctaaggagtaccttttggttctcaaaagagtactgaggatccatgaaatgttaaaaatattctacataaatgcattgttaatatgtagcctttaaattttattttgtaaacctttattgattagttcaaatattcagccacataatactgccaagtttttaaaataccagcttttgtattgtaattttacttttgtaaaattcttagatttacataaatatctgtatgtgtatatacgcctagagagatttctaaaaggatttttaagggtttgaaaaccctttaaaaatacatgttaatgaattctaatgtaccactgaatagttaacatgtaattaccatgtgctatatatgagaatatgaaagtaaaaggtatatatactttcacgcctgtatcaagttgattgtgtacttataaataagaagggagttaaatttctaaaacacaaaaatgagttctcatgtgacccaaaataatttttggaaagcaaaaataaccattgtatcttcttcgtatttatacatttttagtgggaatttaccatgcttcttaagtcttcagatttattgctgactcttgacaaatagtggatcattagcattgctcaacctcgcctcttctctgttgtgaatatgattgtataaacctaggtgaggagtagtgtgcatagaaatgtcatctttcctgtatctcttctaggggacctgcctaatgatttcatgacatcatctgatccagtatgctgaggaattatggtctttccaagcttttaaagtagttttgagaccttcagttctgtcactaccctctcgaccttgactgtgactcaccatagtctcttttggactagcttcagctttccatctataggaagtgcctagttttttgcacagcctagcactccatgagcagggcctgaaagtcaaaatggagcaatccctaggctgcatttctcaatattccttgtaggaatcagataacagaaatgggattctgcaacttcttcagcatataggaacttgagtgaaaatacaggactgcccatcttttgaaatgttttggccttcttcacagttcctgtgggaactttgaaaatttttcaaacttgttttacttagctacctgtctacacaagcatgtcagtactgaagtaggctgtctgaaccctcctccctaaacaccattttccctgctctcacacaccaaaagtatttaaagtgccttcaaaaagtgattttaaaagaggattccattattgttaatatacattgtattttgcacagtaccttgcagttttcaaagcattttttatactgtacctagtttgtccctcacagtattcctgtgaggtattcagagcaataccctccagtatttcccagcccaggatgaccaaagcccacaagtttccacattggatatcgtggtgttgtattatattccacttacattgccttttcttccattctcactgctttaattcaattcctggtcatctcgttcttagcttgctaatcgatctcccttgtctttgtatcagtccattctctatatcatttccaggattatttttccaaaacaggattaatgtcatcttccaggttaaaaacctcctgtggttgttcatttcttaccgattaaaattcagatttgggagcactgcattaggccccaagccagcctttccaccttctctaccctcagtatcccttgcagaccatctgcctgccgcactggagagcttggcattcctcagggatcccttatgcttgactatctccacactttcactcctgccatttcctctgcgtagtaccatagcccaccacttgtgacatcccactttgtgaaattcttctgccttcagtggtacagtctctggaaagccttcttcactcagctgtccaggcaaaatgtcttactgttttctgcatgctctcataaccttttgtacacacctctgtggcagcacctactgccaagttgattggctctttttccctcacaggccttgagctccttgtgaacacaagctgtgctgtgttgtgttgcgtttagcttcatgtcacctgagcaaagcatagtgccagggacatggctgacacaggatttgcttatttgagcaagggagtgatttttggaaccttcagaaaagctgtgggtgtagtatttatgtttgatggaatacccaattcttactttttattgttaatgacttcacagccagtggatggcattttctaaaatgtcatctttaatctcttgctgtctaaacttcaatcaccttaggaatctctaagaaattaaacttagtcttgcatcatacacatacacatattttgcaggttttcaccttaaaattattttctgtgtttctagcttgttcttgaaccacaggtgtggtattgatcttttcttttacttaatagcacctttcctgccctcacgaccatgaccaggaaactggcttcttagcaccaaggctgattttcaaattcttgttggtttaggttctcttaaaactagtcagtcatatctttttcctattaacaccataattaaatacccagagtacagttttgagaagcccttagcaccatgtgtatatacatgtgtatttgtctggttttacatgctcttttcctagccctagcatgcacaagtgcactcttgcacaagaatgacagagcctagttggcttttgcctccttttggagagctgttatatttattggtcatatgcccagtggacttccttcctgttccatacttgactggtagttatggagcacctaattgtctgacagaagaagatagttcagcagagaaggctcattatagaattgtatggccttgatttcagggaacctgtcccctttgtctaccttcagaatggctatttcccatttttggaagataacttgagtatgtggtacagaattaagtattttcagataatagtaatgcagtatttcatttctgttctggggttgctagtagaagcaactctgtaggaataagctagagcaaaggagtgaacatgagtttagatggcttttctttttgtcagaccatcactagccattgatagaagagctgtacttttgtgttactttccttttgtctttaacagatagagtgaaatataatttgcaacacttggaaccttgtaaaagacaaccaaccaaacagataacaaaccaaaaagaaatcacctaagtcacacactggataaagctttctctgagcagcctctgactccttggacagcagtccctcccctttcagaatcctaacaccctgtccccaccaccactctctcagtgttctgttgagggcaagagtcagacacctagcttttgtgtttggctttaaaatcaaagttgttttatcatgttaaactgccaggaccatgtcttcttgatgtaaaacccctgaaacatctattacaatgccatagactcagcagatactcagttgttgtatttttttatttttgttttgttttgtctttttttgagacagggtttccactccctttgcccagactggagtgcaatggtgtgatctcagctcactgtaacttctgcctccccagctcaagcgattctcccgcctgagccccccaagtagctggggctacaggcaggtgccaccatacccagctaatttttgtatttttgtagagatgggctttcgccatgtttcccaagctgatcttgaactcctgggctctagtgatctgcctgcctcagcttcccaaagtgctgggattacaggtgtgagccaccacacccagccaacactcagttttatgtgaagtcacactctctagaaggatctgaattccatttctgtatttataagcatgtagattataggaacaactcattttctaaactaatgctttacctggttctctggtaatcttttttgtgattggaggccatcatcacagaagttagatatccatcacgatgtttgtcttatgagaagaaaagatgggctatttggaagaaacaaattaggttttggtaatactaagagaatcagttgtatatttcagaaatttagggaacctttttatttgttgaatttataagtaagacatgcatgatgtctaaccgttacctaaccagagaatttacttcaagccaaattttgaactgcataaatgttaacgtttatgaaaacgggttctaagcaattctttttcagttgtggtgctaaatgtctgtagtaaaaagtatataaatatatacttgcatctttatgtatatttctttaaaaatttgttttatgatctaaggtttaaaaaatttgataatgctggctatatgcacacttttttttaagtcaggaatcgttccttttcttctaaagtagacaatcaaaataagcagtttgaagagattgatttaagacagcaaaattgttgtatcttcagctgtgtaaaagaaatactgcaccttggaccagaaaatgtatattagtgatggtttggttagtgactgcaaaagcaaaataaataccatagtataaaatacagtttcacctgacagcatgtttgactagtactaaacatctgcatttagggagcagttagtactaaaatgtgttctgcttctttgcatgaaaatacattaatttgaaatcttacagtgcctttctcactgattaatattaggaagaggtctggtcaggtcttgttgataatttgttttctagaaacgtggggaaaaagcatttttcacaaacctatccaaaaaaagttgccttatttctcctccttaagcctttcaatgactttgcagaataaggttgcatcattgtttattttggatgtggaaggttgatcagaacattgctttttactgtaaaacggcagtgtaatgacttaaataataaacttacaggcacagggagattttcttccctgtgttagttaatctttaaacaatctctagcattaagaaaaaagatactgttgaagaccccagattgcaaaagcagtgccacttcttttgagagctttggggcaatcctctgatgtgtaattgctttacatcagtcacaagagagagacaagaatgtgctttccttgaacttaacagtttgggcaattttctataatccagtaaatacaaattgtagcttgattattcatctacgtctgtcaagcaaattttaatggatgaatgaatgagtcaaatctatgcatggaaatatacaaatgtgcaaaatatgggtctaattaccaggctgctgaatttacacaaggtcaggtaaacaaggcaccagtgtaatgattattaattgttaataatgcctttgggaaaacattcacattttccttctgaatacctaacagtttgcctttctagtcattttaaactctgaaaattttagctggtctaaaaaaacaaaaacatttttgtcctacttttatcctttctctataattgcttactaatttttttagaataaaggtaaaatgtaatacatttttgaggaccctgttgaaaatcatagtttaatatgatggtgaaagaattaaggggggtagcatactcacagaacagaatgaaatagctgctatcttttgtcttcattgaagggaagagtatgccccccccccatcttccaccctcttttcaaacctaatcgacattctacaacacaaaaccaaggtggtaataaaggaaaggaaatcaaagcaggcttttttcccctctatttaccatagtaagtcaacatttgactctgtcttgatattctataaaatgaatgttggaaaaagaataatatcaatgagtagtttcccatcgaaatgcccaagggccgaaataattgagggaatacttgccaaggtttttcttagttcagtaactcttgatcactgtgcagttgtgtagctgtgctatcattaagggctctccatgtctggaaggacacccccctctcccagctttaatccaaaagtcataaattgtagaactaacatgtcgtctacgggtcacccaggcgaaaacactgcatcttgagaaatctatctttctgccactgtgctttgaaaatcttttgaatattttgcattaatggtgctcccgcagtctcttgctgggctctctcctcatcttcacaagctccatattgagaagtttttcctcatagttaatctaaacattcttctctctgttctaggcctcacttcttactacatacctatgttcagtgttacatgagtatacccaccttcctttatggttttttcccaagtatttttaagtagcactcatatctccctttcattttcgtttttctggaactatttatttatttatttatttatttatttatttatttgagatggagtctcgctctgtcacccaagctggagtgaagtggcacaatctcggctcactgcaacctctacttcccgggttcaagtgattctcctgcctcagtctcgcgagcagctgggattacaggcgcctaccaccacgcctggctaatttttgtgtttttagtagagatggggttttgccatgttggccaggctggtcttgagctcctgacctcaggtgatccgcccgcctcggcctcccaaagtactaggattacaggcgtgagccaccgcacctggctggaactctttatttttaatcgtgattgctctttgtgggttagattatagtgtatgtaagccaaatgaatttgagcaaattttttaccttaactctgtagttagcatcctatcctattttgtataccactctagaatataacgtacactttatacatatttgtgagtgctatagtggtttaattaaatttatgtagcattatagccaaactctttattctggcatttgagacattataaatccaaccttccctttccacagactctatcatccagcaacactgtcaaattatcattcctctagacagacctccttgttttcacacaactgctgggattgtcgtcacccacttgccatttttatctttttcaattctccttcacctttaagacctaaacccatctcacttctaggaagcctttcgtggacatcacagctatggaatgtttttttttttttcctctgaatccctaaagaactttaaaagtataacttttctccccccattttctttaatatagtctcttatagtcgttcttttatttggcaaatcattttgttccctataaggttgtagacttctggagaacaggggaaagaagaaagactaatatttttttagctgccaaacacttgctaaatattttttacgtatgtacgtttttaaatggtatcatttaattcttgcagcaaccctgtgaggtgggtggtattttttccatttttacaggtaaggaagctgaatcttgtagtaaacacaaccaatgttagaatggtaataatacattgtagagctgagatttaagtttgggcctctctgatttaaagcctatatgctcttttcagaaagcctcctccataaaagagtggcaatttgcttcctaatctgccaatttactagaaagttcaaaaaacagaataggtgttcagtaaatgattaaatttatgactgtggaaatctgaattgctttgacttcatttcttttacctatcagctagtggtaatatgaatcagcaataaaatagccaaagccttagtaagggccctttgtattctcaccaaaggctagtagtacatgaaaggttgacagttgtactccaacattaaggctgtttacttgagacaagttttttttacttgtttgtctgtttttaagcttttctcttgttgattccaacattcactgatattgctaaatgtctcttttctcacttagtatttgtatttcattttaagagagtaaatttcattatataatagtagcatgaataatttatgcctctgtcaaggaactattaaaacacagagatttttaaatatgcatattctaaacttcatataaaaactacggaatggagtttttatttcctctctgagtgtttattcaggagtaaacctgggcacttactaaaaagctatggtcttactgacttcaatttaggatagaatgctgagttgtaattatgtctatagataaggagaaattggtgttttatctttagtagaaaatcagctgatgtactttttgggggctttttacattttttatttaaaacaggagtttttatgaggtgtatttattctcaaagaattaatgattataaggattaagaaggatgattgccaacctaagaatgaaaagaactttgatttgatgagcacaagcaatgtgactgagctttggggtgacaaaaatacgatgttttaggtatctggggtttcttcttatcaacttccacgcatattgataagttcagcctattttgtaaacagttactaatgccataatgcattttcccatattttccatctgaatttttactattattgattgaagattcaattgagaaatgtgtttagaaccctgctttccgtggtaatcacaggagtcagtgggaagacaagaaaattgtattgaaagaaattgtgtgcgtgtgtgttttgtgtttcagcatagattatctctgccaaaataatagctgtcattttgtttttgttatattagtggcccgtagcttaccactactccttttgccttagttttgcttctgaccgctggctattcccatcagcaagaagacctttttaattgaatgtccaaatttgaatgattcttgtcctaatatcattataatcttgatccatttcaaattagagatccctaaggttgacttctcacctcagttcaacaatcctttaacattcagagactttgaaacttcacttctgtttagaatttcatatcatgcccatcatggggggaaaagatggaaaatgtatatgctgagcctataggacctcctgcagtgcttattaatcctttgtggatcatttgaaatgtttctagtttatttaagctttgctgcttgtatcagattgttcctacgaaaaaagaaaaagtgatcatgctttgaatttttaaaaatgatctcactttcaagcaaaagcacttttatgctccattaaagttgaatttgccaaactcttatgtcgcattaacacaagctttactggatagataaatgtgttgttcaaagaccaacttgaactttaccaaactgcttattaagatttttatctttattcttcttatttcttaaattattttaaaataaactagtaaaatagactagataggcctaaaagtactactttaatgacaaagtaatttcttcatttgaggtaaaaaaaattagtatagatcgtaagctaattgtttatgaaggcaaaattaacgaaaatattttgatcacttttatatttttatatttgttttatatagtatcaatatcacaataaaacttgatttttttttaatttgcataagtgatttattgttttgacatttataatttttgttctagtctatcatgcatctttgaaaattcaatattttcttgaaatgtttagtaggtcagccaataaattgacttttttttatccttctcaatttagtgggttttttcaatatgtgtaggacatcttctgttttctatgaatgatagtgttatattctttgtttctatttattttgtgacgattttagcttggaaataatcttggaatgtgtatctttttgacctagagttactcggaaagttctagtctcatttgtactatgttttctggctccctaatacaattataaggacttagtcttttcatttttagtctccttagccttgaggatttaatttaatgtgtttgttcttcagaaagaatgtaagctagttttctacttgaaacgtctttttgtatttttaaatacatgaaacctttacagaggatttgttttatcaaaaaataacttacatgctcttttttaaagcattaatttacatcaatatttatagtgaacttgaaaaaatattttaatggtaatgaaaatataatttaatatcaagctaaatctttttcagccctcttagattccccatttttagctgttgagtcactggagttcctaataaagaaaaatgcgtttttaggaaattacttttctaaggcaaacaataaattgtacacacagagggaaaggaaaggagaacttttcacctgcctcgtgtagggaaaaatctaaacaattacatgaaacacttagcaagttattttaatattacagcttttccatttctgagaatgatgataccttgttagtaagaaactttattaacactgacttctagtgtaaaaatctgccctggattcatttttcactaattcactctattattttctcctagtgttcccatgacctttcagaaatgtgtagttcgtattttgtgctgtacgaaagctgccccttaggttgcattgagtaatgcaaagttgaattatgaacataatggcagttctctgtggcatttccagttcatgcttacttttagtttgctaaattcataagtgaaatgttttttaatgttgtccacgttaggggaaaggttaaataatgctgagcttttcttcgtgagcaaacgggaagagtcattttggttgtttggtagaagattgtrttcccatattttcattctttggccagcatagatggtgcactggattgttttggagctttcagacaggacttacatacatctaaaatatttcataaactgctcgggtagccagagtattcttgtatcactgtgcaatagcactaaaaatcatcctgggataagaaatgtgaagcataacattacttcccaaagtcatgtactttgagaagccttgagaagaggcaagagagtaacagtatctatgaattctctgaaaactcttgtttccagtaggaagcctggttacccaccaaaaagtaggtgatgagaattttttttaacttcaagcataatctttctaaaaatgtaattttacttgagatttgcctctcattaaccaacaaaccatatattttggtcacatatttaatgaatgcgatcatcattgagttgtttgctgtgaagggacatagagaagatgcactgttttccatttttccaagtaatatgggtcacatcataacctgtaagtaatccatcactaggcagtggctccacagcattcggataaaaatgttttaaacattcctgaaagaagaaaagcccacaaatactgccctgtatattgctgggagagaagatatgagtgcttgtatgtgggaattattcttttgtctttttaaggcaggtctcactctgtcacccaggctggagtgcagtggtgtgaacacagctcactgcagccttgacctcctggtcaagcgaacctcccaactccgcctctcaagtagctgggactacaggcgtgtgccaccatgcccagctaatttttaaattttttatagagacagggtctcaccatgttgcccaggctggtgtcaaaactctgagctcaagcgatcctcccgccttggcctcccaaagtgctgggattacaggcatgagccactctgcctggccaggaattactcttgatcacacaagtcttttatggcagtttgggacactggtcttacatgttgctcacagtgtcatcccatgaaagaggcagggtaggtacacttgcagtatccatgggaacacacccaaaggctgatagggtgaacggcttgcccaaggcacatggctcctgaagcagtgaggtgagaagagatctttgagttggctcctgcccttccattttgccacagggcttctttatctacctcctgcaaggagggcacagtgaaggaaggttcggatgggtttttggactctcacaggcagcctagcctgagggaggctagagtgttcagccatctgaattaatctcgatatcagagagtttagttccctcagtgtaaaattaaaagaatatttcttcatctgctgcaatgcatcagacactatcytagactatagaggctcaaagttgaatgatagcatctcagagctcttgggggctgaggtggtggccttctgtctccctttcttctacctctttccttctttcctccatccacaaactttttgtcctcttatatattagcacgtttggacctcttcctgcacttaaagtcatgcctaccttcatgcgctccaggtgtcccaggtaaaaagagccattccccaagcgatgctgttgaaactgttttaatatagacccagcatgttgcttgcccttagcattcattttaattatttgaagaaagtgattcatacaaatatgtacaaagtacagcccttttgaaggtttttcactttaacagtgactttacatattattttgatagtgatgttcctggtatgggcagcgaggatgtaagctgggccagaagaaggatgaatcctctctgcttagggaatcagtttgctggacatgtgaatagctatatccccactccagataactgtacccacatagtgttatgatcttcaatgttttagtgacattgtaaatgtagcaatagagtagagagtcttcatcatttcatactggtatgtaaaatgccccaggtatgtgaccacttgaagcacccggcttttgtatgctcagtaaccttgtgtacagttggtgaccagttagcgcaatatcttagtccttcactcatccccaaggaattcaaaaaattcatcctgttacgagtggctttctttccttgacaatagtttgaagtccagcatgtaaaaatgtaaatctctctgctggcttctaatgtgcaaggccttctgagagtgttcccagggaagaagagttgattaggtagagacttctctgttcttagtaaattaatgacctactccaggcccattttcttctttcctggaggaacactcagtgacagtgcttatgcagccatgtcaaattctttagttttattatataaaacatcaaacgaggagccaaagagaatcttttcctaacagcatctcctaagccctagaatggaatcagaagtaaggcaatggactagcaaatggacaggcattcctaaaatcatcttagtgtcgatgggaggcatgttaggcttgccacagatgagtgagacatgaaagtagattcaggggcttgttagaagattcagagctaggtcaagagagctctggagatgaatctaaagaacttttctttgaacctgtttcaataacacatgaaaacatctcctaagatggcagatcttttccttacggttcttgcaatttagaaattgtaggccctgggaatgtgtattaaaatccgtagcaaccaaagtattcagaggggaataaggtattttgggctttgagaggggcagcataatgggcagatgtcaggattaacaactaatgattgatacatatatatattttaagccttttatctgtcattgtagcactctgcctcaacctggcttctatatgtttcacaacttgatagaatatgccatttagtctcatgatttatacttattaaaccttatttgtataaatacatgcccatttatcactgtcacaccagtgaggacctgctcaaacacagattgctgggtgccacccttagagtgtctgattcttggtctggggtaaagaccagagaatgtgcatctctaacaagttcccaaatgatgctgatgttgctgatctcaggcccacattttgagagccactgctgtagacattcaccgacatatattactcagccgggagcacttgaatgaaaacagtagtaacactaaatcctaacttaatggtggagtaatgagatttagttaagaggaaatactttcagtgctaggaatgtgtatattttgctaacctcagttatggataaatcatgaaggcttatggggaaccttatttttttttttttaaattatgttgtagaattagagaattctcacacttgaacagaccttacagtcatctatcctgatgcaacacccatctttatgaaagaagggactgaggcccttaaaattcagctctgccccatttcaagttgtggtttttagaggcagagccaggagaaatgattgaatactatagtttaatttaaataagacttatgttagggaagggatcttttaagaggactaatttcccaaatataaaaggagctattttaatatttagtcaaccattcaatgtcctttagctaaagtttcagtcccaaagttgattttaggcactgtgagacaaaggtctctacagaatctgtaatgattttaataaagttacttttcttcagttgcagagattcctgggtggcttagttcttaggtccatggacttagatccttgggaaatctgctagaggcagcccggtggaaatgttgataaatatcacattttgaaaatattaaccgttgtaattagaccaaaaaaaggaatatataaaaattggaagaagggggaaattattatttacagatcattctaacatggaaaatccaatgaaatcaaccaagaaactatcacagacaaaaaattttaataaggttactagttataaaatcagtgctaaaaatcagtagctttcagctgtatacacacaaccgattagaaaacataatgaactctcatttataaatgagattataaatctcatttataatacaggttaaaaagaggaaatacctaggaataaacttaacaagaaatgtgctagatatatttgaactctgaatggcttaaaagaagacttgggtaaatggcaaagcatatattcttggctaggaccactcaacattttaggattgtcagttcccctaagtttatccataaatttaaagcttcctcaatttttaaaagaaaatcgcaggaaaattctaacagagaaaatgacccaccagtcctaccggtttttacaattaggatatttaaaatattttggtgcaaaaatatttggtgatttcagtggagcaactatagaaagcccataaatagacccaaagttgcattttgttttttaaaagggggtagttcacgtcagtaggaataatcatctggaaaaaaatacagttgatttcttccttgttccttacactgaaacaactttcagaaggatcaaaaacttaaacttagaaaatggaactataaaagtaatgttgttaataattgtggaattgagaagactttttaaataattgagtttattttttagagcagttttaggtcacagcacaatttcagagtaaggtacagagatttcccatatactccctgccccacacacgtatagtctctctcattatcaacatcccctgccatagtatgtttgttacaactgatgaacctatattgatacatcatcacccagagtccatagtttatgttgaggttcattcttggtgctgtgcattttataagtttggacaaatgtttctaacatacctccaccatcacagtatcctacagagtgctttcactgccctaaaaatcctctgtgctccacttattttggaagacttttaggtaatatatagcctaggaaagggtatagggaatggagcactctcatacactgttggtgggcatgaaaaatggtacaccttttggacaacaatttggcaacatcatcaagattgtaaatgaacataccgttctactttgcaattctaatttgggtatctctccttacacatgtacagtccttacagatattatcaaaggtactatacaaggatattgcttgcagcgttataatagtratagtaagagactgaagacaacctgttgttgatcaggagagaattccttagattattactatcatataatagaattttgtgcaaccgttaacaagaacactgcagatctatatgtactgacaggacataatttcctccacttttcagtgaaaaaagcaggatttagaacagtgtatatgataaactttcatttgtattttttaaaaaattagagatattcataatatgataatacattttaattaacctgtttgggtgtggtggctcaaacctgtaatcccagcactctgtgaggctgaggcaggaggattgcctgggcaatatagtgaaaccctgtctgtattaataatatttaaaatttaaaaaattttaaattaacccaatatatccaaaatggcattttattctgtaatgagtgttaaaaataccactaaactattttatagtctccttttttgaactaagtctttgaaatttgctgtatattttacacttgcagcccatctcaatttggtctagccatatttcaagtgctcaacagccacatacagcgactggctcatatattaagtagcatagatgtagtatgtaaaaagcactggactagaagttcagtctacatgctgtgtgacagtgtgcaaaaaacgtactttcttctgggtctcattttcctcacatacaacacaaaagattagacaagagctctaaagtctcttccaattttaaaatttagggtttaaatatatcatttcttattacttgtcaaagtcaagggtgtaattgtggttgctttccatagacactgttttcaccagcactcctaaaattctgtgattctaagtaaagcacatattttaagaactatattttattgtcagattgaggttgtttatttgtttaaaggaagaatgttattaagctatgtacatgatgtaaaccatttagttcttgtaatacaattaagtcagatttgaggctttgataattctagtgctgcatggaaaacttggaagagcaagagtgaaccaccaaaataatatctaaagaaagagtaaatgtagaaagagaaaaagagttgagagataattttttaagtacaattctgtttatgaagttcattgttcagaaaataatcaccggtagttctttttgaacaagagagagaatgagaataataaggttctcaaccttagctgcacattagaatcacttgggggaacttcttaacatcccaaagctcatttcgtatcccaggctgatgttctccaactgaggtcccaaaccagcagcggcagtatcacctgggaacttgttagagatgcaaattctcaggccccacccaggacctactgaatcagacactctgggggtggcgctgtgttgtaacgctgccctggtgattccagtgtgccaccagagttaagaattctggagcaagaagtatttggaacagggttaacagatgggttttatattgagtgccagcttccatcctatagtggtcttgaggacagagttggaaacggaactgcaatatacctgctaagtgtttgccattcctgatttagtgatttgggtaatttattaacattatagaaggttggatgttgcaatcactcgtagatgagcctttctaaacaaatatatgtcaagcatctcagccagttggcaaagaaaaaaggcgaaaagggaggaaaagcaggagaaaagaaaaaaatcacattggaacagaagccacaaaagaaggggggaggaatatacaaggtaaaatgttataagtgaagaaattccaggtagattataaaatatttatatgtaagggtttcttgagttcaagtgtgatggggattttaggcccatttcaagatctatcatcaattctatctgatcaaaaagtaccaaaggcttgttcagccctttaatttggcattaagggttatatttcttcttaacattcagacttttgataggaatgcacttaatacaggtatggtaaatttggagtgaactaagccagaaaataaaatatattttcaaagtgtaaagaagttatcactgactgagaaggagttaatgtgtcatatatccttttgatttctactctttgagagaaatcacagtatctataatttcggaggcatattcggaagaatgttaaattgtgatttctctatgctgaatcttagagatctgtcagggagtcttcagccctgacaaaataagaatggacccattatagtatcaggtccatttgatttttcaaaagttaagggaaatatgcagatcgtttcagagacttctctttttgctcttgcttgttataagacagatgaagggaagcaaactgggctgtgtttagaatgcatctggagctgcttctctctcgagatctcggcagtataacttctgcaagccctttctgtgtgtatttttcttttctcatcctgaaatattccatcttgcatgagaaagtcagctttgataatttccaaaagctaagtattatgacagaatttgtgcctcttagaaaaaaactgctcctttactataaaatagaacctaccttttatacctgagtaaaaaattctgataaaacttttctaatcgtatttattattgaaaagattatttttgaggtggtgtttactaaaatatgttgatttttatattaatttctgaatactcagtttatatttttagattgttttgtgaattgggatctctgagtataaagtggttttcagcacattggtgatattgaacatcttcctcaaatagcaagcatatgcatttcaacagctttcgggacagtactacagttaataatttctttacaagacaaatgtatgcttttttattgttagcattattttctcatcttatgttctggcatttaaattatgaaacttcatctcggcatgtagacttaccttgtgttgccaagaggaaagaagtggcttttctgcaaagccaaatagtttttactttattgtctgctatgaaacagctgctgattccaggaaaatgccgtctcatcattgggcctggggtgtccaaaagaggcaggaaaaaaaaatgactgtagctccctgtctgccctggcactctcctcctttctctcattttcattgccatgaagagcatgagaacaatattctgcaattaaggattccattaagttgaagaaaagagcaaatgggggatgtttgttctctaagctgaaaaaatttgtctggggtcggggggggggatagtggtagtggtatggagagaggtgggtggagagacgaagtcagggctgtttgttgaatatactgttaaggactgttaccatcctaattaatcaagttagaaattacagctgtagtcggtttccccccaattcttgttatcaattttcttctcttttgagacaaagcaaatataaattttgtgttcatttgtcattcgttctttgacttcagcatctctgaaaataacaatgtagcacaaaagcccagtatttacctagttgtaatgtgggttgccatggtgttttgcaaattattgcaattatgttcaccatgcgagtcgcccttggtaactggcgaaaaaactgataatcctgttttgaacaaaaggtcaaattgctgaatagaaagtcttgattaactaaaagatgtacaaagtggaattatttcctaccattcagaaatagttcttgatcgggtttgggggagggggtgagtaagtacatctgattactgaagtacaaagcattgaaaggatgttgtcttgagcctttcatgtagtcttaatggtggcttttttgtcaaatttacccatttgcggcattgaaagaggcagctgcatttaagctggagagacggtgctttttcaagagttcagtgcatggaaagttctcagcagtatctgcagtttactagtagcccctggtctattaaaactgatgtgccgcatttgagcccattgctctcagtacttgtgaacccctctggctgatgatctaataaagtgctcttactggacaatctctgatcagctacttaaaaaggaggctggaggagggggcctgagggagaagcctcacaggcagtgagtcttggagcaggccagaagagtaaagacaagtggctaaactgaaaggtttgtcaccatgatgatttgtgctaaggcgtttgccacagggttttggtttttgtgccccagatctcccaactgtgatcatgctttttttctgaagagaaattttagttttaagttagataagagattagaagtgtctctctgaatgttaaaatctaccttgcaattgtttcttaaattatggccattcagaaaatatataatcctacattcatgtaaaaccaaaagtttcccatgttgcagccaaaggttagatggatttcttctcttctgaatctggcagaacatctgcagggagtgaattttggagggagggagtttttttttgttttttttttgttttttttttagtgaccacctgaaaaatcaattctcaaaacttttgagagtgtgtgaaagtggcatgaaagcaaagcaaaccttaacaagtttgtgggtttacattctacatcacctagcaacctcctgactcagccagatctcttgtctacccttagttctgtttacagactattcaaacggcccttcgaaaccatgaaagatattcagtttcattagtaccattctcaaggagaaaataattaaagttaaatgaacaaacattgcctggtgatagtttgaactccattctgattttaagatgtcctttgaggcagtagtagctatagttcagttttaacatttgtcgttcactacccaaaggcatatcacttgaaaccataccaataaatactagtctctgagcaaacaaacaataaaaattacttttagctagacttgagcaaagaaaaactcttctggtaagaaggttttaagcatgcatgccattccaattgaattttgttttatttgattcttaccccaggacatctgagttgatctgtgtgcacactgaataaaggcaggggagagggcgtggggaacaaggcacctttctttaaaactgatttattacctaccttcagagatccaccatcataaagaaaggtattcaaatcatattccataaaagactgggtgcattttagtgaatggcttaatttaacaaatgatactaatactactaatacataccctgtcactttctcattgagaattgcttatgtgattaaatggacctatttttgaaattttagatttagtaaaaaaaaaaaaaaaaattttttttaagaacagactattttttttcatgtgccctttctttccccataagcacattccctgaaaatttatcttggcagcaagcatacacatggtatagctcagaatatttttcagctgtgttagtgatttaattatattgcaagctcttggcaaaactgtctcctcgttaataattctgattataagaacaatatacacttgttgtagaaaattttgaaaatacagaaatagaagaagaaaccacagagattactagtgatagcattgtagagtatttccttccagtcttttttttgtgcatatagtgatgaaaccaaaccttgagttcacttttgaagtttattcattattgtgtgtacatagctaaggtggtggtttttttcagaagtgaagacttgacaggcaggaatggcgttggaagtaatgaacaatttttcttagaggtttcatcactaaaacattaatataagcaccagagtaaccattttaccatctcattctatttgattctttcctcctttcccttgttgaaatgactatgtgccttacctgacacatccatttattatcattcatgttagaaagtcagacattcattacagttggaatgttacatccccaagtcacttgtagcttcatatagggggaaaaaagtattttctgaaaagatttgtaatataatagagattaatggaatgtggaaaggaaaatgctttcggtttctcatataaaatgaaagcagggtggctagaaaatcttgtattcttgttatttgtattttgttagatctctaacatccacagtacatgactgggttgcatgagctctttgtgttttgttgacagttgacagacaaagcaaaattattcctgaagcaaggtactgtgtacttagttgtgacctattatagcctaggaatgtagcttgcttttgagttggatgaatagggagagtattttacagaatagacttgaatatactaagagaggttttttagttgcccatacagaaagatacatgtcctctattgaacttttttccccaaaatgtaattttccatataaagtcttttaagtatattttccctggttgcttgcatggagacagttttaactgttctggtattgtcctctaggggtaaaatacaattgctggtaattgttggccttctgtgctcacagtataacgagagaagatggcttgcatgggggctctttaatgtacctcaggtacatcttctgatgctcaagctctgattgcaaattaaaatagcaaggctctgtattggatttgatgtgaggcaaagcagaccaagtcgctaatttatcatgtaatatacaatcgctgaggctggaatttgtccacttgtagtgctattctgtgtgtttaaatgaggaccactgtttgcatccaacctatcataacagtttgggagtgctccattatcctttcagcaaactgatggcagagtctggtccttgtacaaatgataagatcaataagtttcaaataacttggatgaaatgacatatgactgttcatttaaagagatgtcttacttaaaaaatcaattttaataatatttaagattcttacattgaccgatgaggcactttctacttctgttttgataattttgttcaaaatattcttgtattaacttcggtgaatagttagtttatgtatttatttttcctgatttactctttcatctcctaccctagtacctttctgggacttaataatcactctttgacatgccagcatgctgcagtgtagaagatttaactttaaaagcaaaattatattcctgttaaaacttcccctggagatcttagggaaattttctcccagttttgggtacaaatgtgggtcagaaagcaatttgttttttgatatttctggaaattccaaatcacaacatgtcattcttcaaaagcagctgtgggcccatactgtgcactatctataaggagacccattttttgccactggggataattctgtggcagaaaaatgtgcctgcaagggaaccccggaacatttataaatggtttagggtgaaaagagagtctgatgttctcagagtacatctagttttggtataggggtggttaatggccattattgaaaactagtaataatctgatgaactcaaagcatgcatgctgccagaccccgtcctgtgaccctgtcactgcattcctggtgagccattacaatttaaactaaatcgtacgtcactgcagaaccatgctgtctcttgaaaatccgtgaatccggaaataaagcaaagacagcctcctcttcccctgctgcctgttttgccgtctatatcttcactatattttagtttgatcaggaaaaaaatacgaaaatttcacttatgttgactacacagttgtaatattttgcattcaaattgagaagcagcaccacctaatcttactgtttatccattattttagttctgcgttttgtaataacaccagatggacactgaccaggctctttcctggttaaaatggtgcatttttaatagtgcactgtcagctatagcttagcaataatgttccccaataccagagacaggataataacaatattttacatttactcaacatttttgtgagttttcttatttgatcccctgaacaacactaatagagtaaatattacctcctgttttatagatgaggaaactgaggctcagaaagaggttcagtgagttgcacaaaattatctgttagtaaatgggaggaaagaaaccctactcatgcagtttttcataacctcaattctgtattcttcgttgattgtgaacctttgtggtagagactggggaggacagtaccagctccaaaacaaattgttccccaggggaccgaccatccatgtaggtaggcaaaacaagatggtaaaataagatggttaagagacagtgcaccgcagtgtgtgttcagcgttaggtggaataaggaagaaatccctgtggatcgggaaaatttcacaaaagacgaatggaactgatgatcaaggaatcgaccttttaggcagaggttctccagcctgtataatgataaggaggtgaaaacaggcaaaatatggtgagtacagtgagaaaaccaatctgattgggcagtaagtttgtgtaagagaatgatgagaaagggcaggggagtgggatgaggttgtaaggatttgaaagccaggccaatgaatttgttcttaattgtttgtggaaggtgtgtgattgggagatgggagtggagagccctttgcattggatataagagagaacggagtcagggaaaccagggaggaggctactgaaatagaacagtctgaggtctggctttgatgaggttggtggtaatgggactataaaggaaagaccagtggacaaacttggtgactgattggaaatgagaggggaagggcccactatgtatttgactcaagtatgcaaactactatgcattgttattttccttattgttttttataaacttgctcctctacatttttatttgattgcttctgttcatttattcagaagacttttaaaaatataactccaacttttattttagatttagggggcacacgtgcaggtttgttacatgggtatattgcatgacactgaggtttggggtacaaataatcctgtcacccaggtagtgagcatagtacccaagaggtagtttttcagcccttgcttccctccctgctttagtagtcccagaatctgttcccacctttrtgttcatgtgtacccaatgtttagctcccacttataagtgagaacatgtggtatttggttttctgttcctgcattaatctgcttagcatgatggcctccagctgcatccgtgttgctgcaaagaacatgatctcattcttttttatggctgcatactatatattccatggtgtgtgtgtgtgtgtgtgtgtgtgtgtgtgtgtgtgtgtgtgtgtgtatcacattttctttatccagtccattgttgatgggcacctaggttgattccatgtctatcatgaatagtgctgcaatgaacatatgagtgcatgtgtcttttttgtagaacagtttatcttcctttgggtatatactcagtaatgcagttcctgggttgaatggtagctcttttttaagttctttgagaagtctccaaactgcttaccacagtggctgaactgatttacattcccaccaacagtgtataagcgttcccatttctctgcagccttgccagcatctgttattttttgtctttttaataatagccattctgactagtgtgagatggtatcctattgtggttttgatttgcatctctctgatgattagtgataagcattttttcgtatgcttgttggctgcttatatgtcttttgagaagtatctgttcatgtcctttgctcactttttaatggggttatttggttttcacatgttaagttgtttaagttccttatagattctggacattagacctttgtcagatgcatagtttgcaaatattttctcccattctgtgagttgtctgtttactctgttgatagtttcttcaaaagatatttttgaggacctcctatgctctacagtttcagatctagatgatttctgtgtgtatagccttctacaaatacaaatgtacacaaatgaataacagtttgtgtttaaggtgcaactactaggaacgcctcagttacaagtggaaattgatccctttttaacatgtgcagaagaagccattttagttgaggcctcaaaaatataatttagtaatcagaaccaatcaacatttgacacaatttcatacacaatgattttaaggaattagtgatgctgagattaaagcaacaagtcatagagcttggcatattttggtaaaggtttgttttgctattggacaggctgacttcacctcttttgaactttctatttataaatgtggctaagccaggcaactaaaaatttattgaccttattgctattggttatgataatttgtgtgcggcattacgtaataaaattacgtatttggatagcagacatccttaaagtgattctagaggtttttattaaaatccaaatctttttataggttgagtagttccaaggaactacacttttattaaaaatgttctcttctgtttacttgtcaatgtagccttgggctgtacaggctatatgttatttctgaaaatgaggaatgaaagtaagttaagttttgtctttgtgagtgatcaatcagagtgaacttatgcaatattattattttcatttgctttgtttttgtcatttttaagaaacaaaattcagtatgagatcttataagatttgcatcatcatggaatattttcaaatacctgttatatttatttatttttattaaaaaaaatttttttgagacaggatctcactctgtcaccctggctggagtgctgtgacataattacagctcactgcagccttgacttcctgggctccagccatcttcccatctcagcctcccgagtaactgtgaccgtaggtgcgtgccaccactcccagctaatttttgtatttttggtagagacagggttttgccatgttgccgacgctggtcttgaactcctgagctcaggcaatccacctgcctcggcctcccaaagtgctgggattacaggcataagtcaccatgcccagcctatatttattttttaacagcacaaatgttccttgaaggttagatttagctagccggttggcatttgttgggggaacaaggggttaaataaaatgtactttacaaaattgaattgaagcaaagcatatatttaatatgattagggcctatttcctacatagaagagttttgtttaaaatacaccatgaccaaaagcttaattatcaaaataaaacaagaagcataaagagttacaggcttctaatatttttttcagccccagttcccttcacacagttatcagcatgtttaatttccatgcataatagcactagttattgttgtcatttgtaaagggagattaacagatagtaagtacaaacaaacccaaataagcactgaatagagaggtgacaaaggaaaaaagacctccttaatgttaattataactggtaggaagtctagacaaattatattatctgttttccatatgatttgaaaggacatttagttagtacctctgtcagagttaggtgcttgctttaaaaacaggtgagatgataacttagcatgtccgtggttggcagctcccccagggagttgtgaagtcgtagtaaattgacagaatcaagtttcaaaaacatctgaaaagaactctatagtttttgaacattatattttaaaaattaaataattttaatatccaggttatattttggaactgaataatttcttatctcaaaacctgatagttattacctgtctgcttattttttttagttttgtttagaattggatgaattacaactatggttggcagtgttaactaactacatattccaaagcatgtaaagcctcagataccaaatttaaagtaacaaacccaatgaatgataaaggagtggtccagtcctgtatggtttgtttcctttattaatatacctaaatgggtacttcaagaaaacaactagtcttacctttagtgtttataggctacatttaaaatgtaatacctgttcttgctgtcagctccactattccccactgtatctcccatgcctagaacagactaaaccgaagtatcttgtttctctctctctccctccctccttctctctttttttttgagatggagtcttgttgtgtcacccaggcaggagtgcagtggtgcaatcttggctcactgcaacctccgtctcccgggttcaagcagtcagcctcccgagtagctggaactacaggcatgtgccaccacactcggctatttttttgtatttttagtagagacggggtttcaccgtgttagccaggatggtctccatctcctgacctcgtgatctgcccgcctcggcctcccaaagtgctgggattacaggcgtgaaccactgcgcccggccagtatcttgtttctttaattctaaggagctgattgtgagctgcactcttgacttaacagcttttttgaaggaaactaaagtacattattaagctgtacatgtccattataaatgcatctgagtttcagaaatagtaaaacgtgaatataaatgtctctctaaatcaagaagatgttgtaatacaccctcaaaattaaacagctgcctgtgactccaaaacactgattggttcatgatcttttgctgtggtagtagtagttcatctcagacactaatctgtcccttctctgtattgttagcatttatagttggtaccacgcaacttggttcttaaagccaagccatactgaattgcttttatagtctttatgtgtgtggaccttgctttcctgtttagattgtaatttcctaaaactgtacctggggcccttttgcctattcttcacaatatttaatgtaattctgggcatatattacaagtttcattaagggctcattgagaccctccctgtacttgaaaagctcatattaaattttaaaatagtttagccttgaatgaaggtaggaataatgcttactgtgggtgtattgactagatgaattttacattctttaaaggtagcataatttttttattcatacagatctataatacactttccctttttgtgatagtcttaaatggagctagaagaactgattcttggtgctttcccctgagttttgttatagctacttccagaaaagcctattccgaggaatgaggtcaaacggcacagcagcaagtgagggcatccctcagctttggattaacaccacatggaaacattactaagtggcagactaaagtacctgacataatgaaccaacactcatgtatatactgctcttatctaaggggaaaagaccaacaagttgttcagtctagaaataggatatgtggttatgcgtgttattgattcctttattaatgataactcagcatagctctttctggcctgcattctttgacatacattgttctttctgtgtaagttgtcttttctgccttctctacttaccaaacttccactcatttttcaagaccggttcagaagttgccatgtctcaaaatgctccaagatctacagatagtcaggtccctactgggggctccacaggtgagaacaccataagacaagggagcagcagcataccgtgttcacctttataccccagcacctcactctaacatttgccttatacttacgcctctgtggcaatgcatgtagcacgaaagcccacagaccttggtgccttagtatgaacaggtgaactttgaccccatttgtgatgtcttacctcctttgtttaacagataacgttttataacataagactgatttaaggtcttaggtatattcttatcacatcactatgagaaaattcaaacaagatcagcaagggagagtaactgaagaaggaaggtgagaagagggttctaaaagacagagaagtgagcgatagctgtagtatttcaaacctctggaaaatagtgatcagttgaagttgtccttgaaaacattgaagctagttttatgtctctagaaagcacatataagagaatctatttttgtttgcatgaaataattgattatatttattaagtgtttcttttatgccaaatataatcctagacactctaaatgtgttccatcattgcaacaacggtatacggtaagtactgtggtatccattttacagagaaggaaacagcacagcaattaagtaactagccaatagtcactcagctattgggaaggttatacatgtatgtggtgcattctttggtaatggtctttactaatgaactaaaacacattggtttacattctgcctgtagtagaagtttttgttgggaagttttgatgtattggagtgaggaagggtgtttcttttaagaaaaaaaaataacatctcatgtgattttcttttttttttttttaacttaatggttttcctaacttctaagtttggggcatagatctatctaattaacatgtcaggagagagagataactagagttatgtcagaatttctgagaaaagattaaataaaatgagtctatcttgataaccaaaaaaaggtttattacttgtatttgtcgatggtgataagtctgaagttttcccttctctccagggctggttgatatgtgaagagccaacctgtcgcaatcgaactcgtcaccttccccttcaattctcccgaactgggcctctttgcccagcctgcatgaaagctacacttcaaccagaggtaacagtctcataatgctaaagaaccatgtagaagagggtagagggctgcttgctttgagaagtagatactgagtatttgccctatgaagatgccctactaccatatgcatatactaatcttatttttaaaaaatacagatttcagaaagatacatgctttctttttttcacatgtcatgagcaatactatatttatatttaaaagggaaactgactaattctcatatgagttatagatttctttggttgccactacataattacaaaagaagacatggccattccattctagaaactgctatcgtctttgggcttgatcagaatcccatttgtaagagccagaaatcctcccaattctgtaccctgaatggtttattttgtggggtttttggtcccctctgctggattaattgtttataagtagctgcatagatgagtagttctgaagccatttttctttgttttttgtttgcttggttttttttttttttttttttttttttgacggagtcttgctctgttgccaggctggagtgcagtggcacgatctcagctcactgcaacctcagcctaccgagtagcttgggactacaggcgcgtgccactgcgcccagctaatttttctatttttagtagagatggagtttcaccatgttggccaggatggtcttgatctcttgaccttgtgatccgcccacctcggtctcccaaagtgctgggattacaggcatgagtcactgcacccagcctgttttgtctttttgagatggagtctagctctgtcgcccaggctggagtgcagtggcgggatctcggctcactgcaatctccgcttcccatgttcaagcgattttcctgcctcagcctcccgagtagctgggactacaggcgtatgccaccacacctggctaatttttgtatttttagtagagacagggttttaccatgttggccaggctcatctcggagtcctggcctcaggtgatctgcctgcttcagcctcccaaagtgctgggattacagacgtgagccaccgcacccggccactcaagccatttttctaccttaatatacacacctgaggtgtaagacatactatcattaatgactcccaactagaaagcatggcatctggaaacacttctctggtaattaagatgccttccctctgttgacccctttgagcatcttcgacccaaacagcattttccaaactgtagtgagaagtttgcaggttctttgagcaaagagggttttgtgatcaagtatatctagcagatgctgggctagctaaaattaaacaagtttattgcagatcttttcagaacctataatatgataatgtgcaatctgtctcactaggacaggtccataatgtgcctcactttccaaattcgtctagcctgaagatttgtaaggtttttagtgagaagaaggtgagacttgggaacctgttgtttatttacttacttcttaaatgcagaggcaggcctataatcaagttttgacttcaaattttcctgctgaaaagggttgatacacagactagttttagaaaaatatgtacacacagttttagaaatggagtcctgctatgttgtccaggctggaatgcaatggctattcacaggcgcaatcatggctcactacagccttgaatttgtaggctcaagtaatcctcctgcttcagcctcctgagtagctgggactacaggcatgtgcccagctgaaaatattttattttaaaataataatgacttaattttaggataatatatcatttcacaaaatttggcaactagtcaggaactgcaaatagctaccatcgttgtgtattcagttgttcttttgcatatccatatgtatttttttacatggttgccatcacaatgaagatatatacttgtatcacatttatcttttgtcaagcattttttctgtgttgtacttcattttcagtacgatttttttttttttttttgagacagagtcttactctgttgcccaggctggaatgcaatggtgcgatcttggctcactgcaacctctgcctcccaggttcaagcaattctcctgccttcgcctcccgagtagctgggactacaggcgcgtgccaccatgcctggctagtttttgtatttttagtagagatagggtttcaccatgttggccagactggtcttgaactcctgaccttgtgatccacctgtctcggcctcccaaagtgctgggattacaggcatgagccacaacacctggcctccagtaccaaaaattttaaacacaaatttaactatacctttcattgggcattttaggctattttcaatatctctacttgaaattttgtgatgaatatttttctgcttaaatgattttttctttatttgacatttaggataaattcttatcaacaatacatacatacattgcataaatacaatatggtcatgatttatattgccaaattgctttcctaatgggctttcccaacttatactgtataccagtactttatgaacataccagttttaccatagcctttctaacatttggacactatcatttattttttaaaactaatttgatcagcataaaaagttccttgccctttttttggtatacctttgatgattagcaactttttttaaaatgtggaatgttagaattagctgtcattgaattatttttacgtcattcttgtctcaagacttgcatcagcaggtgcagagagagaacaaaagtgtatgtatttagtgtgactcatcaatccggttgtaggctttaggggaatcaccttgcttcatgaactgatgctgcctttgagactttttaaatatctaactcatcaagttaagttcaatgaaaatcaaattacttcttagaaaatcaaccagttttatgattgcattcttggtaagagaaggtaaaaggttagtctataatcttagatcgttaagctattagaccgatacatttcgaggatgatgttgatagtggtttagtatatcaggttatcttttaacatttattaatctttttagatttcaaagtgacttgtttttttcttcatatccttgtccttctcaaaactgcagcgttttagacatgtgtttctcaaggttatcagctactcttcccaaggagaagctttcatagattagctcctctggttccggtgctgctcaggacatgaccctatggagttactcagtttcagagcaggctggttggtgatactttccttagccattcctgacagggaccttgacagtgggactcagaacactcttatgtactcgattttgagttgctaataatgggcgaggaatttcttaattctatttgtgaggttcctgggcttttctagtaggagggaaaaatgcatttttccaaagatagttctagagaagttcaaaaaacagttgtgcaatggacagaattattgtaatcatcagagggttttccaaagtatctattctgcaggattatactcatctggttctcaagttctcagttgctctgtctcaatcataccttactttcatttaataattatttattaaacaactgcaactacatcctaggcactttgctaggtgctagaaacatgttaatgaacagaacatttctttatttataaaactattttaacattacacagattatataaaattctataaagttgatatctgtgggcaaaaataggcatttataaatgcccatttggacagaacactagacattcctagtgctagactagtgggagctttaaatatgttgttcaagtttgatggtaaagcactggcctcttactgtgccagtcttatctgcacataataaacctattctcacttagtcctgggttgcagttgacttgagtactttccagaattgacttggagtaggaaagctggctcttctgctggctcgcattgccagagttagaagaagaaagccgggacagtttttttctcagggttttacacgtgtatcttctctcttctcagatatttcattcatatatatatatatatctcacagttaagttttttaggctcatggaaattcccagtatacaagttgctgcttaagacatatattccctgagtattttttgctatataagaggtgcatttaaatacgagagtgaaaattttgatgcatgtttaagttactaagtaaatagaaccctctttgacaggatcattcatgtgccaaacctcagcgtcacacaatatacccatgtaacaaacatgtacacgtaccctctgaatctaaaataaaagttgatgttatttttaaaaatcgaactctatcatactggtgatagagatgagacttacccaagttaggcaataaatattttagtatctctttgttttaagaatgtggttttgactttttaatatggtgaaatgtgtatggatgtgtatggaatccctccacagaggattctgtattagtaattcaccaaaaataaagctttctggttttgttgttgttattattattaatctctcattatcgaactgggatttcaaaccaaattaaactttttctcattaacgtattcattcttgatgtagagctgagaaaatgtctgtatgtgactctcacgatcatggtagaaataatctgtcgaaactgtatagtccctggggcaggagcagtatagtggagccctttattcaattatttaatcaactaaatttcttgaaggtcacttataaggaaagcagtgaaatgacttctagtcctactttgagaaaccccctagtgtttctcacattttcctcacttgtaaaattgctaaagtctattataacagaacacataatgtgtaccattgtaggacttctgtccttaaagggagaggagaaataatgaacttataatcattatatgttaccatctcaaaatggctatggctgaacaaattgttgatttgatgagtaggttagggacagtgagaatgttgccaagctacctggggaagtttcttttttcagaagaaaacatgaaaataattgtggtctcttaaggcagtaagcatgagtccgtgtaggaagagaaccttagaactatgacctaaagtcttaaacctagtcattggttattctccagtagggaatggtggtttaccatgaagggtcttttggagctctcctttgttattttgacatgcatatttgatgcaaagagattactaaattctatttacagcttctcttactgccacatgggtgctagcaacctttttcaatttacttttttttaattggggtataattgacataacataaaattaagtgttttaaagtgaaccatgcagtggcatttagtacattcacaatgctgtgtggctaccaccagtatctagttccaaaacattttcatcaccccaaagaaaattccatatctattaagcagtccctccccatttccccctccttctagcccctgttgtcactatggattgtacctactttgaatattttctgtaaatgaaattatacgatatgtaaccttttgtgtctgacatctttcacctcgcataacatttttgaagttcatctgtgttgtagcatgtattagtacttcattcttttttatggccaaataatattccattgaatagatatgccacaatgtgtttattcatccattgatggacatttggattgctttgtcagtacacttttaaagtttatttttaattaagtagacaggtcttacatttggcctgaattttttttttctgtagctcactcattggtcctacctcagctgaatggtaccacacaaagctagactgatccctttttctgtctctgccttcagtaagcacttattcagcacctattcaatgcccatgttatgagagcctcttagacatataaaagtagctgtcttcctgagtgttcccttctagacccaatattcctgagtcttcgtttctctagagctctgctttcagaataatgatcttagtaaagactttgtgtcttgataaattgaggagcccaaaactgcgtgcagtattttaggtgctctcactagcactagtatggagcagaagaaacctgtcactgctaccttttctaggtagtaaatttctgttaagtctgttcagagttgtgttaactttcttggcatccatacttgcagtgtttttcgttttgagcattctctaaattaaaatgcctagcaattttttttgtacatgcatctgctaagccatgtcttatcatggattttttggacccaaatggcttatttagacctaagtgtaagacttcagtaggtagtatattaacaaagtactacaaactaggtgacttaaagtaatagaaatgtattacagctctggaggctagatgtctgaaatccaagtgttggcggggccattttccctctgaaatttacggggaatccttccttgccttttctagcatctgctaatccttggcttgtagatacatcacttcaatctccgcttctgttgtcacatggcagtcttcttccctgtgtgtctctttctctttttcttataaggacaccagtctcatattggactaaggcccagcctaattcactgtaacttcgtcttaatgtgatttcctgtaccaatactctattttctttcttttcttttcttttcttttttttttttttgtgagacagagtctgactgtatcacctagtctagagtgtagtggcacagtcacagctcactgaagcctcgacctcctgggcttaagtgatcctcccaagtatctgggattacaggcatgtgccaccatacctggctaatttttatattttttgtagaaactgggctttgccatgttgcccaggcaggtcttgaaatcctgggctcaagcgatctgcctgccttgacctcccaaaatgctgagattacaagcatgagccactgtgcccagccccgcccctattttctaataaggccacattcataggaactcggggttaggacttgaacatatctttttaggaacacaattcaacccattacaggtaggaattgcactgagctaaaagtaatggagaccaaaactaacagtagcttcaaaagaacagacatttaattctctaagaaacattcattccttatcatgtgaaagaaatccaggtttgggctatccaggattgctcttgtggctccacagtgtcatcagggcatagtctcttcctgctcttttctgtcattctcaaagtcatgatgtgttcccaggagactgcacacgcttctgaagccatcaaagggtacaagatggagaaaaggctgaaggatccaaaggatgtgcttcccagccttgtcagttctttatgcagcctttctagaagttccattcaatactcttgcttgcatttcgtgggctagaaattagtcatgtggaaataattgctctttttgttactaaagaaggaagagtagactgggtattggggaccaaccagcactctatgcaacagagaccttccaatgaaccctgtcaaatctccccttgctggcctcagcccatcactgttccattgtgggatttttgaatcctgattctgccatgtacccagccatttggcttctgcagttcttggagaagataaaagatctctcttttgtcttctccaaagtattggttaaaatgttgaagtgcatttatgcacaaaacggtggatagatgccttcttctagatggacattgctccattttaatcagtatgctttgtgtaggattcttctaattatctttgcttctagtttgtaattttccacaaggggaagaagccctacttctaatgggcctgtagtctaatggaagacttagggaaatacaaattttccacactccattgaccaaagggacaaaaagggctgcaacagctttgtaatcccagtgctccctaatcaataaggtaggaaagataatagagaggtgaggatggtgattattagatgagagccttgatccttaactgggggcagttttgccccccagggaacatttttggttgtcataactgggggttgtagctggagtggggagggaggtgccgctggcatctcttgagtagaggccagggatgctgctaaacatcttgcagtacacaggatagcttccagagctaaagaatgatgcagcccccaaagtcaataatgtcaaggttgagaaactttggactacagtaacctgtccaacccacagcccatgggctgcatgtggcccaggacggctttgaatgcagcccaactcaaatttgtaaactttcttaaaacatgaggtttcttttttgttttggtttttggtttttgggtttttgttttgttttgttttgtttttttgcgattttgctgttttgttttgtttttagctcatcagctgttgttagtgtattttatgtgtggcccaagacaattcttcttcttccaatatggctcagggaagctaaaagattggacatccctggacattgagggtatctagcacagatgccttagagtagaatttgaaggcagattttaaaaaggacaccttttagagtggaacaaatacatgtagcaatggctgtgattggttgggtacagagaatgacatgtagacttttcatggctgttaaagagtatagaaggcaaggcatctagaagatgaaaacagttataaaatagtacccctttactaccataggcagaagctttcattttaattagctattgaaggtatttgctagattcgtaagacgagagactgggaagcctaatttaagtgcaaggtgcttaacatgcccttgatacggttcgaagagtttgaagagtgcatttgggagctgtgttggaattccagggagcacttcactttgctgatgggctgtctgtcctgtgtgaatcgagtacagaaacagaagatagtataagagccatgatgctattggatgagaagggtcatgtgctagtaaaatgtgattatatatgctctttattggtgaggtgtaaatatggccctggaaatctagagacctatgtaatcttagagaagtcattttaccttttgggacctcaagttcctcatttgtaaaatagaaggcttacagcatcagaaaaggcccctcaaaggagagtggactttgggaggaaaacaggcatagggcacagaagtggggggctgttctggacaggaagatgaacaaatgccttcctcttctcttcactgcyccccccccaccaacccccacctcagcagagggaagggatgcatctgctatccccactcatcactggactccccaagggccaggtgtgcagttcgttcacctcagggagatccagtgcctggaactcagtgcatacccaagtgatgtttgttgaatgaatgaatcttagttagagcccacgtctacaaacgaaaaaagagcaaaaagcttgtttccatttccagttcttgtttctgaagaaaatgaagggcttttctttctccccagagaccacatcttcttggcccctctacctagaccaatgcagagatgttccagggatgttcagtctagccccctttcagttccttactctttcccacctattcctctcccttcttagatccttcttgtgtttatgcacagtatttgtttggcaagtgccttgggaactagcaaaaccatgaggacattttcctgtcaccgataccctctaatgtgtcccttttgagttggcagcttaaactgcttgctgaataaaacattaacttcttcaccccaaccttgtccttactcaattctggcttcacagctttattgacagcaatgcttatcaacccacttttatggtgggctgaaagagattgactattattgtgcccagattaaatgggggagtaatgccacccctgtctgattgtgttgtaattggtcagagttatatacaggtgcaatttgtaatattttcagtaaattaaatttttttctctttggcttttattgatgtatgttcagatgcccattagggcttccttttttccagtggaaattgcagcatgttaattttcacacaaattacagcaatagcaggtatctctatttgatacattataacaggagcaatcaaggataattgagtgcctttcagatggaaacgggtgcattcacttcaattcaaagcgagtccatttatcgcctaatcggtctttaaacactaaatttctggaacaaaaattcttgtcataattttgcttaagtgtatttggaaatcacagtcctttgagcaaggataattgaaatcaaatccctttcaatggaggtgacatttctacattttcccaattgaaattaatttcaaaaattgagcatgaatatcttcaaatggcaggcaattatagctttcaatgggaagaaattatgcgcacaaaaaagtggagacatcaaataccgcttcagctaaatgtctttgtttccaactgtgtttgccttgtaaagatttacatatattgacttattatgcaaccttgagatgcagatcgccttcctttttcatctgagcccattaaaattaactaaaattggaacgttcttgttaagcttcatcaaaactgtttggaatttactgcagctgcagaaatgtgttcataatagaacttaacccttcaaagacttgaattctacccccattttttttaaatctggaattctaacttcagcgcatttcattgtttcacttttaatgattcaaaagaggagtggtgaagaactgatatgctaattgtcttctctttttgtcatctggtacccatgggatctcaggtaaatctctggagcctgtcccctttgaaaactgccctgaaggacaatactgagttcccagagggcaccaatatgccaacctttaatatttaaatgtaatcatatcaagccgatttcccactcctcacaataggaattgctcttattgttggactgtgacaaactctgtgggtttcctgctgcggaccttttcctactaagaaccttttctcccaattgttttattgccacattaatgctgctattaagatccgtgtgctataaattagataagctttatatatttttttattcatcgtgactttcttctgttttccaagggtaaaagtatattgagaactgactcttgcaagcacttacttttcgaaagtagtttagaagcaatctagccatgttttacagttatagcggcaattgtttcaacaaccccaaaaaaattgcattactgaaatatatttcatgggtgcaattggccagggacagggagggcagcaggccatttcttttattaaggtcttgcgcaaatgttatgaagagggcagtatctcaagaaacaatttcacagctggtttgctcctaagccactcaagcctaaaaatgcaccgaattcctggtggaaaaaaaagaaatagatgtcactcccaaacaaagacaggtgctaagctgcgggagatgagagaaggggtgaaaacagtatccagctttaatagcaaaagcaaatgctagctaatggcccattctcaggaactcgttaagtcatctctaagcaaccacaggataatacactcgttatttctgctggtatgtttcctaaaagtgaggcgtattgctttgagcccagaatcttagtggatagtgcgcctcacctctgtattaacctgttggcacgagacctttcctgccgtcttatgccttcttaatggaatttttattagtcatttgggtgttcttttttactttattttctttgctcttaatttttagctttttaactaaaaatgtttttaagttacctaatgttttttgtgtcctataagagaatttccccccttggttcacctgctgattggtttttgtgtatgataaattattcagagcttatgcaaagtgtttaatgtattttccaagttattgttttagtggaagatggacatttgtctttgggtaggaatatgtgggttttttacgttcaaagcaggagttgttttctgctcaaatttgatatttgttagccttgatgtttgaagtactcatcggtgaccaataagctgttatacagccttgaacactgactgaagggggtctgaaataccatggggattaaaaatagcaaaaccacatgctgaaattagaatttatatttagacgatatattgtctttcactcaccctgcagaattttatttttaaggctgtacattgtgtggctctgtgtttctcattttagaaacacaaggaactcactggaaagccagacctggttaatacaaacatagtctgagtaaacatacaggagttgctatgcaggataagggcagaacattcttcaccaacaccacattggttcagtataatcacaaacactgaaatttttctttgtgaaagtgacactgtgaaatgtgtaacaaaatttttcaaggcatttggggatgtatagttcagcattcaacaggaccaccaaagatgtaggcagatgcatttccgccgcttcaaggaagggtgccgaatgtgcgcaggccctctgtgctatccttcattgttcctgcatttaccttcctacttctatgcaatggagtgcaaagcttgtttattggcagtcctgaaggctttgcagaggtactgaatggtggaaactgagatttccaaatcctcctaggttttagggcagcactctttaaataggatttctgagtcccaaatctttcttatatccttgataatttttatattatttcttccttcagacataaccttgatatgggctgtgtgtccttggaatgccaagcagagatcattttatgctttgaggtcatagttataaataatgttacttatcatatactccaaattcattcagaatttagtgagcacctactctggaccaacactgatacagccagtaggtatacagcaggaatctaaaattaagtccctgtcctcatggaacttacattccagtgtggggagacagataataaacaataattatatgacatggcaggtagtgacaaagtactgtggagaagaattcagctgtgtgagtaggaaagggactggcacaagtagggtttgttaatttatgtagggtatctagggaagttctccttgaaacagtaatagtaagcaaaggccagagggatgtgaaacagtgggccttgcagatatgaagaggaagggcatgtataagggatctggaacagctagtataaagggcctaagataggagggtgcttggcatatttaaaaaataggaaaagggccagtgtagcaagagaaaagggaacgatggggaaagccgaaagaggtaaggtgagagaatttgggcagagggtggagacactgtgaagagccatgtaagccattgtaagggctttagtatatatgctaggggaaatggggagctattcaggaattccatgtggaagagtgcagtatctgactaagttgactgctttgactgctgtaatttaggcaaaatatgttgatggtagcttggcccaaggaatagaagggaatctgtgagaagtggttagattcttgatgcattttaaagctaaaactgataggagttgctactccaatccttcttcccctgtgacgttatatagaaggaaatggaggagagattccttcttacaggctactgattctcaattgaattctaatgtatttaattattcacctaaaactaagatcttgcctatggaccccatatagcatagcagtatccttactcttaatagactttaggggaaaaaaatgagttgtgtttgactttcagctcacagtctagccaatgaggcaaaattacagaaccagagaaacccctctgcgcgtgcatgtgcgcgcacacacacacacacacacacgcacacccctgtacatgcatgtacagatccctgaaagtcatgagaagcacagctggaatgagccattgtctcagatgggtgtgtgttcatatgcaggtgtgttgaaggggtggtgggaagtaattaacaactgctgtactaatttttaatgtaaacatgtacataagtagttagaggagatgataagagaagattgcatagaaaaggtgagatgtaaactaagactggtaggatcagtaggatataaataggtgaagttgaggaggcagaaagacattcttgtcagtcccttctctgtgcttctgcttcgaaggtagaggatttggtgccttctactctttctctacataatctatttagaagatgctccagtgttatgaaaacagccttaggaggctgtatgacatctacttagaaacagtagattgaagttggatctttagagcaaactattctatcatgtgactgttagactccagtttagtggtatcagactatgcccttctttttggatggttatagattaaaggaaaatcttctagggcaaatcttgaaattaagaaagtattaagggtgtgctccatactctgttccttgtttgtatccttatgccttgtccttccaccagtcttccctctcctcttcctttacactcagctgtcctgtaatgcaatgtgtgtgttcctaaaaatcactaagctatggaaaatcatataatgacaaccacacagtttatggaaaaacagaaaggttagggcaacacacaaaaacttcatcagtgacacattaaaaaggatataggaacctaaacaaaaacaatgacatagttttacacatcttcagtagctaagaaatatataaatattacaataaatatggtactttaccccgaaaaagacttgaagtttgcttgtggaagtggactcagaaggattgcagctgtgagtcatgatgacgtagagaatggaaggttatctgaaattggaaggaaagttgcaacaaacaccagatgtgggtgagtgtagcacagtgaactgaggtagctggttgatgtttgaggtatttgcgtatgtgtgttttatgtattcctgtattgcttgggtgcatttcttgcattcacctaatatttcttgcagacaaaatcatgcacgagcaaacacgaaattcatgttgtgttcaaactgttccgtgatatatcaatggcactggaataaattctcatattcaaaacaagcgctgtagcagaaccaactgtatctcgttttgtcttgatgattaaccagcaccttaactgtctccctgctttattgttttctcttcattctcataatgtacaaagacactcgtatttttagaaagactgattggaacatctgtcaaccagataattaaacttattgaatattgtctatctccagcatcctggtctgggacgtgggaaacaaaaaacgttttgaaacaatgggttctgcctttatactgcttgaatatggggaactaagcgcagacctttgaagcaaaacaacagttcttaaaatatgacaacatatagaattaatacatcagtgctgaagagatagggtaaagtagttagtaaagagataggataaagtagttagtaaggtaaagcttcttagaatatataaattttgatccagattgtaaacaaagttgtgaacatggattggggaagtagtcccagaagatgaaaaccctagcatcaaattctaccagcattttggttccaggtaagatggagtaagaatagttcttattgtctccaaccgaaagcaactgtaaaacctggacagcatgggtggagcagttacatggagaccgaaaagtaaacagtagcaggtaggttaaagatgaagaccagatttcttttttttttttcttttttctttctttctttcttttttttttttaagaccggttcttactctgtcaaccaggtggagtgcagtggtatgatcaaggcaccctgcagcctcaatctcctgggctccagtgttcctcttgcctcagcctcccaagtagctgggactgcaggcacttggcaccatgactggctagtttttttattttacttttagtaaagatgaggtcttgctatgttgcctaggctggtctcaaactcctgagctcaagcacaccccgacctcccaaagtgctaggattacagacgtaagccaccgtgcctagcgatgaccagatttcaagtacctttaaactagcagtaagtttgccattttgtcccctgatattcccctgcctaaatgcagcacagcgtaaaaccaagcgtgggcaccaagctacagacagcaagttccaggagaagcaagtagtggcaaaggtaacacccagagagaatgtagaaatccccatggctttcttttgttttttttttttttcttcatgccctcatgcatcagtcttcaagtaaccttatggtggcaacagaagctgcagtgagagtcagcaggagccagaactccaaggaagggaaatctcttccctgaatcctctttctctttcttcctatccattggtcctaaatggagtacagtcacaaaaatacatgacaagttagataactaaagacacagctttctgactggaggactgaaaacaggagttacctgcagggaactagaaggtaccaggaagatgacagagaaagccttagggaaacaggccccataaggttgtttatgagtcgggtgcagtgactcatgcctgtaatcccagcactttgggaggccaaggcaggaggatcactcgaggtcaggagttcgagaccagcctggccaacatggcaaaaccctgtctctactaaaaagacaagcgttagccggcgtggtggcacacacctgtaatcccagctacttaggatgctaaggcaggagaatcgcttgaaaccaggaggcagaggttgcagtgagccgagatcgtgccactgcactccagcctgggcaacagagcaagactctgtctcaaaaaaaaaaaaaaaaaaaagttgtttatgaacttctgggcctgtggaaagaaagggtctaatcctaatcaacataccaaagacatggagaactgaaataaaaaccatcacccagaacccaggactacctagtagtgcacagaggagacagatccaaaaaactgcaaaagttttgacagctgaactgacattggcgacacagaaagtggattggagctcacagcccaaatttaatgaagtcaattgcctgctaaaatgaaaataccaacaattttcataggattgaaagaagaccctgagactcatactattcaaaatatccaggatataattctgtaagatagaaccaggaaaatcctataagaagaaccaggaaaatcacagattgctggggtgggggggtgggggtgggggaggagacggaacacgaacaaaaagatgccaatgctgagatgataataatattagaattatatgataaagactttaaggcagttattatccaaatgttccaacaagtaatggtgaaccccccccccctttttttttttttttttgagacagagtttcgctctttcacccaggctggggtgaagtggcgcaatctccacttactgcaacctccggtccccgggcttaagtgattctcctgcctcagcctcctgagtagctgggattataggcactcaccaccacgcccggctaatttttgtatttttagtagagacggggttttgccatgttgaccaggnnnnnnnnnnnnnnnnnnnnnnnnnnnnnnnnnnnnnnnnnnnnnnnnnnnnnnnnnnnnnnnnnnnnnnnnnnnnnnnnnnnnnnnnnnnnnnnnnnnnnnnnnnnnnnnnnnnnnnnnnnnnnnnnnnnnnnnnnnnnnnnnnnnnnnnnnnnnnnnnnnnnnnnnnnnnnnnnnnnnnnnnnnnnnnnnnnnnnnnnnnnnnnnnnnnnnnnnnnnnnnnnnnnnnnnnnnnnnnnnnnnnnnnnnnnnnnnnnnnnnnnnnnnnnnnnnnnnnnnnnnnnnnnnnnnnnnnnnnnnnnnnnnnnnnnnnnnnnnnnnnnnnnnnnnnnnnnnnnnnnnnnnnnnnnnnnnnnnnnnnnnnnnnnnnnnnnnnnnnnnnnnnnnnnnnnnnnnnnnnnnnnnnnnnnnnnnnnnnnnnnnnnnnnnnnnnnnnnnnnnnnnnnnnnnnnnnnnnnnnnnnnnnnnnnnnnnnnnnnnnnnnnnnnnnnnnnnnnnnnnnnnnnnnnnnnnnnnnnnnnnnnnnnnnnnnnnnnnnnnnnnnnnnnnnnnnnnntatggagattccttaaagaactaaaaagtataataccatttgaaccagcaatcccactgctggggtatctacccagaggaaaagaagtcattatatggaagacacatgcacatgcttgtttatagcagcataatttgcaattgcaaaaatatgaaaccaacataaatgcccatgagctaacgagtagataaagaaaatgtggtatatatacaccatggaatactactcagccatcaaacgaaatgaaatagtggcctttgtagcaacttggatggggctggaggccattattctaagtgaagtaactcaggaatggaaaatcaagtatcgtatgttctcacttataagtgggtatgttcccacttataagggggagctaagctatgaggatgcaaaggcataagaatgatataatgaactttggggacttggggggaaggatggagggggtgaggaataaaagactatacattgggtacagtatacaatgcttaggtggtgggtgcatcaaaatctcagaaatcaccactaaagaacttatccatgtaaccaaaaaccacctgtacccccaaaaactattgaaataatttttttttaactcacagagtggttggaaaccctcataatggtctccaccctcctgggggaaaaaaaaaagaaatagaagatgtaaggaagagtcaaatggatatatcagaagcaaaaaatataattaccaaagcaaaaaacttagtgggctcaatcatagaatggagacgacaggagaaagagtaaatgagcttgaagatagatcaatagaaattatccagtgtagacgaggcatggtgcctcatacctgtaaatcccaacactttgggaggccgagccggacagttcacttgaggccaggagttcaagaccagcctggccaacatggtgaaaccccatctgtactagaaatttttttaaaaattagctgggcgtggcggtacttgcctgtaacccagctactcaggaggctgagacacgagaatcatttaaacccaggagtcggcggttgcagtgagccaagatcatgccattgcattccagcctgcgcgacagagcaagactctgtcttaaagagaataaaagaaattatccagtatacagaagacaggaaaagactgggagggggaaaaaggagccttggggacctgcggaacaataacagaaaaatctgacagtcatgtcattggaataacaaggaaagaaggaccatagggccaaaaaattatttgaagaaataatatttgaaacgtcctgagttgggcagaagacatgaatttacagatttaaaaagctcagaaccccaaacaggataaaataaatttattcccaggtaaagcataataaaattatttaaaacaaaaaattctgaaagccagggaaaaatgacrtatataagaaaaaaagatttaactgatgatatatttctcatcagaaaccctggagccagaggaagtggaacattttggaagtgtttaaacaattatcagtacaaatttctatgtccagcaaaaaatactcttcaggagtaaaagtgaaagaaagacattctcagatgagtaggataattcattgccagccgaccagctctgagaattgctaaaggaagttattcagagagaggggaaatgaatgctggaggaaacttggaacatcatggatgatggaagagcaacaaaaatgggaagtataatagactatttttctcctcttgagtttgctgaaatatgttttgcaggtgaaaacaaaaatcatagcattgtctgatgaggttttcaaygtacatagacatagagacaactacagcataaagagagaaatggggtctatatgtgtttttgcattccacttgaagtggtaaaattttaattctaagtgtgtacattgacattctgaagtatagactatataaagagatgtcaaaatccaataatagctaaattataataaaatttgcaatgttcaaataaccaagaagagggcaggaaatgggaaagaggaaggaataatcagaaaataaataataaaatggtagccccaaaatgatttttttttaatgatgcaactctaagctgccttcaagaaactcactttatttttattttttattattttactttcgtgtaatttctttttttattattattttagggtacacgtgtacaacgtgcaggtttgttacatatgtatacatgtgccatgctggtgtgctgcacccattaactcatcattttacattaagtatatctcctaatggtatccctcccccctccccccaccccacaacaggccctggtgtgtgatgttccccttcctgtgtccatgtgtcctcattggtcaattcccacctatgagaacatgcggtgtttggtttttttgtccttgcgatagtttgctgagaatgatggtttccagcttcatgcatgtccctacaaaggacatgaactcttcattttttatggctgcatagtattccatggtgtatatgtgccacatttgttaatccagtctatcattgttaggcatttgggttggttccaagtctttgctattgtgaatagtgccacaataaacacacgtgtgcatgtgtctttatagcagcatgatttataatcctttaggtatatacccagtaatgggatggctgagtcaaatagtatttctagttctagatccctgaggaatcgccacactgacttccacaatggttgaactagtttacagtcccaccaacagtataaaagtgttcctatttctccacatcctctccagcacctgttgtttcctgactttttaatgatcgccattctaactggtgtgagatggtatctcattgtggttttgatttgcatttctgtgatggccagtgatgatgagcattttttcatgtgtcttttgtctgcataaatgtcttattttgagaattgtctgttcatatcctccgcccacttcttaatggggttgtttgcttatttcttgtaaatttgtttgagttctttgtagattctggatattagccctttgtcagatgagtagattgcaaaaattttctcccattctgtaggtggcctgttcgctctgatggtagtttcttttgctgtgcagaagctcttgagtttaattagatcccatttgtcaattttggcttttgttgccattgtttttggtgttctagacatgaagtcctttcccatgcctatgtcctgaatggtattgcctaggttttcttctagggtttttatggttttaggtctaacatttaagtctttaacccatcttgaattcatttttgtataatgtgtaaggaagggatccagtttcagctttctacatatggctagccagttttcccagnnnnnnnnnnnnnnnnnnnnccagcaccatttattaaatagggaatcctttcccccattgcttgtttttgtcaggtttgtcaaagatcagatagttgtagatatgtggcattatttctgagggctctgttctgttccattggtctatatctctgttttggtatcagtaccatgctgttttggttactgtagccttgtagtatagtttgaagtcaggtagcgtgatgcctccagctttgttcttttggcttaggattgacttggcagtgcaggctcttttttggttccatatgaactttaaagtagttttttccaattctgtgaagaaagtcattggtagcttgatggggatggcattgaatctataaattaccttgggcagtatggccattttcacgatattgattcttcctagccatgagcatggaatgttcttccatttgtttgtatcctcttttatttccttgagcagtggtttgtagttctccttgaagaggtccttcacatcccttgtaaggtggattcctaggtattttattctctttgaagcaaatgtgaatggtagttcactcatgatttggctctctgtttgtctgttattggtgtataagaatgcttgtgatttttgcacattgattttgtatcctgagactttgctgaagttgcttatcagcttaaggagattttgggctgagacaatggggttttctagatatacaatcatgtcatctgcaaacagggacaatttgacttcctcttttcctaattgaataccctttatttccttctcctgtctaattgccctggccagaacttccaacactatgttgaataggagtggtgagagagggcatccctgtcttgtgccagttttcaaagggagtgcttccagtttttgtccattcagtatgatattggctgtgggtttgtcatagatagctcttattattttgagatatgtcccatcaatacctaatttattgagagtttttagcatgaagcgttgttgaattttgtcaaaggccttttctgcatctactgagataatcatgaagaaactcactttaaatagaagaatattggtccattaaaagtagaaaatggcaaaagacataccatgcaaacactaatcaaaaggaagttagagtggatatattagtaacagaaaattagacttcaggttaaagaaaatgattagagctaaagaggaatactacataatgacaaaagagctaagtcaccaagaataacaaataattctaattgtatatgcacctaacaacggaggttcagaatacctgaagcaaaaattggcagaaaggaaaggaaaaatagataatccacaattatacttcgcaagcgtgacactactctctcaacatttgatagaaatgctggacataaaatcagggatatagaagaactgacaatctgattaatatttataaaacatgctctccaacaataacaccatccacattcttttcaagtgtacatggaacattcaacaagatagaccatattctgggtcataaaaccttaatgaattttaaaaaattgaaatcacacaaattatattcttgaaccataatggaattaaattttagaaatcaataaaagagtgataacaggaaaatcttcaagtacttggaaattaaacagcacacttctcaataagttatgggtcaaagaagaggtattaaggaagattggaaagtattttgaactgggtgaaaatgaaaatatcagacagtgaaaaacacaatatatactgtgatgtgtactgtaatacaaagtaggtcaattaccgatgctcatttattcatcatgaacacacaaaatcagtaaaatactcaaataacaagttttaaggtattggtatattcacccagttgataaaaatcagccagttaatttgacagataagtattaaataatcaggctgttagaatcaggtgagtaaaggagaaagtaaaaacctgaacaaagtaggatgatgcaggtaaagcaatgcttagaggaaaattgatagtattaaatgtttatatgaggagaaaagaaagatctcaagtaaataccctgagtttgcaccttaaaaaatagaaaaagaagagtaaaagccaaagcaagcagaggggaggaaatggtaaagatgagaccagaaagcaatgaaattgaacacaggaaaatagagaaaatcaatgaaactaaaatctgtatttggaaagatcaataaaattgataagcctctagcaaggctgacaaagataagaagagagaagatacaaatcagcaatatccagaattctagacccccatggacttcttttaaaaataataagggaatactccacatatttgacaatttaaacataatggatcaattccttgaaaaccataaaccctaaaactcatccaagatggaacagataacctcagtagtccaatattatgtctatgaaagaaattgtatttatagttaagaagaaagcaaaagagaataacattggaggaatcaatacatagctttaatacttactacaaagctacagtaatcaagacagtgtggaactggcaaaataatagacacgtagaccaatggaagagaatagactcacaagtgtggccattttatttttagcaaacatgcaaaagcaatttaatggagaaggggtagtcctttcaacaagtgatgatggaaaaagtggatatccatatgcagagaaaaatgaaccttgacctaaagctcataccttatacaaaaattaactccaaatatatcgtaggtgtaaatgtaaaactataaaactttaaagaagtaatgcataagagaaaatcttcatgacctagggttaggcaaagtgttcttagacatgaaactaaaattgtgatccataaaagaaaaatgttgatcacctggacttcatcaaaattaaaaacctttgatctgcaaaagacactgttaaggcaatgactgccacagactgggagaaaatgttttcaaattacatatctaacaaaggtcctgtatccagtatatataaagaactctcaaaactcaacagtaaaacaagcaatccaatttaaaaaaaaacaaaagacttgaatagattcttcaccataggaaatataaggatgacaaacatgtgaaaagatgtttaacatcactagcatcagggagatgcagattaaaaccttgacaaaggctgggtacagtggctcacacctgtaaccccaacactttaggaggttgaggctgcagtgagcagtgactgtgccactgcactctagcctgggtgacagagtaagaccctgcctcaaaaattaaaaaataaataaaaataaaactgtgaaaaagatacggctccacacctattagaatggctaaaatacaaaatactgacaataccaaaagctggcgcagatgcaaaacaacaggagccctcatatgttgctggtgggaatgtaaagtggtatcacaaccccagaaaaggttgacacttgcttataaagagtaatatacacttaacatatgatccagcagtcctgttcctgtgtatttaccctaaagaagtacaaatttatgttcatacaaatacctgaattcatatatgaatgtttatagtagctgaattcataatagcctaaaactggaaacaactgtaaagaaactgtagtactttcctaccatggaatattgctcagcaatataaaggaaggtactactgatacacccaacatcttggatgaatagcagaggcattatgctgagtggataagccaagactcaagggtacattctgtatgattccatttcttgaaaataaactataatgatgtagagaacagaagagtggttgtcatgggttagagaatggtgtgaatacaaaggggcagcatgaaggggtgtttgaagcatggtgggactattcttcagcctgattgtggtgtgttacgtgtgtttaaaaagtcgtggtaaggccaggtgtggtggctcacacctgtaatcccagcactttgggaggccgaggcgggcagatcacctgaggtcggtagttcaagaccagcctggccaacatggtgaaaccctgtctctactaaaaaacataaaaaattagctgggcatggtggtgggcacctgtaatcccagctacttgggaagctaaggcaggagaatcgcttaaacccgggagatggaggttgcagtgagctgagattgtgccattgcagtccagcctgggcagcaagagcaaaactctgtctcaaaaaaaaacaaaaaaaaaacagtcatggtaagccgggcgtggtggctcacacctgttatcccagcatcttggtaggccgaggcaggcggatcacccaagatcgggagttcgagaccaacgtggccaacatagcaaaaccccatctctattaaaaatacagaaattagccaggcgtggtggcatgcgtgtgtaatccgagctacttgggaagctgaggcaggagaatcacttgaacccaggaggcggaggttgcagtgagccaagatcgtaccattgccctccagcctgggtgaaaagaatgaaactccatctcaaaaaataataataattttttaaaaaaagtcatggcatgactttttagccaggcacactagcatgtgcctttaatctcagctcctcgtgaggctgaggcgggaggatcgcttgagaccagcctgggcaacatagtgagaccctgtctcaaaaaaattttaaaaaaatcgtggaactgtaccccaccagtcagttttactatgcaataatttttaaagtaagattttttttaatagaatttctgtggcctgataagatataattctgctttaagaacttctgtgaatgtccaacattgagatcatcacaaggtaattcccaaaactgccacactgaagacaaggcacacctaaataannnnnnnnnnnnnnnnnnnntgaagacaaggcacacctaaataaatgtcactgggagcccctgctaaactttttggccaggaatccataccaaggaacaagtatccaactatgacaaaggaacaaaacattcatattctctttgctaaagcacatttgtgaaagtaaaacatctcccccccacccccgcaaaaaaaaaaaaaggaaagtcattcctaaaaattgatagaatagatttggacatcagagtgtcaggccactcatgcaagttctagcccttcaaataagaatgtaaagccgtaataacatgacagcattttgaataggaaaatctggatttgtgaagcagtgtgtgtttttgacaacagtagttccgcattcttttatgcaacataaacatcgatttgtttaaagttaccattcttttatttatccagsgggagcatagatagcatcatagggaaaaagagactctatcctgatttgttttctctttatttcactacagccagcattctggaacccctttcaaacatcccttcctgtgggttaagggagattatttaaaaacaaacagaccacacaaaaaaacagcacagtttctaaatttttgtaataataattgaaaatgtaaattagtttcaatcaagttccttttgttctcctggtttaaaattactggttaaggttattttgcattcacaaatgttaaacagtatatctgagcaaggtgaaatagattacagaggagtcatattggcgggtgggacctccttacaggcctgcagatgactgaaggctcatactgcctccagtggcttctgcttaagccccacccacctattacaattctgaaggggaacagtattccaataaagatattttctttcctattattttattttttaatggctgtgattgtataccatttcatattaggcttagcaaattcacatactcatcttcacttgatgatctaccaatttgctcttttcatttcttcacaaaattaactggcctgtgttgaagagcataaatctctagttcctaaattcttgatacactttgtggaatttttttactagcattaaaaagtgtttgaagctgcattctgtggatgaggccccaggctctatccaaagatatccctggagtatttctctttttatttgttttatatatgaagttgctctataaaagtttatctaaaagaaaaggggttccattaccaagaaaatattgtgaacgccactcacctggacaaatgaaattcacagataatgagaacttgagtttttaaccagtcatccccatttcccatccctctaaactttaagtgttgctaacagcaaaatttgactgatttcatgctttatttgtcaacattggaatagtgtttattgaataccttctatatgccagtaccatatttcaggggggtgcattactttatcttactttgcctttggaaaaactgctgagaagtgaagtggctaaggcagaaaaggggaagaatgaggacatggattatctgtctcagagtaattgagtgccacggtgtgtactgactaatgtgccagaccttcaaatgagataaatgggcggtaaaaagtgatttcagagaaacagacctgctagagctcagattgaggcacttctgttatagtcatagaagattacagaacaattagagccaagaggattgcagaagaaacaaaacactttcatgttaacacagcctgccaaggaatcagataagatattggcataacataggcttgggaattgaagaattcctatgttgttgatccttgaaccttctgttcaaatcccagatagagggcaatagataggtaagacagaaaatttacagtggaatggcatctaaatatgttgaggctagaatgaagcctattacaagaacctgagaactttttttttcttttttcttttttttttttttgaggcagtctcgctgtgtcgctcaggnnnnnnnnnnnnnnnnnnnnnnnnnnnnnnnnnnnnnnnnnnnnnnnnnnnnnnnnnnnnnnnnnnnnnnnnnnnnnnnnnnnnnnnnnnnnnnnnnnnnnnnnnnnnnnnnnnnnnnnnnnnnnnnnnnnnnnnnnnnnnnnnnnnnnnnnnnnnnnnnnnnnnnnnnnnnnnnnnnnnnnnnnnnnnnnnnnnnnnnnnnnnnnnnnnnnnnnnnnnnnnnnnnnnnnnnnactactacgcctggctaatttttgtattattagtagacaggggtttcaccatgttggccaggctggtcctcgaactcctgaccgcaggtgatccaccctcctcagcctcccaaagtgctgggattacaggcgtgagccaccgcgcccggccactgagaacaatttttaaaagaggacagagaacatccaaatgggatgtattatcaaaggacttcccatactttgagacctagactggggcagatgtatagcgtgggaaggatttttgttttgtttttcctgatttttcccaaacaatttttttgagttgcaaaagcttaagataaaagttacaggaattgagtgtttcctttctttaggtgaaagtagttgagagagaacacatttatggctatgcattttattccaaggaaaatccattagccaatttgttttttgtattttttaaatacttctttgtagaatagtttcgttttctatcgcatgtagaaagcagcctaggtaagctttcagtgggaaagaccagatcttgtatacaagcaaatctagtttctaattaaacaagtttctaacactttaatgtctaaaaagaaaaggcaggctgggcatggtggctcacgcctataatcccagcactttgggaggctgaggcgggtggatcacttgcgagaccagcctggccaacatggtgaaaccccgtctctactaaaaatagaaaaattagctgggcatggtgatgcatgcctgtaatcccagctactcgggaagctgaggcaggagaattgcttgaacctgggaggttgcagtgagccgagattgcaccactgcactccagcctgagtgacagagtgagactccatctgaaagaaaaaaaaaaaaaaggcaaaaagcagccaagtcatctttttgttggctctgtttttgcagtgccattattgtcctggcaaattggaagaatttagacaaggaattagtgaattacacatgcatgtgtgttaataccctttcttttattactttttctttggtttttgaaatttaatttgctgacatttgaaaatatacctacaattacttgttactgaataactacttattcaaaatatcatggaggaaaatcacaagacctctaccgtgattcagtaactaaattatgttaatagctacctgaaatttcctaaagaaagtccaaaccaatggactccactaaatgatctcttagagaattactgcttatctctcattatgatggctggttaggatagagagtctgtgtcctcagagcctagcagccatgtttaggggtgggctgtatgaatatatttcattgactgagctggctagaacaggataatggccaaatgtagtctgaccagtagaaatgaacattgacaagaattaagtcttaatgaaataggaggatatagttaatgtgaattgagggcttaccatgtgccagacagtagacttttgccaaacactttatatgcattgtcttatttaatctttacgacattctgatgggtattttacagctgggtaaaccaaggcttcgagaggttaagtgacttggtagaaccagaatttgaagcagtctgtccgactctggaagccacacaattaactactattttatatctattatcattatacctgttatcattaatgtgagaccaaatgataccaaaaagcaaagtttgaggatggtgagcaaagacctctccaaaatctacctctacactttctgctgaaggatagctgatacacaccccacccatcaccaccaaaaaaaaaaaaaaagcacaccatttctcgaatattcctaagcatcatttttgaaaatttcattgttatgtatatgaatctatgctgttctctgaaactattagtcactaaaactacattcatagatataatttgtttcatagtagcttataagggatataacctcattatagactgacaaacactctagaacaaagcagagacagtagagatacattaaaggtttgttgtagccaaatttaaccccccaaaaaagatttaaagcaaacatataccagctactatgtttcaggcactgttctaagcattttttctatttaaactcatttaatatgcatcataatcctatgaggtactgttgttattcctgctttacagatgaggaaacatggttagatgctgtctttatttacttcacattactattaatatgaaagaatacctgagtctgggtgatttattaaaaaaagaggtttatttgacttgtgattctgatgtctggagaacttcaagacaagattggacatttgtatcagatgagggcctcgggctgcttcctctcatgggggaagatgaaggagagctggctgtgtagagatcgcatggtgagagaagaagtgagagacagaggaggggaggtgtgaggctctttttaacaaccagctctaaagggaattaatagagtaagaactcacttagccactccttcccttagggagggcagtaatctgttcatgagagatctactgccgtgatcaaaacacctcccattaggtccttcctccaacattggggatcacatttcaacatgagatttggaggagacaaacatccaaattatagcagatatcttgcccaagaccacccatttaattaagaagtagagccaggatttgaacccagtctggttccacagtgtgtgctcttaaccaccacactatacttgtctcatttcgtatttttacatgtagtagtttaaaataccttggctttacttagctcctttcttctaaagaacgtattcttctagcctcctgattctctctatgccagattaagttcttgcaagtgtctctttatctcgggaaacttcccaaagacaaatattcatagctaataaatagttataatactcactgccatttacttagcactaattttatgccagataccgtactgtttcctatacattatctcattcagtcttcgtaacagtgccttgaggtcatgttcccccccaccaccaccatttacaaatgaaaggttacctggcctctctgagcctcagtttttccatttgtaaaactgagaaagcctcttgatgttctgttaggaatttctaaaggcaaatgaacacgtattcaagtatatacatagactgtggaacataaattttacttctaggaactcaaattttgacatttttatatttcaatttttattttaagttctaggatacatgtacaggatgtgcaagtttgttacatgggtaaatgtgtgccatggtggtttgctgcacctatcaacccatcacctaggtattaagcccaacacgcactagctattttcctaatgctctccctccccagtttttttttttgtttttttttttgtttttttttttgttttgtttttctgttttttttttttttttttgagacagagtctcactctgtcgcccaggctggagtgcagtgtcacgatctcagctcactacagtctccacctcccagattcaactgattctcctgcctcagcctcccaagtagctgggactacaggtgtgtgccaccacacccggctaatttttgtatttttagtagagacggggttttgccatgttggccaggctggtctcaaactcctgacctcagatgatcctcccgccttggcctcccaaagtgctgggattacaggcatgagtcaccgagcctggccaccccctcaccccccacaaattttgacatatttttaatcaaaggtgcaatttctaaaggtgcttctcagaatgaagagcaaaaattataaaattaagttgacacattagacgttgggtccctagcacaacaatggtacacattggaaagcttgtctatttggcttggtcagtttctcattgcagcctttgcctctagcccgcaggcccatgaccttttttgtggccctgtgcttcagccacttggacctatagtgaactataacctgaacgtgacatcattgtagcctgtgtgagggaggtaccaggtgcatatgaatggaccgtctctggcacacaaagcaagtatgtcagattgaaaactggccacaaaagaactgattaacacagaatgacatagttgaaaatgcatcaataaaaagtggcataataaaaggatcaaggggcttggacactgaaaacctggcatcaagtattggctctgccacttactagctgcatgacctaaggcaagcccagtaacctctttgagtctcagctttcttatatgtaaaatgaggataatcagaataggtagctcacatgttgaggatcaaatgggagaaaccataatgcaaaggagagtgctctgaaaactagaaagtgtcaaattgacattaatctatcatgctgaacttcattaagcccctcctttggcatactgtgatttaatccatatatagcgtgcatatatggactttattttatcttgctcaatcctagaccagcatttcatgccaagaagtgagatgatgtttggaaataaaaatatgccgccttctcgattctagctatgaataatcattctagttttgactctaccagtttttctaagaggtttcaaacaaaccatagctaccccatttactgaccagatctagtattataaacagatgacttcaccttgatgaactttgtaaaataagggaaataatcccagtttcccctgacctcacagagttattctgaggattgaatgctttgaaaaatatcacatactatgcaagtgcaagggttgtgaattttttttattgtttagcagagtaattcatttagttattgaacaggcatattgataaaaatattgtcaggaataaaaaaatgaatatgaccatcaaagacctctcagtgtagcatcggaactaaaacacacaaataattctattagaaaatgaaaagtgatacatgccattaaaaattatagaaagacagtggttgacatgaagagaggggtatataaatggaaatatccacatttaactgtgtcacagtattggagaagatgtacccacaccatactgtaagcttctgcaatctttcagtatttttctcttgtcccctgatgtagccctagcagctagaacagtgccttcgcatgtagtagattctcagtatgttagataaatgaatagttgtctttctgatgaatacaggtggctcatgctatgagagtaggctgactttaacttaccctacgtttccatatgaagcagaacttcttcagaggtgtcacctaacccagaatgcaccttaacatccagatcaaattaaaaggttaagttttcatcctgatgttactccaatgtatttatagtagccatgtatatttattttagtcattgttgatatttgtttatcacagcaccaagggaccagttattaagatatttgaaagctgaccaaacattccagatgtcagttttgccttttgtgtgtgtgtgtgtgatgggggtggaatgggaaataatagagaatttttattttaacaagataatgtgccagggaagaggaacaagtggctttttttggccaataagaagacaaagtcatattgcagtttttcatccagcttagatctgaaaagaaatcctagaaattactgaatcgaagaaaaccccccctttttttgagacaggatctgtttgtgtcacccacattggagtatagtggcgtgaacatagctcactgcagcctcaaattcctggactcaaggaggtcctcctgcctcagcctcccaagtagctgggactacagacatgcgctatcatacccaactagtttattttttttttttgtagagatagggtcttgctatgtaacccaggctggtcccaaactcttggcctcaagtgacctctcccccgcccaccttggcctcccaaagcactacaattacaggcttgagccactgttcctggccccattttttccaaataagatttcatgcagaattcccatctatgaaacagataaatatttttatcaatatagatgtctattttaactttgttttttacaagtctgtcagtgagagcaccagttaatacattggggtcttaaaggtcttaaaagttggtatgtagcacatgtgagtgaaccttttaaattttttgatgaatatatactttaataaatgaagaagcccctgaggcccacaaatagtacatatttgaacaacactaatctagccctatccattcataccatagatagggagtttgaaactaatctgtagaacctcattctaccactacattttactttgtgatgtggtactattaataaatctgaacttggcccactatctcagcactttgaggttttaagggtgtctccagcttaagcatcaataaacatttctagaccatcttaaagttccagtggaatccaagggtatgacttacaaaccttgatttttatgttattgtttcttctggtttgaaatttatatttaaattttcattgaggtattgatacatgcttacatgtaagagagggcaaattcaatctttttttgacattaggttaacctagaaataatgacattaaggaaaccttttgtagggaggacagtaaacagtcctcagtcccagtgaggaccccatggccaatatttggatatttcaacatctgcagtattgaagccagccgtgtctcctcagatggaaattgccatgtgcagaatgacttgatagaaaatggtgtacattctatataatcttctaacagcagaatgcgaccagtggcacttcccctaaaaaaaataaattacccgaaatttgcagcacattcatattcaatttcatcacagcagatgctcattagtatgttgttattaattggtattcactttaggttttgtttaaaatgaagataataattaggttttaattactgcatcattcgtgggggtgggggttgtctgtggggagagggaaagagtgaaatgcctcttaaagcactaaaatatttcctgatgcttattcagcaacgtgtgttgccaaagactttgaaaaataacttcatctttacaaaaaaaggattctgaaatgaagaaattactgtgtgttttttaagcccatcgttatcaagaacttgctgtaaattgtctacttgatggacatactgaatcagatgataatgtgcaccaccattctttctaatcaaattaccaaaaagacttcttggaaaagtaaccctcacaagcggctgattaatgaagtggtggcaatgttttgtattagaactaattgaagtaatccaaataagttatttctgtagcctatggaaataatttcctttgcaaagaagtacagtggagttggcaaaccagtatttttttttcaccctctgttgttccacatttgcaaaatagctaagttaacatagatattgcaaataaaatagatagaaaactaagtaattgagtggcagggaaaacaggaaagtttatttcaaccttttcataatcaagacgaataatttacctaaagcctaaaggtgtatggaaattgagcgatactggaattcgaaggcatatctttagtaaaatgctgtagaaatagcagtttttaatgcattcatttaaaagagacactcatgttcaagagtttagacatgttccttagacaaaactttctggagaacctgtggctggcatggcattgtgtttggtgcacaaatcaaaccctccagaagcttatcgtctaattgggaaacgtataggatctatcacatatccactgtgtacttcgtagcagtcatggtgctcggtgctttttgtatggtatcttgttattttaacaacattcctgagacacgttagtcttgttttacagatggagaaattgaggtgtgaatatgttaagcagtttgtcaaaggtcacccaagcctttagtggtagaactacatttcaagccagattcagtctgaccccaaagcctatggtctttctgctattccagtcttccatggggatatacacataggacacattagaaatcaattcaaaggactagtgttgtatcattaagcaatatgcatgtggtccccgccctcagcagctcacatcctaggaggctcaaggggtgataaaaccagtgaggactacctggggtgggagctgtaggtcagagggtgtagtgagccatgtggtcacaggataggcaactatgtctgtcaggtggaaagtgaacagacagaattatggaggcacaaacggcttcccgaagatgatgatgactgtggggtctgatgaggtggataggaactgactggatctttaatcaagaccagaaggatagacctgaaaggggtggaattgcttgggtaagggtgtggaggaaggaaggatacatttcctgactgtagcaggggatggtgataagggtggcgtgggtatatggccaggctggcagttgaggggcatgtagaaaacttgtgagagtggacctgaagggttggaactttatcctgtgtgtggtgagggtgctagtagggatttttcagcaaagactatcctaagctggattttcatttctagacatgtacctcatgatctctgtcagtgctagtgaggtttagagttctgaatctgctatatggtatgatacctagatttaactgtatcttcaccatttgcaaagtaatgcagtttaatacaccttcattatattttacagttatagcgagtgctggattatctatgcttctactagaacgtggtgtttgggggtacgttttgggttttttggcagctgattttccttcatgatttgatatttttcaggcttcaccaaaatgaattttacatcaatgagaatgtaccagttgatgatgcaaggaggcaggccttgcatcttctgggttgtatgagggtgataacttgagattaagattttgctgtggataatctctaaggtcatgagcccaactcttcatacctcaaggaatttaattcagggacaagttgtgttatgagatgactttagctaatttctgctgtccctacaaatgagagagaaaagactggttatgttcccatgcaaatatcttagaaatataaagtaaaagactgtcttgtcaaaccagttcaaaagaaagtcagatgaaatcgatacctcagaaaacagtttggcagtacctactaaagctgaacatttgcatgccctatgactcagcatttcccctcctccaaactgtaatcaacagaaaatgatacatattaatatgtgcttcaaagacatgtacaggaatattcacagtagcatcattccgtttgtttgtttgtttgtttgtttgttttgagatggagtcttgctctgttgcccaggctggagtgcagtggcatgagtgagctcagctcactacaacgtccacctcctgggttcaagcgtttctgctgcctccggagtagctgggactcacaacaatgagaagaaatgcgtgactgctacacaggacaacatagatgaatctcacaaacacaatattgagaaaaagaaggctgggtgtgnnnnnnnnnnnnnnnnnnnngctgggtgtgatggctgaggagttcgagaccagcctgagcaatatagcaagacctcatctctactaaaagtttttttttttttttagttagctgggtgtggtggcacgcgcctgtggtgccagctacatgggaggcttaggtgggaggattgcttgagcccaggagttcaaggctgcaatgagctatgattgcgccactgcattccagcatgggcaacaggagtgagaccctgtctcacaataaataaaataaaaatagaaagaaaccaaatagaaaagaacacaaactgtacgactgcatgcacataaagtttaaaggcaaatctattgttagctttaaggggaagatggggaataattaggggaataaggggggcctctgggatactaaaaatgttgtttcttgctctgcgtactgatcacagagatgtgttcattttgtgcatcaagccgtacacctagtatttgtgtacttcttgtgtttttattataattcagtaaaaatttaggaccaaaaaaatgcaagtcagctttaacactgccctgtattttatgtaacagaaaatatatcctatcctaatcttgaaataacttgcttaaacaagcaagcatcttcctcagaaatgattctcatgaaaacttctcagcctattttggataacataaattccttgatcttgagccagattagaaggatcagagtctatggttctaaaagtatccccgatacaggtagtgtgtagcacagcagttctcatctcagactgcccactagaactacctggcagccctttaaaatgctcatatccagcactccactctatactctcatttagttgttctggggctgaggtctgatcatcagtactttttttttttttgagatggagcctcactcttttgcccaggctggagtgccgtggcgtgatctcggctcactgcaacctccacctcccaggttcaagtgattctcccacctcagcgtcccaagtagctgggactacagccatgcgccaccacacccagctaatttttgtattttttttttttagtagagacggggtttcaccatattggccaggctggtctcgaactcctgacctcaagtgatctgccctcctatgcctcccaaagtgctgggattacaggtgtgagccaccacacccagctatcagtactttttttaaagctcttggggtgactggtttgcagccaggtaagggaccactgatataggacctcatcagaaatctcaggagagagactggataatattgataaatggattcaggactatgttttggtcataaagtactttgacttggagaaagaatgaagtttgcgttgtttctaatataatctgattacaggattcaaaaagaacacataaaaaacggtggtattaaagcattttccttttcccttcatttcttcaacaatatttgccaagtcgtcccctgtgccaggtatcaaaacagagttctttccttacccctgtgtgtatatggacctatgagtgcacccgtggcccacccttattactctggtaacactccaagtaactaacttgaatgcagagcgtgatacatacagtagctatttcagctcagtattgtccttaccaaatcacagtcggccactttggtacatgatgttctaactataaaggaagactgaaagaagcctaggcactgtgttgagtgcaattttcaaggaaagagcaagaaatcgaacattttaaaccaataagtgaaagctggagagagaaagaaatgttaaaatatcatcttattttcttgaagtattttccatccaatcttgtacagtcaaaatgagcatttaagtgtgaggaaaaaaacgctgaagatctcagataagactagagagtgtcaggtttcttgattagaagaatttatcatcaaaggcaaaagagaaaagatggtaaagattttttaaaaaacaaaaaatctccaagggatcacaaattagtggtgcaaaatcaagacaacaaaagtaggtgttattcttgttcatttaaactatagttttctctgtttcatgtgtgttttttaaaaccacttaattgtatttgacattgaaaatgtaatagggccttttgttttcagccagtttactaattgcaaaatatgtcaggaatcaaaagggcaggaggtgttggtatatttttttaaaatatataactcctttttaattttttcccctattttccttatccatttaggcagtgactttcaattagcctgcctactaatatcaggtcactaaactccgtggctgacgctttattccttcatgtgggttgtcactcgtttgcttcagttggctggcaaaggttgttgtatatccattactagcaacacagcactttgcatttctgaattgacaagcagctatattgacccagcgcttattatgggtcaacagctgcgttaaccaacggaaggactgaggggcaattaaaatgaattggcaaaaatatatcttcctaatttactccaatttgttatttatgctaacattgtatggcttctatggtgacactaaacagaatggacccaataatggcaattaacataaaaatataatggctaatcaaattgacagcaactgtttctcatcatctcgacacacaatacattatcaaaacaaactattatgaaggaggtaatttcagtgttctattcaacctgcagcatgtgtgcagtcagggagatgtgtaccagcaattactgctgaatctaaaaaactaaacaaataacttaatcgctgtcgtcctccttttttttcccccaggaagcagtaatcaggattcgctaaaaataactggtgtataatagtataatgatgatgcatattgtagaatagctaataagaaataaaataggcttctaggtgtatactttttaaagtaggttcaggtaaagaaagagagacttgtggaaggaatgcgcccacaaaaaagacaatagccctgaccgataaattgctccatgtgggtttgttcctgctaccgaatatttatagataccatttgtaatggccaaagaagtataaaatacactaaatttagtaacacattttataagggaatgagcagaaaggtgaagtgtgagctctaataactgaattttagttactcctgcaccaaattgggttggctataatttttcatcattaagacccagctaggatccttggatctaatacttggttactcaaagagattccctttgaaaatagtgctatttccatatccagttgtagatagtggttttccttaatttcttatttacatgatagtctgtgtgtgccacctggccttgctgcatggattgtacaaatgacttggctgttgtggtcattcataaattcattcattcaaccaacttggcacacagtgggtgttcannnnnnnnnnnnnnnnnnnngagaaactggtaacatgtttgtcatttgatcttctcatttgaaaagttctgagggcttagttgtttcaccttggtaggacccctcaaagaaaacaccaaagcttgagctcattgttccccagctcgcaagtttcccaagtgtctaaccccttgggaagatggaaagaaagtttgtaggtcagttgatttaaaatagatagaagtgcatttgaatgtgactccccaaataattctcatattggttattgaattgactgcatgtatttttttcccacacagagtgagacacagttgcttagaatacacagtgactctaaataacctcaggaatgtttagtatatgtttgctgagtgaatagtagttcagacacgtctcctacactttgttgaattggaacttggcaaggtcattaaacgagtgttttgacatgggtgggatgaaaagccttggttatttcatttcacatggtacttctcagagatcatacgttgcccacttaggattaccacagagcaaatagtcaagatgttactgtgagtctgtgagccaatcctggcacaggcaatggattgtcaccacaaatcataaaacggggctcatggtatagcaatatgtattaaacagttttcagaatttgtttaacttcctgctagcatggacagggcccagttaggaagcacatagcacttttcccaattaacagtgcaaattgtcatgagtgcataggaatttgcagtttgacaaaatcaggtttttgacagcaggggtaatcagtctgcagcttcgcaagtagtaatctatgatcgaagtggcaggatttattctgaattatgaaaggtgtatatgctatataagagggacaaaccattagtatgattctgcccttcttacccactttctttaaaaaatgctgcttgatttggaagttgaaagtaggggatacactctgctgagagtgatccccatcgcttccccctccccagtagtagtattcatttattttctgttatattacagtattctgacaagtccctgtacacccagctgtgcttttaccggtacatttttgatgcggagtgtgcactggagaaacttactaccgatcatgagaaaggtacgttaaaatactgtaattacctttgagtttaaagtggaaatttgcattataaaagccagacctactgtgtcaggctgttcatgcagcatcacattgctgtctcagaagcaggccgtgggggcctatgtgaacacagggatcccctgcatgaggggcggtggcataggaatccccagctttggcccccacagcctgtttcacattgtcctctattaaagcaaggctttgggggaggaacagtacaaaaagggactctttaaatgctatattttgaaaatgctattttctacagagtttagtaactgtaataaagtaagcataggcaacgtgatcattgggcctacaaaaaccagatattactgcaaaaaaatagacttggagtgtgtctctgctgttcgctaaaagcctgggttcgttttgagagagggatgaggtggagttcctttattgactccatcctaagagagtatataggcgcctcagcccgtatgatcagctgttgcatggaaccctcagcrctcggcgtttccttatacaagacttgcgggcactgtgggacttaatgggtctgggaaaagctttgttacataacttaaagtatttgaaaatgtcatgacaactgcatgtttgttttttttttctcctacctgaaaatcacattgacaacttttctattacctgtgaaaaataaaaaaggcagatttatacatttttcttattagttacctacagagtgtttatgttgtttgtcagcgagtatcaattcaacgttttgttggtcggtactagggctggaaacaaccgcaatgacattaaaaacctacaactattgctagatttccccgcataagaatccccatgctgcccttgatttgttctcactgtttttaattccagtcataattgacttgtttttccatccacaagataggctagaaattattttttaaatgccttgacttatttggttttgctgtccttggagagagagcattttacaactgatggagaagctggttcagatattagtatcttatctctagatgttcaacaaggacttgagctatctccacagcatattttccatgaattagtaaaatttatacagagaataaatttattctgcctattaataactaagttttagaacttttattcatggtcaatgtctagcccatatatacttgtaatatcatttacagctgtttttcttttatccccaaggacctttcctaaagacagttatgagttgagaaaattaagtactgattatctgaacgcattatctgtttctatcaggtctgttacctctttctgaatatcagtatattagaacctgttcctctattacttctttttttttttgagacagagtcttgctctgttgcccaggctggagtgcagtggcacggtctcagctcactgcagcctccgccttctgggttgaaatgattctcctgcctcagcctcccaagtagctgggattataggcatgtgccaccacacctggccaatttttgtatttctagtagagagggggtttcaccttgttggccaggctggcctcaaacccctgacctcaggtgatctgcctgcctcagcctcccaaagtgctgggattacaggcgtgagccactgtgcctggccagcccattatttctttctaaatctatccatcctagattgttttctatatgttatttgaggggaaagattcctcttccctatacggctctaaaattcttatctgagaggcagaatcagtcttttatgatcagcagttttcaaaaggtctggcaactcttggaggcatgtagaggagtgatctggaaagtcactggagatttagcccatcctcttagaggacactgagaagtgcacgttattacacccacagaaaataagaggaaataagtagccgcttggaagcctcttgcttggctaaaagggaaaagtattgacaggatctgtacactcagagtttactgtagtcccatttcacaagtttaaggatcagtacacttttttattgtttgtatctaataatatactacccagcaattcggggcaaaaatggcattgagttatcgatgggttcttttatatatcagagggctaaagaaaataagacgagaagagaaaaaaatatatgtgactgaaggaacttcatgaaatgttccaagagcccttttgttttatttattgaattttaccaattgaaactctttgagtttcctgctgtttatttattattcctgaattacagtttgggaatgagtgaattagctgaaatttacatgctccaggcattttcagatcatgcagtaatgctaagtggtattagggtattcataagtggtgggatataaaccaaaacttgggggcacacttaccaagagcagaggtttcctaacacatgacatctgataagccctctcctaagagtcacctggggcatattaaaaacccaaatccatagatcctatgtccacagattctaattcagaagatgttgggggtagagcttaggaagctataattttttgaaaattcccccagataattctgccgtgcagccaagtttgagaacccctctcctgggcactctaaagacatagttggatggtttctaaataaaagacaattgaatgcaaggtcatagttcatagggaacaatgggggaacaagaatattcttatagtagagaggagaacaattataggggaaaacaccataagtttaaaatagtataacaaataaaattgacttctcactttataagttggagtgaattctcttttgatttgctattcaagggagacctgctattaaaatgagtttaaaatctaagggaaccggagggcaaatatatttattcaatttggaccatggccagaacaccagtagatgttaacatcaaaagtcctgtgaaaaatgacagtcgttatacacagttatattatkgagaatggagtctaagtgtcttctgtcaacaagtgccccgtaactggtgtgtgaagtatttactgtagactctcctttactgtcagtacctagcaacatttccttcactaagattgttttaccatttccatcataaagcccatattttaagggttgtaactggatggtggttttaatttttgtttgaaacttggcaatttgacttagaaaaacatgtacaaattatttgaaagaggtttatttttatggggaaaagtagctcttgtcaaagctttttctctgctttgctttcaaacgaaagtttacagaccattagtccataatgtggattaaccccatttgatattttttccttcctttaaaatggtaaaggactgttattcacgttggtgaagtgtttactgcatatttgctgtaactgcattacatttttaaaatcttatttctgtgggactttggcattattattgtaactgctccagaatgtacacagatggcataatggattcaaaggcggttttacaggaacataggggcaatctatgaagtaaaaatccatttccaggatggccgcatgaaatggtcccatttggctgcctcatcccgtggtgccttggcctgagtaggggtaagtgaacagttcaggggaaacctgaatcagttcaaatctaaatctccttaaaaatgcaggaagaaaaaagtctcttagttttctcaactgaacctttgttgttgtttattcagcaacagtaaaaacaatttgtttatatatagttcctattaggtgttgagtgacattcctcatgtcagaggaacaaaggtggatggccaacactccctgccctggaggagcttagagtctgttgaggaaagacagattcagcaacaactaagtgtggtatggcctgagtgtcaccaccaatagggtgaaattattttggaagcaaagagagggagccactaactgctttttcacttcagtgtttgatctttctttagttctagaaagaaacttttttttctgtttctgttctcatttagtagatgcttctctcctcatattctgtgtcagctattaatagtaagatggtgtattcatttgctaggactgctataacaaagtaccatggatggggtggcttaactatatttcctcacatttctggaggctagaagtctaagagcaaggtgtcagcaaggttggtctctccccaactttttttttgagacggagtctcgctctgtcacccagactcgaatgcagtggtgcgatcttggctcactgcaacctctgcctcctgggttcaagcaattttcctgcctcagcctcctgagtagctgggattacaggtgcacgtcaccacgcccagctaatttttgtatttttagtagagatggggtttcaccatgttggtcaggtgggtctcaaactcctgatttcatgatccagtcgcctcggcctcccaaagtgctgggattacaggcatgagccaccacacccggccaggtctctcctcaacttctagggagctatcttctcccagtgtcttccctctgtacctaatctcctcttcttatactgacactggtcatattggattgggtcccaccctaatgacctcattttaacttaattctttaaaggccttatacagtccattctaatacagtccactccagatacagtctcattctaaggtacaaagggttaagacttcaacctaccttcagtatgaattttgggggggcacaattcagtccataactgatgatctacttgaatttcttaataaattcctttgaacactgccggaattggaacactaggatgtagaattctgttgaagacagaaattggaattgcagcatagaggctagctaaaagatgacaatttacccataggagaagtatccgttggaaagcctgacttcccagtgggggtctctttaggcctagatggactattcttcaggtcaccctgtttctcacaaagtgctatgggcagccttgagtgccccagcctcctgagctgcacctgcaaagattgcagttttcttgctcctctcaaccaggtgaaatcccacattcacttcccctcttgagcctcatatgctttcttttctttttttttccttaaacttttcagtctcttgtcatctcttttcttctgtcttttctttaggcctggtggtaacatctgtaggccctcttgtttcctaacatgccacccagaagaactaggctgccccttttaaggtacttcatagtttcctattgtcctttcacgtgtgtaacacgagttctcacagtactcctgtgaggcagcagtggattgtgctcattatattgatgaagaaattaaagttactaaagttccttgacatttgcagatttaacgcttgtcgcttgaactctttgcaagtgatactgaaggtaggtaacatgttagtgtgtgttattttgctgatgccagatttaaattgaactgaaagaatatccagtcacttaactaatgagcaagccaagcctactgctcctcacccacactgccacggggtcctgttctgtgttccccatcagctaagtagttacactcatgaagtgctaatagttatattactttgtggaaaatggtctccaaaacaaagacaacagctagtactgaaaagggtcttaaaaggtagtattttttaagccagaaaataagagttttatagaagaaattatatgctttagtgtatatgggaatgtggagattttggaaagtctcaagatgggtcccatttcagtgttaaggatttccgctatatttcctgaactgttaaagtgaaagcaggaaagtttcatcatgaaagtagcaaagagcccctgtggtcctctctaagctagttgacatccttagaatttacttggttaaatccttaacaaaatattaaaaagaagactgtgtcagagagcacctgtctggtccttttcttcttattgccactttttgaagcccactggttgtgttctgttttttggtttttttttgagacggagtctcactctgtcgcccaggctagagtgcagtggtgtgatcttggctcactacaagctctgcctcctgggttcacgccattctcctgcctcagcctcccgagtagctgggactacaggcatctgccaccacgcccggctaattttttgtgtttttagtagagatggggtttcaccgcgttagtcaggatggtcttgatctcctgaccttgtgatccacccgcctcggcctcccaaagtgctgggattacaggcgtgagccaccgtgcccggcctggttgtgttattccatcgaaaaactgttgctgaattttgagggcaagctttttctgtttttaataagtaataacaggtaaagcacacacaaaacagttcgcatctattcattcttcttaaaattatattttttatatttgtgcaattttctttagaaaaatagattttaagatgggtaactgtaaactgcatttttaatttcattttcttacaaataaaaaaatgatctgagggtttttaaaaattgtttctttgattaagggaatttttatggtaggaagctctgacttgacagttcagaacatagctgtctgtttattataaagaagtgattgtagaaatacgtaaagaattttggtaagaaaaaagtggtttatataatcttgagcctctgggggttgttattgttagatattacataggtttaatctttaatgacatatataatgataaaatacaaaactagataacttatgattctaatttgtggtgtatatgcaaggtagaaaaattagtaaggaacactagaatttgttatagttatctctaggtggattatagcttttctttttctttataattttatatattttctacattatgtactctgagcatgtactgctctcataacatgaaaaaaattataagcactaaaatgttatagagaatgttactcaacttgaagtaattacccaaataatttcacaattgagggaaaaaataacatagaaatgaacccaaaccagctttttttctccgtgtatttttttccaagtcaaacctaaggccttgttactccaagtgtgatcagtaacccagcagcataggcatcacgtggaagcttgttagaaatgcacaatatcagacccacccctgacctactgcatcagcatctgcattttaacaagatcctcaggtgattcctccgcgtgttaaagtttcagaagcactgatctaagacactctcccttaataactaaagcctacttctattttattcattcattgattagggccgtccttttggtaaaactttaaaacaacaactatgcaggctacagaaggactacccaagttttaaggtagaattcatatcacaacctggccttttgaaatatgtttttattaagctaaaaatgcagtggtctgacaagggctaagagaggggaaaaaagccaaaaagcatgagttcttccactttgtttcttcgtaactagaaggaacaagggagaagtaaattaggattttcaaaatagctttcagctttttaagattagtggcttataaaagaaagaactaaggccgggcacagtggctcacgcctgtaatcccagcactttgggagcactttggcaggtggatcacctgaggccaggagtttgagaccagcctgatcaacatggtgaaacctccgtctctattaaaagtaaaaaaattagccaggcatggtggcacgtgcctgtaatcccagctacttgggaggctgaggcaggagaatcgcttgaaccctggaggtggaggttgcagtgagccgagatcgcaccatagcactccagcctgggccacagagtgagactccatctcaataaaaaaagaactggagtgtagttctacacccacttcgtgtaagggccactctctatgtgcccagagtaaagtttcaccctatcactacattctggacctcattacaacattgatttagtagtattttataaagatttcaaggcattcaactagattcttttaatggaaacaagattctatttcttaaattttgctactgaaaagtttattttgaaattttctttttcctactgtcactgacttttctgtgatgtttttatactcactacaagaacgagaaagttggtattgtctgatggcagcatgcagcctgctaacactggtttatttttctctatggatactgcctgttttgtttttgttttaacttgagataactttacaatgtgacagaagagaaactacattttccaagaaatggtcactttagttgctttccccataagtagaagtgtcttggctctgtacattttctgccatcttcttcaagatagctaagttagtatatgaaagttgccatattttggagcagccagcttccagattctaattatgtgtctttaagcccatttctgtaaatatgcactcaacgtttgcacttttatgtacaaagagacttagaggctttctatgataacagatgtgttactcgttctataaaatcatttcscattatgtctttttagtgggcaagttcctttccccttttatagtgacaggtacagcaacacaagggctctgccatgtctaggtgataatgtggttgatggtctgcatttgcaaagcatattgtcattttttagtaggaaaaatactaaagattgataagtttttttatgtacttcttaaaaatatgcttctatcaccaatgatgaaaaaaatgaaacaattcgcaagcagttaagccataatgtgagctaatcactttattttgaagaaaagtatttttaaacagttgagctagtgaatttacttttaaaatgtattgtgcttacacagtagatggttttatttccatgatgttttttactacataattatacatcttaattacgtaattactatcataattattatgtaattgcatgtacttccactaattacaaaatcaggaagtgtaattatctagtaaaaactttatgaaatttcatgcactaaaagttagttaaaaggctattccagtggtctagtggaaggctttccatggttagtcttcttagtcataactttagtttagagctggaactcataggccaggacaaggataagtgccaacagaccaacactaaactgagtattgtggtatgggtaagatagactttgtcccttgtgatttaaaaagtcagagagcattttaatttttttgtgactatggagtgtggtaagaataatatctaaatgtttgaggtaggtaccacaaaaactgtcaatggaaagggcagttctttcttaggaaggaattgattaatagaatcaacaaggcatttaggttacacaacagcaaggtcttctataattctgtaatgtgaatggcttatttaatagctatctctgcctttaaaagcaataatgatattcagttttctgtttcttcagtttggagaaggtgtttttccagtttgtgtttatatttactaagatatgagcaaacgtatcaagagagcatactcctttctactacttgatgtcaaaagcagcttttgagacataaacataagcgcacaaacatgtaacatcagaccctaaataaagacaaaaggtttaattcaataaagctatgatgcctttaccattcaaaacgacataaaaattgcacagtgaaacaatagtcatgacagcaaattagatatgacatctaaattacactacaaagagaaatcccagaaccgtttttggtctgtaggagcctattttagcccaggtttagaacccaatctagaggctctgctttattgtctaagtagggtaatgttgtagaagactaattggacgttggttgaattaattgcacatcaattaggaggaaagggcttgtaatactcatggcagagaagtgagtagatcctttaagtatcatgatggaatgtactatgagtttcaggaattaatattatcagtatttgggtaatatctgtataatctattacaacatgacctaaatcaagcacttggggttagatacaggtatactaatttcctccccaaaattagtgcttctcactagaaatgtattgaaacagccacttaaaatgtatgagttatttcttttaaaaatgtagccttaaacattaaaaggttcagctcaggagatcagatattcgtttttttcttaaaactttctaacgaaacactcattgtggtattaccagttattgaatttgtgacttttttatactagctgaaatttccaataagtgtgaatttttttaaaaagtcagtgaacggtgtgaaaatgccagtcccatttgcttcaggcaaattataggatttatatttatccagaattgtttcatggtctcagagatgtttgggatttaaacagatttagtctgactctgctatttttctctagtagttaggggttattttaaaattgcatatttttttcctcttgggaatcttttctcatttacttagcccagaatttaatgtcttaatcatttcttatttgccttaactctattgtgataacatttcttctcatggtttcagaagtgtttatgctccctctatgagacagcactgcctctcacgtttcctcttaatcttttgtttttgttttggtggttggtattttttatttttatttttttttactagtgcttgtaccatgccagaatagcccttaatggttaaaagcaaagtgttcacttaatcctcatcttttcaattataatacaaatttcattttgaagctgacatttaaactgacattgttgtgttttgttttgctttgctttcttgctttgcatgtgaattggcatatgtcattatcctataattcttgataaatttttcataattatctaagggaatcaaccgtaacttttgaagtctaattatgtccttgtgatgtctccagtaaccctgtaggcccaggccaagaactgatgttgattttcacattattaatcagtgccatttattattttatgctgtactatctggttcatataatgctacccttcatatacaaagaaaacccatcatcaatttgactcattcttaaactagttcttcctgtagttgtcatgaatttatttagatccatctgcattctcttaccttgtggctaacaggacagtaactagacagacttagtagcccatcattgagttaaatcaacactgattacattctccctgtataaaggccctgggaaacccttctctccttggcctgtgagccctgcaagccctagcaccatcccctagagcttaaggcttaaactagttcgtagaaagatagatttgctggctaattttagacactgatgtgcttttcttgttctaagaaattattgtaatttcaaatagggtcaaaaaagcaggtctgtgtgtaagtctgttactctctgtcccctcttcgtgccctgaacccttgcccagtttattcagcaaatatgtattgggtctctgtcctatatgatattgcttctagaagtaccaatacttctgaccaattgcttattcatgcattcacctctaaatacctcctttttataggactctacttttgtggagaacattcacagccattatcttttacattttccagacaattccattgtatacggatatgtagttgacacttctgagatgagaaacaaccccaaaaggatgaaatgactctcccaaagtagcaaagcttagaagtgttaagagcccggcttttctttctgccatatctcagctgccctgttcttaatctattagggaaacttcagcctgaagacaagtaactcaaatacaagggaatggtatgaattgctgagggatctcagcatatacctcagggaaggtttcctggtggagatttcctgagttgggccttaaagagtatgtgagattttaataggcacagatgcagacatgtagtttgagacgaagttttgcctttctcacttttctttaagtgccctatttatcttgcttttataaagggagaacttcctttgacaaatgcatcatgatttgaaagcatatctgaattgaaaatttcgtctaaaagtgcttattaagaagcaaagctttaaactcaggactataagcttgaagggcattattttttgagatagggtctcgctctgtcacctaggctggagttcagtggcacgatctctgctcactgcagcctcgacctcctgggctcaagtgatcctcccatcccagtcccccgcccctagtagctgagactgcaggtgcgtgccaccacgcccagctaatttttgtatttttttgtagagatggggtttcaccatgttgcccaggctggcctcaaactcctggactccagcaatccacccgccttagcctcccaaagtgctgggattacaggcgtgagccactgggcccgctgtccttgaagagtattctctcttcactctccactctccactctccactgtaaccagtggtggtgctttgaaagaaattgatccatcctacaggatacatctgtcaaaagtgtatcaaaatgtttttctatcttaaataatttaactcagaatataataatgtaagtattttgacatgaaaatttacatactgtgatatatccacttatcttaaaacagacgtctttaactataaagaaaaggagtgtggtaagacaaaacaaaatagaaattggaattaaatgggatgactgacagaccaaactagttttatttagacaataaaaattaaagtcctgttagcattatgacgaaaaaaatgtaaaaatgttttacttaaagcatggctgattttttgttgtgttttgttttttcactaacaccatggtgaaagtttaaacatgtaagacctgtttatgaagtaaatgtttactgctgaactaattcttcaagtttactggtatattatatattgccttaccaaaaaaagtcgatgctgaaaagtcagtaaaatccacagtaaaagaaagcgtctgaacagtagtctgtcttgggaaattattcaacagagtgcactctggtctctgttagtgaaggctttatcacttttaacaaataagccgcagtaaatttatcagtatgctacaaagaaattttcaaaataattaagactaaactacacttgtcaaaataaatgaatgaaatacaattttgaatcatctttcttcacttattgctcatttgcataattcagtaacttacacaggagtctttcagtcattggtgtgaattagcaaggttctgctattccttgttgtacggcaggaattaccctaccatgtaattagctattccagacatggactaacgggaaataccaaagggcacagcaaaatctaaagaggcaaggcagggaatctaaagacaagagacaatcaaagacacccaacaaactcaagctggtagaccacagggaattttgaatgaagcctcttaatttattttgagaataagaaatcagtagtatgagagaaatctcaacaagattagctgactaagcctacttaaaaaaaatatctctatagtgcatggtgcgccaggttaaccactcctgtttgttagtctgtatacagctcaacaaataagcggcaaagcttttcatgggtatatagtggctttccattgaggttttcactctttgaaggaggtcatttataccaatgagatctgtagatgcaaattgctttccctatatgtgaggggtcattcctttcacagccagcttgctcatctcttttataaaggttttgttatttttgtactgctcccaaaggaatgatgagaattatgcccccccaccccctgtctaacttagcatccaaatcttttccctccagctctgtgaaacttttgtgtgttgatctttggaaacaaaacaagctgttggcagcagcctttaactctgaatcaggaaacttttttccttctttcaacctgaaatatcatctctttagatttgcctttctcgcctaattctaaggaaatatctttttcattgcagcagagtgtcactgtaacatgctacaggcatgtgggaattcctggaagcagtgtcctcaaaatgccatttttagtttggctcaaatgatgtaagctctcacgaactagaggaatagaaatgaagggatcgatttaagggttagctatgaaaacctagcttctgatctcattactgaagtaaagggaaagataatatttgtctttgcctaggctctaaggaatcatacaaacattcaacggttctagtttgttgtgttcaggagttttaggaaggaggagcttcaggcataccatgtgaatgctctgtaaaatgtttgttgttttgttccttccttctgctagcatttgttgaacaccaagggcattggcctgggtttctcaaaagcaatatagggtagtgattaaaaactcagtctctggagtgagagtgccaggtgcaaattttgactttccaccccttactagataagtaaccttgaagtacatctataaaacaggaaaaaaatagcacctacctcaaagggttctaaattcagcaggatgacatggaaataggctaatatgtaaaacgtctgggacattaaacaggcaatacgtaaaatgcttaggacagtgcctggcacatagtaagcatgcagtaaatgtcagttggttttattacttctgagaatactttgtctaaacgactatctattatagtacttagtgttacaactgtatttgagttggtttctgcagcctgtcattgaccatgttttgttcagatttgtatcctcagcatctagcacaacaccaaacatgtagcaaatgctcgattcatttttaccaaatggttacagtatgaaaaaagcatggtccctgttctcaaggagcttaaaatatatcttgataactgtgttttagttttcttatctattgaaatagcatcatgtcagaagtgtattaaaaagaaaactttagttctcagtcttccatacttaatggaagaagttgaaacacgaataatctgcaagccagatttctgattgagtaggtctggggtgggacccaggcggcagtgtatttaaaaatctccgcaggtgattctgatgcacacccacagtgttgggaatctctgagttagtgaaactcttcaaactttaatattgcttcttgtcaaatatgcattaagtttgactttgatatagaaagggagactgggtggcatctagataacaatttaaacagacagtagaaaggaaaatgaagtcaaacacaagaattatttcctagataaaggaagcatttatggtgctgtatacgctaatgtagcatcaaagataaagtgaagaaaaataggctagggaaaagtaagcaagaaggaactgttttctggtaatgagcaaactgaagatgaaataaatgcatttcaacaaaattggctataaagcacattattttcccccattaacttgcgtcatgaatgaaggaatagggctgctggggaggatgggggatctttcaaggagactggataggtaactggggagatattaaggtggaggctaacccaaacgtggtacttaggagcttctgtggtttggatttctgagaccattcccacctcctgtcctcttctacttaccttgacactcagctgactggatcctgggtagagcagccttccgcaactttataattttgcacgtcctccaagcggtctggaacaggatggtagtagtagagggtttaggaggatattcctgtgtcctgtgctcatctcttggggtgctcatctcttggggtgctcatcttacctggggtgtccaggcaggagaaatagcttgactggctatagctggagttataaaatagtctcagatcacccctttttgcctagaaggattaggactgcaccttgttggtacccacaaattagacccttcttcaccagtccctgagcaggccttgactccactatggccacatcctttggctggtgtggtttccctgcctgggttagccaacctcaacccagtctctgttcatattctattcatactttaaggcctcccagccataagtgatctctttgtcctctaaactcctgtagttcttaagcactgtccctcttacattataattatttgaggacagggatcatgcttgatacattattwtatgtctgatggcaacttgctcatgataggagcctaataaatggtatgttaaattaatgttttctgtaatagagcactttctgactccatcctcttttctctgctatttatttcctattatgtccttcaactgtgtcataaaaaattttctatccatgtatgtatacattcatcaaacatttagcccataccatctcctcattccacatggacttaatttcccmccttaatctgtctactttctgacaattactaatagagttgggctgtgatatcatgtatctccagaagattacataaattccagcctagaaatttctttgtttaaacctttaggttatataaatcaaactgatgctcagtcatattagtgggattaagtttgaaagtctaaaatcatacttcaaatgaggactgtctcaacccaggcacactccttgccctccagaatttatatacatttgatagcagctggttgttttccctgcagattcttttttttttttttttttttttttttttttttttgagacagagtctcactctgttgcccaggctagagtgcattggcgcaatcacggctcactgcagccttgactccccaggttcaggtgaccctcccacttaagcctcccaagtagctgtgactacaggcatgtgccaccatgcctggctaattttttgtattttttttttagagacaaggttttgccatgttgctcaagttggtctgcaactcctgaactgaagagatccgcctgccttggcctcccaaagtgttgggattacaggcaggagccaccgcatccagccacctgcagatttttctagtgattcacagttttagctctctgctccagatgtgttatttggttggctagcctttaatatatcttgaaatgtctggaggccaactccagaaagctctcgtgaaggtgggaaggtgaagaaccgctaagagactttcagactggttttctcttatcacccatgtgactttcagttgagcagcatgcaggcacacgtattaatggcaatgtaggtttgtaaacaatactactaataggctggggctgggggagaaaaatagcccacaagaaatctggagatacctgtcttgagtgtaacctgcaagatatactctaacagagtaatcattgcacgatatcattgtgggagactgagcgagttagaaaatctattcctggtttgtcgctgactcactttgtggcatgggcaaaccattattactctttgatttagttgttttatttgttcgaaaaagggaaaataacatgtgtttaaaaagcactctgaaattcctctgaaaggaggtctataagtgcaaagtactattgttgtttttattattattattagtgttctagtatggtttagttttatgccatgtaggtcacagatgtttcaattcttccgactgatgaattacaaaacacttccatctcattctgttttatagcgttgataacagtttagcacatctttgttttaaccccagttaaagtatatgtccaaaatagacctcattaataaaatacaattactaaattaaatatatctatgctactttctgtttttttttttcctccttaaaaaggtggttaccaacaactactaaataagacctttaattactgccaatcttctcttgaaagtagcagtgcttatcttgagtagtttgaactgtaagtggtattcagtacacagtggggttgtaatgcgattatgaagtgtagcaagttagtgataaataagcgtgataaaccatatatttgtattagaaataatatttgaattatcaactgaataaaaaggctgcaactgctgattcctttgggtgggcatgtgataaaaataaaatacagttaagtatacttggaataaaaaattgtgtatgcttcaatataatagaaaccttttaaattgaatgtgtttttgagtttatagcatttaaattactgggagaattaaaagatttgctttgctttctgacattaagcttttcaaattagaattttaaaaaacatttctaactcattcatcagtagaagactttggcttttatataagatactatagttctcccccatattttcagtgattttccaatggagtagcaataaaaaaactttaattacagtaaaacttgcatataaaatcatgcaagaaggaataatatcattttcttgcctttttttccttttcaatattttagtaatcatagaaataatttcttaatactggagaatggtaatttatataaaataagtaatactgtgactcttatttatatttcacatgaaatgagcagtaaattgtgtgcatttatttgtaagtgtcctaagacatgggaccacatgggaagaagtatagctgccatagcgtcttagaaaccagaggtcgcatagtagcagccacaaactgcgcatgacctttaaatgtgtttaatttgcctgaagaacacctcaaatttctaaatggttgctaatattttttagtgtggggagttcctataaagagccaaatttctggcatttttaaataaaatcaatatgtggctacagtaggtcaacattcctgaatggccacaattgactgaagctgagtagcagctaagcagtttggacagaatatgggttctccagtttgccatagcctcactgcagcccacttcactcatttctgttattcatgtggttactataagcatttgtttgctaaaaaatatcttgaggcatgttttttttttcctctttttttaaccagccccctcccttcccaataaaaaaagaaaaagaagccatgaaacttgggggtttaaacagtaaaaaaaaaaaaaaaaaatccagcagacataagtgtgtttattaaagtaaatcatataaaaatataacttactagctaacctgtttatggcactgtatatttttcttttctttttctttttttctctttttttttcttttttttttttaagacrgagtctcgctcttttgcctaagctggagtgcaatggtgcgatctcggctcactgcaacctccacctcccgggttcaagcgattctcctgcctcagcctccctagtagctgggattacaggtacacgccaccacacccagctaattttgtatttttagttgagacgggggatcaccatgttggccaggctggtctccaactcctgaccttgtgatccgcccacctcggcctcccaaagtgctgggattacaggtgtgagccaccacgcccagctactgtatacttttcaaagcactttcacgtgtcctttgtcctcttatcctcacagcatctctgggagtaggataacaattacatattcattttaccaatgagaaaagcaagttttggtggacaccattaatttatccagatttgcaactgctacgtgttggagctgagctataactcatcttcagattgttcatctagagtaacactgtccaccggaactctttgcaatggtagaagtgttctgtatctgtgctgtccagtgctgtagcctctagccccacatgtagctgttgaacacttgaatgtagctagtgcgactgaggaactgaattttccattttacttagttttaattaatttaaatggaaatagtgacatgtgactagtggctaccttattgggcaacacaggactccagagttcttttcctccttcattgcatggtatctttatttaacagtcttattcttttcaataaagttcatcaaaagatttctgttaggttttctgtagttacccaagtggcaaacatctgttccaccagtagttcaacatattaaaatattgaatattttctgtatctgcttagattgccttccataaagattttgaatcatacacaggtagcattctttgtaacaaagtcaggggacccagtattaaagttcttaatgtatattatctcccaagattcctagttcagataaagggcataattagaggtgtgtttaagcatcagaaacatgtagatgactaagaccatctccttccctggtgttttttattttctaagatactagcagctgttacagagtcatgtaggaaacttaacattctctgataattgattggctggtgtaagttggaacagagtgacttttagaaagatgaccattagctaaactctatcagcgtttatcattaaatccaaaatgacattaacttaagacatgttccaatttcagagatgttataacataggagaggagatttatcttaaaattggtgaaatatggtttgtcagtgggcttcatctacatttggtcagcttataaccagggacagcattgagatgtaaatgtcaacttctgttttgccctgtgattaattaaacccttcatcttcaccaaaacaggtccccaccccacccccgcccccattgctctctgcactttggctgtccccttcctcactaccttatcctgattacaattaattaacagaaatcctggtgattaggagtaggcttaagctcttgctcagtaacagtttgatcactatacagatactcactttctttaaacacctccctacccccccccccccccaccaaatgcagacgaggatattttattataaataatactggaacaagcttaaccatcaccttctagcacacaggcaactctgcagcactcttttttagaataccacatgctgtaattcaaattatcacattagctatccaaacacaccatttgtttttaaatactggtgtgtttacctgaatatttccccttttcatcttcccgccccacttcaccagtacattgtcactgcagtgacaggtttatttatgtgccttaatatccccatttcttgttattttaaaaatgtatttctgtgtccctataagggtcttcttgaacatcttaaaatattagttattatgtaaattcatgtcttttcttttccattatgccctttgaatcttgcctttattcagacttcaaaatatttaagcacttctaaactcctgtattacatttttaataccaatctttctctggaaactgagaatgccttctgaaaccttaacagccatcaaaagaaatgtggggatttgaatctattaaaatagaagagtttcttgtccacaatggagtctgacaccctaacagttaccattttggacactgctgtgtaaaggttccaaatacaagccattcagagtttccactcgcatgcaaaactcatgcacgagttagggggtatcatttattaggtggtaacgaggagtcctgagtgctttggtaaatgtgttggtttgtaccatataaaattgctgacattagaccatttytttgtgtacaaaatgtggcaacttcacatggggtccaccctgatactataggtgcagaccagtccagctcatataaattgccttctctatttttgctgttttcccttatttttcctcaattagtaattttactcccataaccttctctttgctgccatccttttgtatttctcagttaatagtattttctctagtgcccttcccttcttaactaattccccaaatctgttagctgcagaattagtagcacaaagaaggctggttgcatagtatgtacctccatgatgcaatcagtacttaccacttcaagtgtttgacctgttttgaggttttcattatcctgaaagggtagtgtctcgaatacatttactgcccaataaataagccagcatagttccttactgctcaaatgaaaaaagcagaagggaaaaaaaaagctacttttttgttcagtgctgatagaagccttgctatgtgatgtctttgttatgacatggctcagctaaagcatctctggagaataaaattaataagtaccctttgttatatttgcctttgtttaactgaatataaattaataaatgcagttttttagtagtttgttgtctttggatctttgtctcaagaaagaaatgagatatgttgtattttataattagaagtgatagagacatcagccatcacttaaaagttggaaaaaaaattctagaaatcataccatttttatttctgtccatttgtatttgtaatctcctagtttccagggtgatgtggtgatacagtgagtgctgattcattcatatttttgttatttggttgccatttttaaagagaatgtcagtagttggtagtgataggtaaataagaataaaataaacatcaaatcctttactgatgaactgttctttacatgtagtcatgctaatcttcacaataatctgctgaatggatgctcttatccccattttacagatataaaacaggtaaacttattttctaggacagtaaattctatctagtgcagacacgcatttgaaacttagggccagcagactccaaagatgttagcccctcccgcccttcctcagtgtcagacatcctagctattgaaaaagaaatcgttaaacatctgtgttactttagtgcctctttatggtgtctattattgttctatgttataagtttgtttttagctttttgttgttgttgtttaccatgcatcaggcataaacaaggtatctgttctcatggcacattctacagaagagtaaagagcaagatcatttcagatagtaacaacccctacagagacaataaaatggggtggtttgatagaagtggataggaagttctttctaagaagctggtgtttaagctgagacctgaatgacaagagggaggaaattctggaagcagaacgttctacaccaggggaacaaccagaggaaaaagtctgaagctggagcatcttaggacagttaggaggcaggtgtggctggaggacaggcaacgaagggaaagtaacagaagatcaagttggacaaataggcaggggctagatcttgaaagaagggctttggtaaggagtgtggtatttccactgtgggagcttttggaaggtccccctccaccaaatgtgcacctgctggaagcactctgtgtattttctctagaaattatgtacggaggtctagaggaaaatgctaaagccttaaaaattacatattaattagggagattctgaagagcatcacaactttcaaaggtgactgggataatgcagtcttattcccatatcagcatgttgtttcttgtgtgctctgctaagcagctgctagagtcctaaagacctctagtatgacagtgagtacatttgtgagttgtgttgccccaaattatagtagggatggggataaagaaatatgtttgtatacaaattcttgctagatactaataaccagtgctggagaaccttccacattagttccaggaagtgcactgtaaagacctgttggttttagttttctcttggwacatttgaaatatgtcactggcttttaaaattaaatatgctttttatgcttttaagtattgtctcttttgaacttttgagtgtgagggttgaatttttagtraraaaagaattttgtttggatttgtttttaattagtattttttaaaaaatatgttaagggcttctggtggtggtggaaaatattaattcctttaaaaatctggctgtgttgctagatccacatttgcttttctgtgtttttgtgaacaactgatcaaattagattcgtcactcttggcttacggtgatttgaaattgaaatggaatatattaaagcagccaaccacactgattacattgcaagcctcatttaatttcatacattcacactttacagtgaaaggcagcttttttaatgcatgattgtgactgtaccttgagcaactccaaaggtcatctgtaatgggtgcataatttgttagtgttagatatctgatttatggtaggtgtttctcagcctgatttgtactagtagtaaatatggtgagcatcaaagtaaaatctgtaagaagtttagcctgtcacatttggtggtattgtcttattcttcactggtcagtggaccacagtaaatcatggactagctgtcatccttaaatcgagaaagtgccagtactgagcccctgtagcacaggggttaaatgagctattctttttaagagggcaggctggcccaggtgaaggttataacagtattaccagctcatctaacagtacttgttcacagctacttgagccctagtcccaagaaggctataaaaggactttcagtttcataggagcatggacatttgtgagcttgctcttttttccttggttttctgtagcagcgaagtctaccaacttcatttcctttgtgtcttctgtgtgacaggcactgtggggcagccctcagagatccagagcagaatttgctttttgtttgttttttgtttgtttgtttttggtttttttctctttgtttttggtttttttttttttcttctctttttttttgagacagtctcactcgtttgcctaggctggagtgcagtggcgcaagcactgctcactgcagcttcaatctcctgggctctagcagtcttcctgcctcagcctcctgagtagctgggatcacaggtgtgtactrccacccgcccacccccaccagctaattcttttaaattattttttgtagagactgggtcttgccatgtttcccaggctgacctcaaactcctgggctcaagcagtcctctcaccttggcctcctaatgtgttgggattacaggtgtgagccaccacaccagcccagagcaggattaagacacagtttctgccctcaagaagaagacagttggatatggccatttgttccactgtgtggttttaaatgacatgaaatggctttaaccccttcagtgactcaggaacacaatttgcattaggcagtccccattgttcatagctttatcacacatggggtgggttagtacagtgctcacggagaataagactgacatggacttgatgagaactttcagctactttgagaatccagctgcagagttgcctttgattttggttgtgacggtggagacatgtttactttgatcttctgttgcagtctagggtttgttcagagatgtgtagatttgtttttgttggctttcatcaaccagtttgttatattgtagttttcaataacaagagacacctaaaaccattttttaaagctttattattgaaattcctgaatgggaaaaaagtaagacagttattctacctaactcctctcttctctatcggaggaattacttttaataactttaaaatatataggccaagtctggtggctcatgcctttaatcccagcccaccctcccttcagctgacgcagaagagtcatttgaggccaggagttatagaccagtctgggcagcatagtgagaccccacctcttaaaaaaaattagctgagcatggtggcacatgcctatctatagtctttgctacttgggaggctgagaggcaagaggatcacttgagctcaggagttgaagattgtagtgagttatgatcgtgccactgtactgtagcctgggtgacaaagcaagaccctgtctttaaaaaaatcaacaaattatatatacacatgtatttatatatatattatatgtttatatatatttatatatataaaacccaaaattccctaggaaggtaacttcattgttagaaacaaaatagactttatagattagtgtaggggaaaaaccgaaagttgaaggaccatttaaaaagggcagcattcccaatctgttctatgtaattctagtgtcattagtattcccggggtaacaaagactccctgaccaaagaagtttagaaaatgctacattctatatcccccgcccctttgttgttttcaatgtatattagcatatttaaggctcagaggtgtcctacaatagaaatttgtttaattttgttttaagccagctctctccatatttatgtagatgcaggrcatagtttagaaaacgctagaatagaattttggcaatcattcattctcttttacctttgcttaataaatagttaataaaaattcaagactctactatctcctgaactaacttaaacaatatttttgaatacctgttacatacctacaaaaggccaaaaaaagtatgaaactaagaaaataggcagtaaaagaatggaaggaggagagaagcaagtagcagccatgaactaaaattaatagtactgatgagtttgtggataaagaagagagctgatgatgaaaagaccagattgggatgggggtggacagacaggacctgcatatgagtcatcacctgtgggtattgccagctcccagacctcaggacttgtggacaccagcatgccacacagaaggctgttggctggaatggttcaagattttagtagtgtgttatggccacctagtgcagggttcacaaactcaaatgcctttaggaccatgatgaattatacatgctgttttcatacagaaaacatgagctctgttttgccagatgttctcatttttcaaggagaggaagaaacacagatggtcctgtggaattgtctgatgtttgaacactggctgtagtttttgtattgctttgttaaccaaaactggggaatactgggtgaggacatggaaactctcttgcatttgctgatgggagtaagttggtagaagaaatgtggcagtatctagtaaagttgaagctgtgcaaacataagacccagcaattccatttctaggtgtatgccctagagacagacaccacccccaacccccatgtaccacgctcaaggtgatgtttatggatgaatatccgcactgtctataatagtctcctaggtaagtaagtgacagatagagaagtacatataaaatgatttatataaattttaaaaacaacattaaaatagtatctatgtgttgtttgtgcttatacaaatatatagtaaaagtataatatgcaggtagaaaagagatacagcaaattcagaattgttgcctgtaggaaatgggggtagacaagctatgtacactaggaagccattgaagattttaagcagagaaggggcatggcaggatctgatctgttcttgaaggtcactctggctgctgcatcataggggaacaagaggagacgcgaggaaagtagttggaagattttagtcatggtagtcctgcgtcttggtgggagagaggtggcttgaattccaaatatagtggagattttctcaaccttggcactgttgacattttgagctaggtgattctttgttgtggaggctctcctgtctcaccccacgactgagaacctctagcctcagctgtatattgggaggttaagagtaaaaatttctaatccatttttaagaggaagagatcagatggagcttgagttagtgggaaaagaatgagtggaggaggcgagacttgaggtgatctttgcgagaatggaacagacacagtcattccagagacactaagcattgactattttaaaacttaacaaaagcttttctttaatcttatatttccctgctcccacttctcctttgtaagattcttgtaagagagctgtatataggctcttcacttctctagcatttagttcactcaacagctctattgctcacagcagggtccttagtgacttcctagttacgaaacccaatggaatctttccaatccatctaccattgacctctccaccccatttgttttccatttttaaaatgatttcctcttacataatcaaaagtgcagatcacaatgtatgttgagatgttaatctatatgttcatatagtttgaaaaattgtacgtcctttgtatcatagaatattggacagccattacaatgtgtattattatccatgttctgtaaaagtgaattgtatgtattaagaaaagcaggtttcagttccgtgtagttaatatactctcccctgtagtaacacacacacacatatattcatgaacatcagtttagaaaaagactggcaggaaatgcactgagatgccagcagtcattttcctgacagtgtgttacttttataattgaggcagggggcagcgtactgaaaacattggtttatcgagtttcccctctgttgtcttctgtctgtgtgcattctccatggatgatctcatctgtaccctacacaccaaggactccaagtctaactcgactgatcgagtcctctttcagactgacttttggactcgcatacctattgatctcctagatagatccactgagatgtctgtcccatgaacatctgtcaaaatcaacatgtccagaagtgaagtcattgtattccttgttccccactagctgtttcttttaccctccctttcccagtcacaggcactccatacctatcctgtcatccaagccagaaacaatcctatagactcttctctcccattccctccacatccagtccatgtccaagatttgtggccaggcacggtggctcacacctgtaatcccagcaatttgggaggccacagtgggcggatcacgaggtcaggagttcaagaccagcctggctaacatggtgaaaccccgtctctgctaaaaatacaaaaattggctgggcatggtggtacacgcctgtaatcgcagctactcaggaggctgaggcatgagaatcacttgaacccaggatgtggaggttgcagtgagccaagagcgcaccactgcaccccagcctgggtgacagagcaagactccatctcaaaaaaaaaaaaaaaggatctgtaagctggttctacctctaagtacatcctgcggctctctccttctaccattttcacttgctgccaccgtagttcaggtggtcctctcaacaggattcctagacaagtcttactggtttttctacttctagacctgctctgtctgttgcagtagccactagccacgtgtgcctattgaacacttgaaacgtgcctagtttaaattgagatgcgtcataagtatcagatatacctcattaatattcatacactgattacatgctgaaaggataatattttagatgtactggattaaatgaaacattaagatttacctgttttattttaggggttttaaaaatgtggctactagaacattgaatgttctcagaatggcatatatggcttacattatattattatatttctactgggccgcactgtgtctaagcagtcatcccccctttgatttatcctccacgctgctgtcagaattatcttgctgaaaaacaaagtccctgagctaaaaattctttgaagtcttttgggataaagtttaagattagcttaacacaccatgccttccctaaaggcattcagtttcaaaaacttttgaaacactgtgctgtccacagtgtccggttagattcagctggtaggttgccagcttccaactcctgatctaaggactgtctgtcatctctgtggcacctctaccctcaaatatttcaatagttgttagacaattgatgcactataaatagattgaagtagagttgagcatatgagaaagtaccctgtatcaattctacattcatgctaaataaaaagttttatacagacccttaagggacagctacattcctaatactctgttgaaagttatccactgagctgcgcacctcttcctagtaggccatatgtgttagtgggcactctgaggagattgaagtggcttcgaggacccagcccccactaagagctgacggcgagtgaaccaactgggaaaagaaaccttcatgtgttgacagtatcagaaagattcgatggaaagctactaaatttgaaaaatcgatccttataagataatctttcttttggagtggggggattacaaacaggaggatgttagataaaatggcaaaatgtttaaaaagctcaactcataggaggatgttggatacaatgaccctccagaaaaggagttctgaaatactaaataaacttaaaacagctgtatcgtaacaatattttgactctccaaaatatgttttatttgtccataagtatgtgtctaggatggctgacaaacttagagaaccatatctgaggtatttatcagtgaggacattcactaggttgtatcctaaccagcacaatttgatacgtatgtaatgccagaatagccatgaacaaggcagaactaaagttattttcagatactgaaatactgtttttactttggctctgctgttgaaccacagagttagaggcttaattttctttctatcaatatattgcttttattttttctgcacaggaccttaatgttctgcatgtttagtgaggacacttctacttccagtgtaatagcatcatgcttttagagatgcacttgttagacatttgcagctagctgttcctttcatgaccttgtgactggggcttccataaagatgcactcctgcacaactcctttcttgcctcccactacaaaactgtaaactcggggatactagtctggtttgctcagtcagtttctgctctttttcaccatcttgcttggatggcgtccctttggtgtctagcgctctcctgctaccttgcctccttctcaatctctaaaataaagggaaaccttctgtttgtaccattcaaaaactgaaaatatttcttttttgatgtgtttatattattatttccagggttatttgtattgtcagatttaacttgctctgttttatgtggaaatagtgccaaatattagcaagtagatgatgggttatatttggagcagggtactttcccgttgttcttaaaatcacatatacacaaagttgtccctaaggtcaaccctaaaagcacacctgatttatttcctcttcgagtgcccaggagaaaagacctcctttctacttcctcttctcccaaagtaagcaagactcactaagattctttggctgtctctggaaccaagaatgggtttcacctgagctcagccattcctccaacagagagattctccacttcaaatgcccaataaagcctaacttaggagcttttttaaaaaaatctgcccagaccagttaaagctcactctctgagatggacccaggcatcagtataatttcatcccagcatacagcagcagttgaataccactgctctaaaaagtcttaaccaccttcatgcctgaagcttgttcctagcctgaaagtttttgagaatatggccattaagttccacaggggaaagagcattgtgatgttagtcatgacaaactataatgctaccacctgctgacagctgccatttattgatcagttctgtgtcaggcattctgctatttctctatgtaatctttatgtttttactgcatctttatatatatattatatttactttttatgctttactatgtttaatcttaactgtgaaatgggtcttattaccatttcacaaagaggaaaaggaaatgttaaagaggataggtgatgtgatcaaaatcacacaactggtaaacgaggagaaacagttggtaatattgatcacatgttagatcaagaacaaagaagtgaaaaacygtaaaaaaaagtagtttgactgtatactaattacagtaaattataccaacagtttaccatttgtgcctaattacaatatagcacaataatgattatgattataaataccattaaacagatatcgcattaacttgggcaaatttcttttgattacagaacagcttaaatctttattataaataggtgtggaatgaatagctgataatcataactaatattttattgagtgtttactatatgttttaggcatcacagtaaggataaggactttgcgtacattttgtttaacctttaaaaactaaaactctgaggttggtactataattattattagaagagaggaaactaaggcttggagaggttgaatagcttacttggtaaatggcatatccagaccttccactcaggattgcgggactccaatgctcttcactattccatctccttatataatatgctgcagattcataggactgttcgtgtttgctcagcctttgcacttgttactaatgtgggctggttatctattcaaaactttcaacatgacttgtgagatggatataattattttaaaagtctgcaagagtttccttctaagctattaatagttttaattttgaatatatataatgggtaaccccatgaaatctcactactatataagaatggtcccaatttagttattctcctctcccttcaatgacataaaatcaacatatcctcttagattaaataatagtaataacaactttcagggtcatcttagttctttgaactgtgggttttattaaggaatagtagaatctgtgcatatttaaaataatcattttgtactgaaaactgaccccaaaacatacacatagaaaggcctgattaataacaaacattattatgaagtgttttaggtgggaggcattcagttctaaagattatatacaaaataaacctgaacctagatgaccttcagtaaaatatcagcatattaatatgccaagaaactcaatggcatgtctgattccaattcatcgtgatgaagaaagagccatcttgccccaactcttgctcagagcagtcgcacaggattgtaagtgatcgtcttaaaagactctttgtctcacctttgtcaaaatcctctttcaggggttacagccggtagagaacccataggtttgggggtcagaaaacctgggttcctgttgtagagtttctatgaagtctccagaagattactgtgctgtgagttttccagtcttaaaatagggacaaaaactcatttttcagcatttctcaaagagatattgcagaatcagtaataacttggtaatgttttagtaatgcctgtcctttaaagagtaagtatgtagactaaataagatacatgtacatagttgaaatccagtaaatgccactcatttgatatattatggtaagtctacaataatacagaactcttatttgtaatcatataaggcatctatagaatgttttaaaaaattccttaaaaacaaaaggcaacatatactatgtcagcaaaatcccatttttaaccacttagaaataagttatacctaatttttcccccaaactaataactccctgccagtctgttttggcagcgtagaagttgttttcaaatcactaaaaccctcatgacctaaaagttgtgaaatttgaaggagtttgtgctgccgttactcttaagtttttccctaggtgctaattgagtcaagtttgttctgcattatgatctaatgcaggcacaatcaaggatcagatgtcagggtgtcagatagcaggaagtgctgattggtgggaagctggggaatgcaagctctacccaaaggcattaaaattcttgaaaaatagttgaacaccattagctatacagacacaccttctagctagattctactgaagatccaccaattcacagactttcagctaataaatgtcttatgataattaattctacccccagaagggaaatagtcatatgccacttcatgctttttaataagttgattgtatgtaaagatttgagtttaccaggaagtttacaaagtaaattatagttattagagttcaaataaaaatgtttttatgacaaacaactaaagagtgaattctctacatgaattctgatgttcttatatacatcctagaaatcttgaattgtataaaatgttatcctgacatttatgtcttaatttagcttactgccttgcgcagagcacacaagaagtattgaaattaggtagctgacaccaaataaatacttaaggctctttataatacgttattagggaatctgtaatttcaagttatggaccatattaataaatactgcgtattttgaaaggcacttgacaccagtcacattcacctagagtaattctgagtagttcctcacagattccatggggaaaaacatatggttcaagtctcataattccataggcaattaatatatcaataaaagagcataacatttgtagctgtcctcagccaagtacctactatgtgccggacacagtacaggccctttttatgcattttgtctcaatttactcctgatgctaattctgggaggcattattgctatttcaccaattgcagatagagagtctcagtgagattcccatgaagatggtaagaaacctttctgctgctaaatcctgtgctggtaagctatctataccatatatctatagtttaaaaaatcaataaggacatcggtgaatggactgcagcaattaaacgaacctagttaaccttgtaaatccccctatatcagatcactatagggaaggaagggctcgataccttaaaattcccagtagagggtgtatgcccccattgaccaatctgactggatgtcaaactttggtatccgttgtacactgtgtgcagaatcagtatgtgctagaattatgtataacaaactaaaagcctaccagatgttggaaaacagtaacatgctgataccaaggtgggcttggtaagtgaaggatcagcatgttttcttttctaagttaaacttctgaattttcttcaaactcttctgtctctactcatggtccctcagcccaaatctggcttcttctgtggtctccagatagagttaaacacttcctcacatagctccttgtatgttttctcacatatgtttcttcttatgcatctctcttccactgtatgtgagttccttggagccagggctaattgctttttcatccttgtgttgctaagcactaaatccaacagtgtgtctgatggtggctgacaaatgaatgaatggataaaaccagtaaaactgcctgacctcagcaccattactccctcccatcttttagttcttggctagttagaaggccaggttctgtggctgagctcgtaaaagttcagctgtattgtagaaatacacagatatataaatattgtagaaatatacaaagcctttgctttcatggttttgaggaaaggaaaaggtgagcagttagccaaactcttagattaaaaagagcaagaagagtgattccaggaaagttttctttttcacttgtatgtttttgcagcttttttcatagttttcaaagttgtggaaccctctcctggtgttaagaacctgcttcggttcttaaaataaacaaaggtatcaaaaagtcctcttgctccaatattttcacctctgattggcaattcaaatgtggaaagcttctgaaactatctttaagtagcttcgtaagatgacaaaagccctatatttagtaatgtctaactgaagtttgttttaatgatttagaaaatatcctagtattcattattataaagtgtttattttgcagagttttcatttgaaaaactagcaactctgccttaccatagaaatgcatcgttcttcaagtttttgaaaacattttggttctacatattagactttaactcttgaatgctagccctgcctagtaataaaacatgttttttttccagtgccacttaatggcaagtctcttcaagtttctcaacagtcaactgctgtaaatgtacctgaggtacrttctcattttctagagggggaacaggaaaaattccactgccaccatccacccctgtcatccaaaagcaagtttattagtgaacttcaagtcagcattctaaccctactatctggtctctcttttttacttttttatccttttgggtttatcaagtccttattttaagattaacatgaagaatacttaatgttgtaaaggctacatggatggttttgacatcagagtgacaaaatatgttttaaaaggataacaatatctgagtgcatgtttgtaagagcagctagataacatggcaaactctgacagcaatcatttcttcactcctgccccatttttcctaagcaaatacacttagggtgctcttcagtggtagtgtatataaaggatggtctccaaaaagagattggcagctttaatttgtttgatatgtgcaatcatggtccgtgttaaattcaaaatgcttgtccaatcaaggattcaatatagaaaagaggcagtaacaagcatgctgcacactgtaataaagaaatctgttgattgaaaacagtttgtatattttggaaatgatagggaatgtaattggtaagaaagaaaaggatagggcttcataaataatgggaaatagagcatattttttactgataatactaactcaatttaataacattttggtgttgaatttttgtgtgccagaaaataagaaagatgggttcttttttgttactctaaatgtcatgattcatgggttgaccttttttgtttttgtgtccatcgagagcagctttgacaggttgaatcaggcaatagtgggtgatacgttccggttctttgagaactttcacagaacatttttcttttgttctctcatccaagaagacgaaacatatttttaactgttttttttttttttaggtacaagtactacatgaatgcatttctgtggtaaaagatctaaacaatagagaaatatacagagcaaagtctgtatacttttcgtacatagatgtctgggtagagatttgtatgctgattgtttgaggggctgtagtattaagaaattgaggctgggcgcagtggctcacgcttgtaatcccagcactttgggaggctgaggtgggcagatggcttgagctcaggagttcgagaccagcctgggtaacatggcgaaacccattttatacaaaatttagccagttgcagtcgtgcatgcctgtagtcccagctacttgtgggactgcaacaggaggatcgcttgaacctgggaggttgaggccatagtgaaccgagactgcaccactgcactccagcctgggggacaaagtgagaccctgtctcagaaaagaaaaagaaaaaaagaaattggattttactattcatgtcattctcaagcttacttaagacctcacagatagaaaaacatatataaagtcactctggagggctgctattagtggctctccactagaaacatgttgatgcggacaccactagctgtgcctggggtgagttagctgggacccttttcaccaagcaccaccccaggtcacaagtgtccctttggagctgctcagctcagttggccagtatccagctttgtcctctctgaagaaaaacatcaacaatttaaactgcgagcactaaatacacttaatggtacctttacctgtcctttttttcctgttatttagttcctttccccattaatttaaaattctgcatctagacttagcactagtaatctcatcttgtacaaaaatctaactattcagaaagtaccaactagaaattttcagtgtaccatggtggcaggtgttcatgatgatggaatactctctaactcataaaagagattgtgtacaatatagttttgttattaatttatgctactttattaacattttaaaaagtggtcaacagtcctttattaccttcccattaaccatcatgttgaggtaactataatacccagttccctgcatctgttctaaacaaactggattttactagataaaaaatgaaattactaataaaaggttaagtgatacatttagcatacatcatcagattaagcatttgctataagaagaatccaggccgggcgcagtggctcactcctgtaatcccagcactttgggaggccaaggcgggcggatcacaaggtcaggagattgagaccatcctggctaacacggtgaaaccctgtctctactaaaaatacaaaaaattagctgggcgtgcgtggtggcgggtgcctgtagtcccagctactcgggaggctgaggcaggagactggtgtgaacccgggaggcggagcttgcagtgagcggagattgggccactgtactccagcctgggcgacagagcgagactccatctcaaaaaaaaaaaaaaaaaaaagaatccattgtattggtaagctgtttttgtgtgagattgcatttcttcctctccaagcgtctagcacagcactttggattccaagttcaccaaactttccccctctattcaattgcattaaacatgtattaaacatcttctctatgtcatgctttctaagatgcaaaaaagttagtatccttcttctctaagaatccataatctagcaggatgcggtggctcgcgcatgtaatcccagcactttgggaggctaaggtgggcatatcacgaggtcaggagttctagaccagcctggccaacatagtgaaaccccatctctactaaaaaatacaaaaattagctgggtgtggtggcacacgcctgtagtcccagctacttgggaggctgaggcaggagaattgcttgaacctgggaggcggaggttgcagtgagccaagatcgcgccactgcactccagcctgggtaacagagcaagactccgtctcaaaaaaaaaaaaagaatctgtaatctaatggcagaaagggggcctgcatagaagaggtattcttcattctgttgaggtggcagaaccctttatctcccacttataacagtgtgccagtggtgaaaaaagcaaggtgagaacagtctgaagtcagggataagaaaggaggcatccccatgcaccccaggaaagcacccctaatgatagaatttatccctgcagggaaaaggtaaaccaagataccatgcaattgtatacctggaacagtactcttctgaacttgtttgatttcatactcttaacattaattttttttttttgctgaaatctctgatatttatatatgtaattgtagatatataggtaatttgaaagagcactaatgtactcttcctgtgcaagatatcctgtagaacatacgcaaaatatgcattttttttttccttcaacttctattttaagttcaggggtgtatgtacaggatttgcatatttgttacataggtaaatgtgtgccatagtggtttgctacacagatcatcccatcacctaggtattaagcccagggtccattagctattctccctgatgctctccctcctcccacctcagccccctctgacagcccctccccccacaatgtgtgttgttcttcccaatgtggccatgtgttctcatcattcagctcccacttaaaagtgagaacatgcagcgtttggtttccttttgcttcgttagtttgctgaagatcgtggcttgcaactccatccatgtgcctagaaaggacatgacctcgttccttttttatggctgcatagtattccatggtgtatatgtgccacattttctttattcagtctgtcattgatggatgtttaaattgattccacgtctctgcagacataaagacaaatggaacagaatagagaactcagaaatcagactacacacctacaaccatctgatgtttgacaaacctgacaaaagcaagcaatgggaaaaggattccctatttaataaatggtgctgggagaactggctagccatctgcagaaaattgaaactggaccttccttataccatatacaaaaattaactcaagatagattaaagacttacatgtaaaacccaaaactataaaaaccctagaagaaaacctaggcaataccatcctggacataggaacaggcaaaaatttcataatgaaaacgcaaaagcaattgcaacaaaagcaaatatcgacaaatggaatatatatttaaacttaagagcttctgcacagcaaaagaaactatcatcagagtgaacagacaatctacagaatgggagatagtttttgcaatctatccatctgacaaaggtctaatatccagagtctacaaggaatttaaacacatttacaaggaaaaaaaaaaattaaaaagtgggcaaaggacatgaacagacacttctcaaaataatacatatatgtgccaaaagatacattcttaagtggatatggttgaaaaacagtattttttaaatattggtgtgtttttaatccagggtgttttttttaagtccatttcgagatttttaatttagttaaaactaacttgatcttgttaaagccacttaactatgcaaacagaaacttcactatatcccactggactgaaagtgaacctgcccaagaggggccctctatcaaatccttgcccatggaacagggtcaaaaacacaagaaacgaggataccttctaatttgagcttcacacgcagcatctgacactcaaaccaagcaaggtggggctaatgtccacccaactagcaaatattagtaaatctcaggatctttgttttagattttaaatttttttaaataaaacacagatgtataaattagtccagaaggtttgtgaccctcagtagccatcctgtgatttcaatacatgtcttcttccctggtcacaagaggcaaagggtcaaatgagcaccacttcagaagggtgagcacaggacagtgtcgatgggtctgttcaatcttgaaccctcttcccaaagctgggagtgtatctgtttgctttaaatcctgtgaagccgggatgccccttacacctgacctgctttcagtgcagactgtcatgtacgtggacctcagtgaatgaaacctgggtgtccatatcttacctgctgctcatcaaaactgcaagaaagaaagcctcttttgatgagcagttgtactacccctaccagggtatattcagattggtggttttatcatttccaaggagataagacagtgagtgacatgtagctagtgcaaagcaacaaatcatagcatgggcagggcaggttttaagagttatttgcctcacactgtcccctggcacttctacctggctgttgaagccatcatggcagtgctaccaacctccactcaaccaggcacctgtgactctgttttcacccctggaaatacacacacccatacagataggcatttaagcaacatgaggactggctggctgtttttatatttactaaccatggaagcactatcattataaattaatcaaaattttcatttccataaacatataatagtgtggcttagagagtgtaaagggtgaatttatctccctgggctaagtattacctcactactctaatatgtggaccaagatattattcaggattttaaagatggaggggggatttcatgaaaagggaatggatgtggaagattttattttattttattttattttattttagaccgagtttcactcttatcacccaggctggagtgcaatggcacgttcttggctcactgcaacctccgcctctcaggttcaagcgattctcctgcctcagcctcccaagtagctgggattgcaggtgcctgccaccacgcccggctaagttttttgtattttcagtagagacagggtttcaccatgctggccaagctggtctagaactcctgacctcaggtgatccaccctccttggcctcccaaagtgctgggattacaggcgtgagccaccgggcctggccggaggatttaatttttaaagttgctagaacctgatagtttgtttaaaataaaatattcagaagaacttaggggaaattatgagtgggtattattatggtggtgaattttctgacatcttctttatcctgctctctcacctctttctaagcacctgatctgtttggaccaccaccatacctagagttttagatgtatcagaaaccaccaacattggatagaatatgctcaccctgcagttcccaaacgtatatgctgcacaagtctagcaacctgaactgagaaaggacctctttcttgttctctgttccaattccaagtcccgggaaaaggctgtcggcatcaccctgtatagaataactgcttaggggcacactgtttggatgaggaaggggaccaagagtctgggagaggttttccatagacctggctgtcacaggtttgcagaataccctgcttatctaacaaggtctggataaatcccttgctacttgagctctgacaagatgagagagtttttcaaataacctttcctgagaagctaaggaatctgtaaaagtcagcaggcttataggataagttccactttttttcatccacaattagcttgcctgttgataattaaccagcatggttgacaaggcacccagttcttgactttttttccttccattagccaattctggcttagatattggagaagggaccctagacaaagaagcttagccttctggctgaggaagatgtgggtaaggtatgttggcagatctggtggagtccgtgatcatgttaagaaacatcttctggctgggtgcagtggctcatgcctataatcacagcactttgggaggccaaggcttgcagattgcctgagttcaggagttcgagaccagccatggctaacatggtgaaaccccgtctctactaaaaatacaaaaaattagctgggtgtggtggcacttgcctgtaatcctagctactacttgggaggctgaggcaggagaatcttgaacttgaacccaggaggcggggtttgcagtgagctgagatagcgccactgcactccagcctgggtgacaagagcaaaactgtctcaaaaaaaaagaaaaggcaagaaagaaaaagaaagagagagagagaaagaaaggaaaagaaaaaagaaagtcctccaatgtttgtgcctaggcctgaacctcctagattgtctccactggcttcaggctgtgtccactctaaaacatctctagccttcagggtcctatcttggcctttgtcatggcatgtctccagagggttctccctcttcccagggttacctgagtatacagcctgcagtaacctgctctttctctaggtgcttccattcacctgaaatgtagttattctccaaaggcaggctctctttggttattctgaactgggctctccataatccctcccctcccaccatggtcgggagtcttcctgggagccactgactttctttggcgaccatctacattgtattggttgctggggacaaccaaaagcaaacctgtatgtactgttttcctagttgggtacccacccccacacaagcttccctttcttgggggatgtgtctagttctcagcccattttcagaacagaaatgtcgtgaatttagtatttgaccagttttttttttccccctaggcccagattctcttgagtagctcattgttcatacttgttttctttttcccattaaatcacctacccaggagagtattttgttttctaaaaaatagtcacttatcaattaaatgacaggaaaaaaaaaatccaccccagagaggagacctagtatttattggacacatgggaaaaatgagcctttctaacagagggatggtcatcttgtacaagtacactgagggcagctgttctcaaccaggatgattttgcctccccacccgagggaacatttgacaatgtctggagacatttcattgtcacaagttggggagaagcaggagggaggctgctgctggcgtctagtgggtagaggccaaggctgctactaaacttctacagtggacacaagatagacccacaaataatgattggcaccaaatgttagtaggttaagatagcaaagacttggaatcaacccaaatgcccatcaataatagactggataaagaaaatgtgacacatatacaccatggaataccatgcagccataaaaaaagaatgagttcatgtactttgcagggacatggatgaagctggaaaccatcatcctcagcaaactaacacaggaacagaaaaccaaacactgcatgttctcactcataagtgggagttgaacagtgagaacacatggtcacaggaatgggaacatcacacaccggggcatgttggggggtggggggcaaggggagagagagcattaggacaagtatctactgcatgcagggcttaaaacctagatgatgggttgataggtgcagcaaaccaccatggcacatgtgtacctatgtaacaaacctgcacgttctgcacatgtatcccagaacttaaaaaagaaaacaaagaaaccctaatatagggctagtgagatggctgtgtgagcgtgagctggtgaggaagggcttggggccactgtgccagtgctgacggaatcctcgatagtattttgtcaagtcgaaggacagtaataatgataaatgtagcaatggttttctagacacgaggaaaatggccttggtctttgggtggctactttgtttgtttgtttgagatgaagtctcgctctgtcacccaggctggagtgcagtgacatgatctcggctcactgcaacttctgcctcccaggttcaagcaattcttctgcctcagcctcccaagtagctggaactacaggtgtgcgccaccacgcctggctaatttttgtgtttttagtagagatgggttttcaccatattggccaggctggtcttgaactcctgacctcgtgatccatccgccttggcctcccaaagtgctgggattacaggcgtgggccaccgcacccggcccttgggtggctactttcatagaaaggcagctatgctatattgatatggaacagaggcttatttattaaataaattcactttagcaataataaactcattacatgttaacatagaaaccttttatgaaaatagctatatctttcaaaacaaaaaaaaaaatggtgagaagagcagcattgttttaaattttggcaaatctctttattctctggcttaatagaaagccagcctgatttctcatctgcttctgcattcaatctgtggtaacatcacacatcatgtagcctctggaaactccactgtagacccatgagagaatgagagtggaaaaagccagtaatgtcttcgtatgatttcgaaaaaagttttgaccttgaagacccctaaaagggtcactccagatgtcccctggcccacacattgtaaactgctgctctagaactgtgagatctgtgaagcagaatggggaaaaagtcacatgtttaatttcactactctttaactagaatttagcgcacccttcaaatatggatggaggcctcagaatacagtggtattagcagtatctgactttgttatcagcagtagacgtcaaggatgttttctgatcacattacagttgttgcagatatctaaaatatcacttagcattgctttgaaattttactcaccacagtgctagatcttgtctataatgccttaataagaaagtacatacactactataccacaggtgtgttctttaataccgacaagtatatttcagtgtaattgctttactttgcactcctatgttgttttatttgttttacctatttaaaaacattctgagataggagctgtgggctttagttgactgccaaaggagtcctcggtacaaaaaaccttcagaagccttactctagaaagttacacagccagaaaggcatgccttggccattttgggaaagcagtacagccccaaagcaagctcaaatcggagtgtttgaagaaagcaagttccattgccactgttgtcggcctgtgtcctgcccacctctgtatgcacagccacaacttcaagtaattacaataaagtgttgatcatgaacactcccagttttcaaaaaagagttaaccacccctgtaatgtacattttggataaaaatttcctttaaaagttctcattctcataattcacaataaattccagtcttctcagcaaattcagctaccctaagagttctagagctaaggtgctcctgtcacttgatgaaagttaataaagcttcccaaatattcctggacagacacagaaatggacaatgattgcttctaagaaaggacatgggatgagtgggagacttctttgttggttggttaattttaatttcattagttaaacatgcacataatttgaattatcagaagttcatatgtctggttacaaaaagcagtccctttccttcccatttcccagtcttcaaacacaaccacttgggactccttccactgctgttttcagtattcacctccttatctctaaataataggcacagagtgcatctcccagtaatctcctacaatgagaaaagaggccttaacacctccagccatggtcctcaggcagttagagcatgattccggcagactgattgattgataccaatagccactattgatacataccaattcttcctctgcttttctaaacctgctcttaaatcagttcacacataactggtatctgagctgatgaccctcgcggcctgatgcacagctgttatcctgggaatcttcctttaccatcatctgggtattgccttcacatatcacttatttcagagtccctgtgccctacagtctgtatctttgtttactgtccctcttttggggagaggtaaaacatctcttccagtagcttcctgagaaagagtacttggcagatgaagcttttgagacctttcttgtcttaaaatgtccttaattcaccctcatacttaattgatagttagatacagaattctaggctggaactcagtgttcctcataattttgaaaacattgttctactgtcatcttttttagtgttgcttttgaaaagttgaaagcttttctgagtcctaatcctttatatatttgacctgtgtcctttttttttctccttccttgttagacacttggaggatttcctttgcacccagtgcatgggcacattcatgatggtgtgttttggtctggggcagttttcatttatggtgctgggtacttggtgggctctttccatttggaaagtcaagccctccagttctgggaagttttcttgaatttcttctttgatttccttcctaccatgtccaattatgttttaatttctaagaactagaattttcttgtttttgcagtgttcctgttctcatggatgtgatctgtcaataacttgagatctcttcttgtgtgctggtcagattccccagaatagatccagtctcctccctgaagaggattagctggcttcgggcatctggaacttggggtcttggcacagcatgccttggtgggctcagagaccctcatcaagagaataagccttctgccagagtggaggtgggggtttggggtctctgtcttgaatatactttgaaccggtcttcactcatacttccagagatagcttggggcaccaattcatgagcctttgggagtaagtcatctcttgtttttctgctcgctagcttttgctgccagcacctccactactattttcctctttcttggagtttcttttgtcttttaaaaagtcccttactgtaatttgagtgaggatttgggagtttacagagcaaaatatgtgtatttagtgtgccatctataaccagaaatcagagagttttcaatgtaggcttttttgtgtgcattttgaattttgtccacatttttgtactaggaattcaatatttgtaaatcaagcttccatctttgttcttacaattaagagggaaatgtccacttctgtgtgtactatcctttgaacgttcaaaggcctcacaatatttgtatatttggtacaatgtaccagatgtttgcagggatcttttttacatattacctcatattccasccaggtcaaatttgatgagaaagagttcttttttctttttggttagattctagatgatacccacagttcaaactgtaaaagaataagtttgccaatagtaataattaatagcatttattgaacactaagcaccagacactattataagcatgttctgtgttttaacttatttaattttcacaactaccctatgaagtaggtactgctgttgtccctaaatgatagatgaggaaatggaggtccggagaggtttaaaagcctgctcaaggtaacatagcaagttaatggcagagtcaggattgcaaccccaatagtctggctgtagagtacattttaaacataactactgtgtgcacaaggctaatgatttatggattgcatgaataactaaagatgatgtccccaactttgttagagatatccccaaacttccttaatggatcggttgtcataacttcaccaacttacagctctttttttccacataaaacttgccaaaatgccttcagactgaagggagaaaaaatttaactgtttccttcaaattaaattttattagcagagaactagtattaagatcattgcatgaagaaaatgtaaattagccgcttactgtaaaatagtattagagaaggcaagtgataaacatgtctattcctctttttccctttattagtggttaataatcaataaatagcagcttaatgattaacattataaaagattacataagagttttagaagaatttagattttctttactaggtagtcatcttcatttttataaaactgacatcagtgttaagccatttttaccacaggttaaaatttgactgacctattctgttgctgactgagtcataccaggtcactgaaacctaaaataagtatgttgtaagcatcgcgtaacaattataacctatttagatccaagatccacttaagacatgttgacttcttttctgcatcactgagatggccgacacatccatcaataatgtgctgaagttctcattagctctctatacagggaaggatgccagcaaaatgtacagaagtaaattcactggaatctctggtcagaaattatgactgttctatatgtcagcccatgtgttgctaacagatttttttctttacaaaaatgtgttttgtggtttgatttgacccatggttcatctgaatccaggcaattacacttatattaagggttctactgtccactttctcctcatcttgagaaatgtcaaaaggcacatatcctgcatctgaaggaaacacaagaaacaaaaatggaaatgcctgaagagtgctttcacctgcattaatcaagggacagctgctgccattcccaaggcgctgccctgcagttggctgagcagacccacatgggcctgctgaattaagtctgaattaagagtcagactgcgagtgatgctgcctctgtgtttaggtgaaaaggccactttagcaagtgtaataaaatgtatagactcaggtgagactccaggggaaattttgccccttgagtttgggttggagaaatgacctccagatctctaatatcattcactgtggaggagatgtggaccatgtattttttccttttcttccctttataagatggtaatttccccttagggatttgggtttctctgttgtatgcattaatagggagatgggggagagagagagagagtcacaaattaaagtcattttatggtaagtgtctatgccttttcacctctatgcttcactttgtagaactcgtcaggaaaatcattcaggtgacgactatgcattttgatgttaacagatccgactcttaccgggtagacgaccagttaacaacatgaaataaggcagtgatggtttttgaaatgaaataatgtttgatgtaacctcgagtttctctctgaactctgaccacactgtagaaacccctaggaggaggtgagcagctctgtcaggcacagaattacacccagggaagaaaaattaattccaatactaagggagaaggctgtgttctcttgcatgatatttagcagcaagagcaaggagagggatgtttccttctttgtgtaatgtgcagtagttacaataaacacaagatttccaaatctcagaggactcttcttgacagttgcttgataacagcttttttcattccatagttttgacagtttgtgtgtgttgccatatctagtgtaaactaaaacatcactgtcattctgtttttcttttgtatgtggctttttttttttcatctttaggataatgaaaaagatgggcttttcacttgtagactagagtaaggcaagttgtgtgtggagattagcatgtgtttataagttttgaaagattcaagttgacagcagaacactgctttaaataatttttttctccatatcgcttcagtaaaagtacaagtgggatgtgtaagttttctcttaatcttttgataaatagcaaaccttaggcatctgtgtgggtacctatattatttatcggtggttattgaaaatgaatgactacaatgaacatctctagagctcctggctgtgtagcctttgataagtggtgagcatcctgtatcttactgttaccagggtcttgccctgccccacgtaggtgcttttcagtccctcgctatgcttcccttcacttgatggatcccctatcccacccacctctgtcaggtttatagctatgctacgttattggtttgtgtccaaaccaacaggatgatattgttgttgtggttgatgatttatctggagtaactctagaaactacattgcatctgcactgtttgagaggctgcagggcaggtgatgggccagaagcccaagtcaggatcagagcagtctttactcatcagatgtgaactctcagattccccaaagtcaggaagggatcccatacctgagagaccttcccccctccagccccaataacctttgatttgtagaagtctcagtgaggttattttgccatcaaaccaaatttgctgtagcatagcaaagctcccaatgccgtcatctggcatgttacagacaaattccaattacttttctacttcgagctattgttaaacactacaagctagctgacagtaaaattataaatacaggtgttgtcacactacactataatcagaattttaatttgaattttcatttgtaaagcctttttttcagatgaaaatgggaatagaattagttttattgacagtaaaaagacattttgaaagcttcctaaatcattacctgtatttagcaggaggaaaaattgtatatgtccatgtaaaaagaagagttttattatcacatatttactcattatatttggtggtaaataaaacggggaagacatgtttgacaaatgattgacggaactcactaggtttttgcttcatcagaacaatagacagacataaatatatattttgcttttgttttgttctgctattactaatgcagacctgtagacaaaatctgtttctagcaaattaagtgcagcctattgggagtctgcatgcaatgctaaactttttatttggcaattttctcttttcacccagattcatcatctgtggcgctctttttaccccttttgcgtggtggttggagtgggttcccccttctcaggtcccttttttttttccctcaaggcatttagtgtcgtgtctgccagatttcagtgatgagcagcgaattgcttttaaagtgggcattatgccagttcagcagcacaatggaaaaccaatcttccaccattctacttttgatgctgttattgtagcattttagataactgctgccacaaaaaaaaagaaagaaaaaaagatgtgctcaattgctaccagttagtcaagttaaatccagagtagcattaaaattactctgaaaactctttgtcagaggtcatgtgccgtctgtggctgccacacataggatggatgttctgttcaggtgggggtttttccctttattattactgtgactgaccagctctctaaatagccctttactacctgtttacttattgtcttcacctccctgttgaaaaaatgtgtcaagcagaaatgttgaaaagtttctttaaagtgctggaaatagcaggagagtgagtcgttcagggtgctagagtttgtacaatgtgaaagcaaaaaaaaaagtcgggggagagcaagaacataattctctggtttctatagcaagattactgttttcttctttttatcttcacttttcaaccactgggttcactgttctactttttttttaatagcacaaatggaatttatcytctctccatctcaagtccctcccctccctccactggctttgcttgtgaatgaaagggactcctactatgactaaggacagatggcagctgtatacgttgtatttgatgtattttggagtgagccatattttaaaattcagggccaatagatgggctattttgagagtggcactagcgccatcctttaagcctgctccatttcctccaaatttatttacattttaaaaattatataaataagctataatctgtgctcaaaataattgagttgtgatcttttaactgtattgcattaataataaaagcaactcagacttctgggctgcctttcttctaaagagtatgtgttcatttatctttatgttgtctctaatggatttttctcgtttatgttaatcatatctctagtattatcagattctgatcctaatgaaggcaggcacttttgtctgttttgtccattcctatgtcccagggcttagaatagtatctggcacgtagtaggcactcagtaaatatttgctgaatgaattaataattcatgtttctatgggtacatcgaattgtagtgtatttacttatttgtatgttttcctctccagctagaatgccaaactgtgctcctgaaatacagcaggcgtgctaaggcattttggaatcctttcttcatctctaccctatcccaaattgtacatgacacccagtcagtacttaataaatatttgtcaaataaacaagtagagaagcccaaacgcaatttatttgccagtgaaagatatggtcatttggtggtagagatgaggataggttaatggcccatcaatcagtattgttaagagtctccacgttcttagccttatgttaattcagagttctttcccaggtatcctattggttttctgggcttattgccaagcatattttagatccatattttccttcagtttacagtttaagagcattttaatttttgctaaagcttgcaaaaaaaggctctgataatgatgcagtcaatatcagtaaccatcccatttgctagtgccatctagatgaatccattgtgtagatcgtcctgtcttaatatgggagggagactgctgtgcatggtgggatggcctatagcagttagacctctctaagcaccatttgcctcttctgtggaattgtggtttagtcattctgtcgtgtcctctactacctgcctcccccaaaactccctgcttccgtctgcaaaatgaggacctagaggctgcttaacaaggccagaggcttcagagaattcagtgacttaatcaagaactgtactgtgtaagagacacactgctttccctttaaatcattgagtgtaagagacacaccgctttcccttttaatcattgagtcataaatgtgacatagctttaaatggatagcaacaatttgcaaatcaataagacccattttgtaattagctttggactaagcattaaaaagtatacattgaggattatggtagttaaaatgctgagcagtgtggggattcttccttggtagctgaaactgtgcataataaacatacagaaatgaggatggcgagtttcagttttaccacaaggttatgcatttatttgagaagaatctgagatgtgcaatacaacattccctaatatgctcatttcatcttctctgctatcattgaaccttcatctaagaagagccaaggaacaaactgaaataaggattcagatttttattagagtaaatgtaaacacatgtagaggggaacattttgccttacatggcctaccatcaacgttttacaccggaaaaaaaaagtgtgtgtttattccagcatcctgcatcaatactggcaaaaattctaaagacttgcagttgcttgggccaaagatggaaaattttatataagaatgctgaggagaccttttgcacttttttttttttttttttttttgagacggagtcttgctctgttgcccaggctggagtgcagtggcgcgatctcggctcactgcaagctccgcctcccgggttcacgccattctcctgcctcagcctcccgaggagctgggactacaggcgcccgccactacgcccggctaatgtttttgtatttttagtagagacggggtttcactgtgttagccaggatggtctcgatctcctgacctcatgatccgcccgcctcggcctcccaaagtgctgggattacaggcctgagccaccgcacccggcctgcactttttaagataaatcatgcaggctggagagtaggagttttgtgtgtgtgtgtccctttacaaagagagtttagaggaaagagcatgaattaaatttgtggcgttgtgaaaagcctctttggtccggtttcctcatggctatggtgtctcttctgtttaacttatgggactgttgttaggatgaaataagatatgtattttttgaaccctctataccaggagttggcacactttttctatgaagagtcagatagtagtttcagctttgaggaccagtctcctttgcagctattcaacttctccacagtagccatagataacacagaaacaaatgggcatggctgtgttccaataaaactttattaacaaaaacaagtggaagccgagatttggccttcaggccatagttgctaacccttactccataataatgaaatcatgaaacataaaataccaaatattctaataaccccccatttggaagtcagccattggagtcagtacctggccactcttgtacagtgtaggcctaaagggagtatctctttctagagaaagccactttccattgtttttagttcagtcttctcaatttttcactaaaccctctagagagaatttaaattcagttgaatatccttgtacaggttgaatatcctaaatctggaaatctgaagtgctccaaaatccaagactttttgagcaccagcatgacgctcaaaggaaatgctcattggagcatttcagagttcagattttcggatgttcagctggtgagtgtggtgcagatatttcaaaatccaaaacacttctggtcccaagcatttcagataagggatattcaatcagtatttatcagtggcttcactttggccacccactgtcacaaaagcatccagtcttttctctaagaaagggttccttccagccaggcgtggtggctcatgcctgtaatcccagcactttgagagactgaggtgggcagatcacctgaggtcaggagttcaagaccagcctgaccaacatggagaaaccccgtctgtactaaaaatacaaaaattagctagacgtggtggcacttgcctgtaatcctagctactcaggaggctgaggcaggagaatcgcttgaacccgggaggcagaggttgcagtgagccgagatcgcgccattgcactccagcctgtgcaacaagagcgaaactccatctcaaaaaaaaagaaagggttccttctttatgacagtttcctcagagccatgacattaatcagggtggagaagggatgccagtattaaaatagctaagtagggtggagcactgccacccattacctccactgggcaatccttgagtctttggttggtaagaagagttgaaaagagggacagtggctatgttagtgatcaaccagttaagatttcaagatatgtgagttcaaagctgcaatgagctatgaccactgcactccagcctggacaacagagcaagagtaagactttgtctctttaaatatatatatatatagtcaggtgaccggtagctcacacctgtaatctcagcactgtgagatgccaggagtttaagacaagcctgggcaacacagcaagaccccatctccacataaaaatgtaaaaattagccaggtatggtagtacatacctatacttccagctatgtgggagtctgaggtgagaggattattggagcccaggagtatgatcatgccactgcactccagcctgacagagtaagaccctgtctcttaacatatatatatatatatgtatgtatgtatgtttatatatagtcactttaaaagtctgcctttgactttattatcactctgctttctcagatttcttaagtccttaaatttctcccccactcttaggtgctccacactaagttactgagttcccctgtatttccaccagttatccagagcgttggccctctctgataggcagcttctaagatggcacccagtgactattatttgtgcagtggtcctcttcccttgggtatggcctggaccaagtgactctcttcttaaaaaggaatacagcaaaagcaatgaaatgtcactactgagattagggtacaaaagatgttgacttctgtcttgagcattctcactctctcactcactcactctgagggaaaccagctgccatattgtgagttggggaagcccatgtgatgaggaactggggcctcagttcagcaacctaagaggaatagcagtccacatgaagagaacttggaaatgatccttgccccgttgagcactcaggagacagtgggactgacaccttgattgtagccttgtgagaaaccttgagccagagatgcccagctcagccatgcttggattcctgtcccacagaaaccgagaaatgtatgtattgtgtgttatgtttagccatcaaatcatggggtgatttgttacacagcaatggtccactaataaaccctttaaagtgcaatgcttatttaagcttctgtttctcataacctgtttgacagtgccttgcatgtagcaggttatccacagatacttgtttactgatccgcttacactaaatgtatagtcatatgtttcattattattttgccagaatactgatttrgcttaatcaaaaatgttcatctttttctccacaaggtatgtaactcaccatcttgaggtatggcatctgtggatccatgatacccaagcaggaagggaatgttccctacccgcaaacaaatacggaacccaagaaaggctgagtgcccctggaatcgttgtaactttatccttccccagtgtgcagaagggaaagggtgttacgagaatcttgccttcatgtcaggatttaggaaggcacgacctcttttctacactctatccagaatgtgatggtgacctggaatggtaagggccccaccaagaagacctgtttatagcacagctgttaccttcaccatccaactgtggcctcgctttagttccagctgtttatattagtcaaaactgtccctaacaccrcagcataggctgtgagaacaagaggctagtgagaagggaagatatccagaggattaagaagcaaccaagccatggcctatgttcttttgactttatccccaaaagaacaacagcttagctgatggtacagcctttggcccaagaaatgtaaaagccattccttcaggtgcctatttgcatatttctacaccctgagggcttttttcttctcccacctgtggtaaatgactgtgtacactggactgtatttactgcctatctgttgtcatcattgtcatcaactaacatttgttgaccattaacatggtctcagaaactgcctgggcactctaatccgtcagcctgtgcattcattaaagtgaaggaaaataagcagaggcttgacattcagaaataagagcccagaaatgagtccagaatttccgattctaaagccagtgccaactcccaggccacactcactgcatttaatgcatatgcattttcttttcctcacatctgctcttcctttgcaagaatgtcccagcctgtgtacacacccatatcctgttacctctccagagtaaacgatttccagttcctgtggatattgcatgtcaccacataggattaaacagcctgaatttttttatgtgcccatctttagaagccttataagtagagattaagatgtttatcaagattagaaatgcggctgggcacagtggctgacacctctaatccagcactttgggaggccgaggtggcagatcacttaaggtcaggagtttgagaccagcctggtcaacatggcaagaccctgtctctactaaaaatacaaaaattagccaggcgtggtggcaggcacctgtaatcctagctactcgggaggatgaggcaggagaattggttgaacccaggaggcggaggttgcagtgagccaagatcccaccactgcactccagcctgggtgacaaagtgagactccatctcataaataaataaatagattagaaatggtatgtgagcaataaagatgttgtgtatgcttcttggatattgttgctgactcaagacttgaaaagactggagtcttcaggaagaatggtactggtggaaaatgttatttccataatatgaagttgtgaggtcatcaaaatcagacatacctaaaatttttatagtcctggttcttagttgaggggggcagtataaacttatcaaaatcttgggaatgtttaagaagcacaaacacatttctcaccttccttttccccacaaaaacctgtgagaaccaggttggatggtgaacactggttgaatatgttgacaaataaacttcccaggattcgacttgactctgtcccaaccccctaacccccctgagcaccactgacctgggactgatcatctccttgtctgtcatggaatattaattggacattaagatttttagattttttttttttttgagacagggtcttactctgttgcccaggctggagtgcggtggcacaatcacagctcactgcagcctctaccttctgggcccatctcccacctcagcctcccatgtagctgggaccacaggcatgcgccaccattcctagctaatgaagatactcagaatgcttccattttctcatgacttcatgtgtattaaaaagtagtgcttacatcaaatttcactgtagtcactatcccattggctttgattaaattacaagcttctgtgtagaatgccgtgaaaggtttttgcgaattgcagtaatagccatggggggtgggggtgggtgatgaacatgttttctgctggggtagtaactcagaactctaggcctttggtacagttgatccttaataagacttagtttcaggttggaaactgtttgttgaaggtcaacattttgttgctgctttttctgctcaaatgtagtatagaatcatgtggaggataaaattttgctagttgttcagcgtatccagaacagagttctggcagttaaggcgtacaatactcttgtatacctcaatgatggcgctttttaaacattagggtagttttaaaaaattgcaataaagtcattgtaattcatagaccatgctgtaatacagagatacgtgtaaaatacaatctgtgtacctgattgcaggtaacagagttaaatgtaccagcaatttcaaacacagtttgatatttcctataataaaatataatgtaaaaaattaaatatccaatatcaatggattctaaatggttttgatatttctttttgtcctttcccatgaagagtaatttatttccctttttaaagtgtgggcagaatgattactagcgcactgtaatgtaattgtgttgcattgataaaataaaaattgtcctttatctgtgtcctgataatgttcaatttacaggctggcttctctgccacctcttcagtgctttgagtattccagttctcctcccttcctgctctgagagcgcacagaactgtttgaaatccactggtacaattgtcaaatcaattattcattctctgcaattatgctcgcacaaagaacattttgctggtctgaatgatgattaaattaacagctattccagctgcctgataacatctaatagaatattcataagcccaaaatggaatgaattatctccattaacttcatcatgctcacttaattacatgcttgttattgtatttacaccttgttagataccgctgaagctgatccagtggctggccgggaattggaagcgtctgtcatggggcagttggagcgcgttttgtaggaaatgctatttattttaaatgctccacctgctgggagccgaggttagtcagcagcactgagatgaattgggaaacggggtgtaaaaagaaataatgtgcttctgacaggctccgtggcttttaagttgctctcattcagccacttcacaaaaaattattttattccatctctcagtgatgatgacatgattgctttttggtaatcatttaccattctgattttattttttgaagtaaattgtctgaagtaataggttcttggaattacagcgtgccttgcttttttcttagaactttatttaagcttgtcttccagcatttaacccgagtcccctctttcgtttgatcttctaactttatttatacaacagtgcttaatgatcctgcacaatgtgtttcttttttttttttccttctctacaacctccccccccacacccacccaaaaaaaaattctgtccagtatggttgacagtactttttataacctcagcaagggggctgcatgggcaattttcttccgacatgacaaatgcaaacacccaaaacccaaccctgagagaatcacttcatccagttgaaaggaaattttttatctctttcaaggtgactcttttgccactgaaacatggtaaggggcacgactcttaccttctattcttgtctatagaagtggcattctttacattgctttattctgtctcctcccttctcgcatcggcctctgctcttccccaaacttccactgaacaacccttcctggtagttgggccccatggcacctccatttgctttgagtgtgaagggtcactgttcaccaccaccaggctgcagcaagcctgtgtttattgaacatgaaccagaccaatggtggagagaattataatcacacttctaaatacttgtcagatcagcctacagcctagtagagcacttgagctaaaccatggatattttattcttcttgaaggctgtattttggtatcaacataaaagaagaaaaaagaaagaaaactgaagataattatttctaagtaggaatggaactggatagtggactaacagactcttcaagccttcagaaatattttagcatctaagatgtgatttaatgggtgagaatggtcctctaggcattggctaattgatagacacattgatcactgtgtgtgcctggcactgtgccttgtgaattttttttttctaaataagaattgactcaaagattatttcttttcatttcttactttgagaaatgtttatgtacttgccatttgatttggggccctaaatgtctttgagtttaaaatatggatgtcacttgaaatctttcaggtactgtgcatagccggaagctcagttatatggatcgatattcaggaaaaaggcaggccagaggctccagcagctctctgtaggtcggatggctctacgtgtagagagcgtagaggggtgcagttttctttcaaatttttctaaagcttcctgcattccaccccttactgcaaagctcacgttgcattgagggagggaggctatggattggaaaaggtgggagaactgagaactgtatggtgggaagccatgcaattaaaaaactgactgaaattattacctgatttcataattgacagaatatttaattcagatatagtaaattgacacacctctacacagagacaattatgactgactgtataacacctgacagaatcaattataactgactgttgtttgatacctttgtacagaaataaatgaaacagacattcagaacagagacggctgctgcctgtgtgcctaagcctgccttaattaaaagaaaataaccagtaggcgatgttaaaatgtctttgcctcgtggtttctagttcagtgtgtttctttaagtccaaaaagggttttataaagagtaaagttgaaaagagatttttggtttactgacatggaactaaaatatgtgaagtagagttagtttccttagatgggagaatactccattattttaatagagctagcattttatttgatcagttgacttttatataaaatatttaagaaaggtcaacctacagatgatggtctagttcatcccatatagaaaagaatgtaactttcattattttgaggttttagattctaatcaatagaaatcaacttttaaatgagcagttcattttgtagtctgataaaatattttgtgaataattagtatctaggctaccctttttttccatcgttttcataggggttagggacagaatatttttggtaattaacatataaccacagggaatcagagcatgtagaaaggatcagagtaaataagctttatatacacgttcctcgaatgttattctcaagaaaagtttaaaaaggagattagctttgctgatgtattaagatgagtgatttctgggtgatacttcaagccattagagtatatttcagtgacgcacttgtgtgtaggaagagcatttcctccctgatctcgacaaaggttggctttgtggtgctggtggcggagacagcagttaccagggccagtggcatctctgtggacagggatgggatggctgcggatcttctctggctcttgcctaatggcatgttggaatcttttaacagttgttattgggcacctgacctgcagcacctgaggtgatggcgtcgttactgataggctgactctcaaaatcaaagcaggaaaaggaatcagggttttactggccacattaactggcctccaccagttaacacctgtattttcccttgagttctaaagtggtggatatagtattgacagaaacagggtaacagtttaatgtgaggcctaacgtgggtggcccaggtgcctaaagggggaagagaaaaaccaggaaggggtgactccttccccccaccagcccctgtccctgacgcagcctgtgacagctagtccagttctgtttcctagaagaccttccatatgttattgattaaattctctttggggaagcaagtgggagcttttatctgcatctctaactggcgtggaatggtgccttggccgtattgactggctatgggatatgctggcggtcacagttgtcttttaggaggaagagcaccgagtgacgctggttgtcattctaactctgctgtgtggcagcgtaaatagtcccctttctaaccaacctggtgggaaaagtcaatatcccatcagcagaggaggtaaacacatcaggagctatgtcctctcttttcctcccctgctccgtattaccgcagctctttaaatgtgctctccccagtcatcagatgcatttgtgtcattcacatgcacggggttgctggcctgtggctctggcctgccgggaggcagccgacactggttggggccattgttgtttattcccagactcagatcattagaactttcaaattgtctttctgttgcagcccccctctctttttccaccccttttgggcattttaattctctataaaacctgtggttgttctttaaaggacaacttatgtaattcagaaaaggttgtggagagcaaatgcgaatgtatagccaagaaacaaaaatctggagtctgagttttcgttttccgggtgttttgtagacttcccgtgttgctgttgttggaggtttgctttctgtgagtggcgcgctctcccctccgtgtttccttcctgaccggttcctatcgggaggtgctgggcagccttgctgctcccaggccctttggcacaggccagcatcttatgggggcggaggcctcacctcaggatcagctgatgtctgaggcctgcaaatttctatgtgggagtagtgatgtagtggcagggggagtgggcagaagtgagcctctcctcaggtgcgggctgggggttctggctacctgggtttgcgtgtctacaactctgattacctgctgtgtaaccttgggtaagtgacttaacctcccagtttcctcagccatcaaatggggattgggggtggggggggcgcggggaaagcagcctctccagacaccttaccaggttcctgaacacagcgtcatcccccacgtgatcactctcttcacccaaaagatcagacctgagcatcacagccccactgctcctttaaaagaacaacatgtagggccgggcgcagtggctcacgcctggaatcccagcactttgggaggccaaggcaggagaatcacttgaacccgggaggcggaggttgcggtgagccgagatcgcgccactgcactccagactgggcaacaagagcaaacctctgtctcaaaaaaaaaaaaagaaagaaaaaaaacaacatgtagaagtagcaggctctgggaagggaaaggagaggggtcttttctctggctggtagcatcctgctcagaagggaaaggccagggatgaatgggttaaaggagcaggagtgccgcataccctgagttcacacagtgtggacaaagaagagcaaagaaatcttggccatggacagacaggtgccctcggggccgctcacctctcgcctctttcagcaaaggaaattttgtttagcagagggacttgggctggagggactagaaaatgcttactaggcccagctgatctggggagttggggctggaaggcaccagaggccatagctccctttgagactaggtgtttcctgccacgtccagacttcgcaagcagttgcatgcatgtgctcgcagcgccggtgaaagtggcgtctgcgagtagagctcaccttgtctgctgcacatgagggtgcacctgcagttcacatcagtagagggtggccctgtcccccagtgcactgagtcagctaggtgctgagaggcggacagacaggggaaaggaagaaaagctttcacagaggaatggtcggcgggggctgcatctgactggccccaggggtagaccagagataagatggtggagatacaaatggaatcagcatccccttctctggtggaatactgaatgttctttaaagaaactacctgagacttctaatctctctctctctctttttagataaattgaagaagcaattttttacccccaaagttctgcaggactacagaaaactcaagaacacagcagagcaattcttgtcccgaagtggctactccgaagtgaatctgagcaaactcttcgctggttgtgccgtgaaatcctaagggaatcccaggagtaaccaaggagggggtagttgaaaaatcccagcttcctctgtgcctccactctggccctaaatgctcctccagcatctgtttctcccttgggactgtgtctcatgtttgtgtgaatgtagaccaggaaagggggctgcaaaaatgttgagtctaatgttcgtaagcatcatagaaattcctgtcttcatattaagatgtactgctttaaaacacaactccagagcccctccccaagctcccctccccaagctcctgaagacccggtttctgagggagggaaattgctacttggattgagagtagctggaatgtaagtgaccccaggctttgcctcagggcctttagcctatgtcccccccacataaagagagcttctcagagcctgactgaagagctgacgttttgctttttcatatgccaattaaacccggtctaaatccaaatgcttctccagccatccaggagtggctgtccttttcagtcttgtcttttatataggtagctgagggggaagatttagaagccttgcactcactaaatagattaaacagagcaggcttgtttgttgaattgctccaaagtccaacagacacacactgagcaggtgttttacactcacattccctttttgccccttaaatagaaagtgcaggtaaaggtttatacaacaagaaagcacattgaaaataatttgatactctaacaatccattaacatgtgtaggggttacggtgaggatcactgtgttgtattcagaaaaacggggagagggatgcttaattggccctggcgcttgctatttttttctcatttcttcacaataggaccgtctttggcagcagcaaaatgtatttcagtatggcagtctttcctctcttacattattggtaagattatactaacaaaatgtttccccttgtacaattatgctgtgtttttaaaaaacattgacctgtgtgtttttataaaagaaaaagtatgttgtgccttcttcttaagaataaagttttctaaagggaaagcagttgtggtgaatccttaccaggtgcaaagagttgactagagaggcagcaaggagtaaaatgtgagtagagccagttgctgtggcacacacctgtagtcctggctactcgggaggtggaggcaggaggatggcttgagcccaggagttcaaagcagactgggcaacatagtgaggcccccacctctaaatacatacacacgtacatacatatacatatacatatacatatacatatacatacacacacacatatatatatatacacacacatatatatacacatatatatatatatgactagaggccatccccttttcaaacctcagcccagtttcttcatagccacctctatcagaacccagctcaggagtgcacagcatgatatttggtcgaatgttctgagaagcattcagaatttctgtgactttaggtcatttaagagatgaagtatggtttcttacgtgctttgctgacttagagagccaagccaagagcccagcagcatctctttttgaagagcaaggcctagggctcctgagacaaaggcgccccctaaaaaaggtccccctagtgaaggaatactgatgggttaagcagtggagatgaagctgccttttatgttgctttttctttttatttctcctcctcacctcccctctggctcccatccctctcctttctcctcctgctcttagactgagattctaagtagaaacactgtgggtttcgagccctgtcagttaattaactaacttgctactgtgtaagctctgcagcctgtcacaaactggagcacccaaggtgcttcaggaactaagggattaatgtgtttttattgctcccctggtcaactctttcagtaattgctattctcacataaggttagagagatggttttctaaagtgtgctttctgaagggaagtcatgttttccttgatttctgggatctgggattatattaaatataaatagttaccctgaacttggtcatcaggaaactccaagagactcaagtaacttctcactggattgtttcttgtccctgcctctagattataaacaccctgggggcaaggaccatttctctagaatgtgaggcatttctaagtactgtccccgaaaaaagctaatgcagcagttgatgttttcttattgggatctgttagaactctaggcacctaaggattccagaattttgtggaaagttgaaactgcaactttaagaattccagtgaatctctgttagaagttgggagtatcacatacttatttttctctgagagatgtttctactccttgatttgtgtggttgatagtgcacccagcagaactgatgcggaaactttgcccatcttatttgtaaggggagaggtgacctgcaggtctccatggactccggcacgtgtcctaaactcaaattctaaaagtgaatggatgaagcaaaccaggttcacactagagtgagtggcagggactgtggcaaacaggagtgagcaggtcctgtccaaaggggccagcagctactcagtgatgctgggagggacagggcccagtatggccacatgatcgagttttcaagagaagccaggaatccaaatattccacaaagcttactgatttctaaaccttgacaactaattttttaaaatgaaactttaaactctgtgtgggccagagtaaacctctgggccaaagtttatctgggccagttgggaaattataccctaaaagaaccctgctcttctcagagccccctgcctctggaaagggcactttttctgtttaatttaggaactaggattttacctgtagcagatacttgtacacaagcttatcttggacacaatctgctaaccctccactcttctacatataaggtgcatagaggggggccagaagtggaaaatcccacagagtatgcttgataagattttaatttgtccagaaaacagatggagttaatcttgtgactgttgcccaggatgtgggggttaatcaaagttccaagactggaatttgggagaagttgaaagggaatgaattcactgcccctcaccatcacccctttctccagcccttactacctcttacctccaacacacacaccatgctcctcaatatacttcttcaaacatcatttaaaattagtttggcggaagatgcaacagtaaggaaactccaaaaacagattttcctgtttgttttagggttttaagaaaaacaccaagccccagaccctcttgtcaggatgcccgaccctttaattcgatgctcccatcccaaatttaaagctgccattccctgctcctcactgtctctctcccgccccctctttcttctctctctctgtctctctctctctttctcaccccctctcacctaaatatttcttaattgaacagtttgtggtggagcttccttatagcagtttaatagattaactcatctcagccagcctcaaatttcagattaaaattccttcatcccgaaggcagcattatcaggttgttggaggctgttttcaaaccttggttttgaatagcagcggctctgcattaatttaaccactaagctaataagtaggtttcgttttgttatgctaagctttattgcttttcttttgatcagaatggtgttgttgagcaaagcagcagacaaggcattctttgatgagggaattagcgctccattcttcctctattattcatagcgcagtggaatatgtaagtacctgagggtgtcaaaggagcgcaggttctattgcaaagtgctcgccttgtttctctcaatagctgactatgagatgataaaccgcttaatacactgtgctaattggatgagagcaaaaagagatgggaattaaggcgaggcaaaaggagaaagtgcaaccagccttcaattcactctttcaccactttaacagcaccaaaggaggcacaagctttctataagcagactagaggttttgtgcagagataaaatgaacgtgttagtggattcaagtaatacactaattattgcacagtataaataccactactggttttataacagggaggtaaacttcttttgagagggttataggattgcttggcagtggtgtagaacctaataagggcccagagtaataaccccctggattaacaaaattgctgcttgtagaagtatgattcaggcttttacgaagatttccggagaatgaataaaaatgactgaatgacatttcttaatgtataaccggtaatcactcccatatctttaaaggaaaaaaatgtatacttcaaactggacccttaataatgtccagggagggataacaagacttcttcctttgaaaaatgcttccccccaccccacgcccccgcccgctctccccaccgtcaggtagtgggttttcttcttcctgtcccccagccaggctgtcactctcagtgaaatatgcagttgttctggggacttctgtgttccaaaatattattttaggccccatttaagacccccttcattcagacacactcacttttgggtatacacataaacacatgctcatggacttttttttctcctaaagcaagttgggctaacctattataatttgtttttctctcacatcagccccttttgtcactctagtaagatcacatttaaaaggatactaaaaagagaactacaggtgctttggctcttgatactacaaatcaaaaacaacgttagccccagttgggtggggggtgattagtacctgaaaaaaaatgggaaactgttccgagccaatttcagcatggactttagtttaagtctgagtttcaagtcccaaggaggcccaaagtttctcaacagtcactctccctaattattccacttacctccccacacacctaagatgcccgccctgactactgtccacagttcgggccatgggtagttggtgatggaaggacacctctgataatattatgccaaatgcgccctttttgccttccaggacctcctccagatctggctaacctgtctgaaaatgtagcaaattaacttactcctttccctcaaccctcccacagaggcctgtcccaggcttcaattacccctcaccccaagatgctgtgggggtggccctgggaaagcaggtgttgggccattctgccttgggtgtgataggacacagccatgccctgaactgggccctcgcaaactccctggggctctgcatgtcctccatggtggaagaggtttgcttaaggttggggggggggggtcagccgctcccagcattgtgaccaagttcccagatattggggccaaattgggttgccattcattaataatgctcacaataagattaaatcattctggaaaatctcataaaatccccctaagtacgctccagtggctctttccaatccccatcattcagcacttggggaggtttggaaggagaagaaaattggtttctttgcttttaatgctgctttgaaaagatactcagagtttttcatgcgtgacatgtcacatgtttaatgtggacttgctggaagtcagggggtctttagcgtgtgatatttatggggaatattaagtgcagaatgaggtccctccagctggggaaagttgaaagaataggaggcccaggactgggcttgtttgcagcatcagaatgacataggattaagagtttgtaaaacaaggcgaggggttctcattggccagtaataaatgtaatccttggaggtaatttcacgcaatttgcttctgttccatggaagggtcaaatgagaaaaaatgacttaaaaaagagttcattaacaggaagaatggtactgtttctcgtataccatccaactagcagcctagaggggggaaaagaagccctactaaacaaaaaggcaaaatcgacgcaaaattgatatcgaccacaacacacacacacacacacagacacacacacacacacacacacccaactcctttccctcagtcttctccagcagtcccgtctcctccccaaactctccagcggccctgaccaccccaggaaagcggctttcactcagggagagcctgtggatgtggagtctgagggttttagactctcagacctccagtaaggccctagaaagttcccaccgggcctactaaacccgggaacggagtgtgtggtaggaatggtagttggcggccgctccccataccccaggccggggcccttcttgcgagtgccgcccccgtgagtccagggctagcgttgggtggcggtgatccacccgacgacccaagtgccagaagcggccaccagccggcgagccggttccgtgagctctccaacgtttcgggcgggcggggtctccgggcgtctggacccggggttggagaggaggggattgaagttgggggtgaaggggggtgcaggataggaggcgagcccgggacgtgcgggctccagcgccgaagctgccgggcgggctgcccacacccaggtgggcacagcgcctggcaggccgctgacctctgcccaaccctgcaccctcccctcggccgcgcacacttgcgccctgggccgcgaggggacccggcccccctcctccagggcgcgcgcggagcccgacggccccagcccagagaggcacccgcgccccccgcggcgaccgactggccggcggcggcggcggcgtggcggggctgccggccccagctccgcaatcgcggtagtcacgccgcggcacccccgcacccctcccgcctgcccctctccccaaaggtccggcgcgctaattacagcaaattgaaactaattaagcttctcttccctttcccatcaccctgggagcgtcggcgagacccagcccccgcgggcgggcttccaccaagcggtcacccggaggggcgcgggcagggcccgggggagggagaagctgcggtccccgccgcgaggagggaggcgtgcgccgaggtggttaaggattgcaaatctgtttgggtctcctcacgaaatctgagttgttt

SEQ ID NO: 93724 - DNA, 13281 bp, Homo sapiens
aaaaaaagtcaaattcatagaagcagagagtagaatggtggtcaccagagactgggggtgaagatggggaaaggagagaggttggttaaagagtgcaaagtttcagttacaccgaaggaataaattttagtgatctattatgcagcatggtgactagagttaataataatgtgtcatatatttcaaaattgctagaagagtagattttaaatgttctcaccacacaaaaaaatagtaagctggtgaggtgacggatgtgttaattagcctgatttaatcatatcacaatatattcatatgtaaacatcatattataccccattatatctatctatctatctatctatctatcattactatttgtcaagtaaacaaaataaataaataaataagtaaaatgtttttaaaaagagtaaaaataaactgttttctctgcttacatgttggtgatggccatgacgcccacgctgaaggttgtgggttcaccggaatgagggcaaggaacacctggcccagccagggcggaaaactgcttaaaggcgttcctaaaccacaaacaatagcatgagtgatctgtgccttaaggacatgttcctgctgcagataactagccagatccatccctttatttcagcccatccctttgtttccctgtaaggaatacttttagttaatctataatctatagaaacaatgcttatcactggcttactgtcaataaatatgtgggtaaatctctgttcgaggacctcagctctgaaggctgtgagacccctgatttcctactccacaccctatttttctgtgtgtgtctttaattcctctagcgccactgggttagggtctccgtgaccgagctgttctcggcaatttcttcaaactttattgatttttgtcctagatatggttcaaacattcctacttcttcacatgagtagaaattttgcattgtatactggatttcagctattttcttgagtatctggattttgttgattcctcaacagggttttgagctctgttctgaaaggcaggcaatttacttgagaattagtttaatccttccaagtcatctttataagatttgtttgggaaagtcttaagtggtgcttccctccttcatgctaaattagccatcttcctaaattatagcctttctcaggcctctattgtgtactctgggtgttcagtacattctctctgctcggggtggtcaggactcaaatgtccctgaccctttcactagccctggaaattgttcatctcacagcacactgacagtcattctttccctggtaatagttctttcctgggcaggtgcagtaaccctgtgcatgaccagttcagtgtctggcctactatgcagatttctggatcttcttttcaacaccactctcttcttccaggaaaattctgggcatctcagggttcttgaattatggcctctttctcctcacctccttgagactgctgtgctctgtctgggccacctatcctcacaccaatatgcagaatgtgtgtctgtgcagaaatccrgggtgtttatgggtctcactgtatttatttcccttctctcagggatcacagttttggaatacctattgaaaatgtctaaaaacagtcacaataaattttattttgttttgtttttaaccatgagagtatagttaggtaccaatgatctcatcatggctggaaatttctcatgtttcattggcaagagtccctctcccacatgaagtgtatctttcctgagatcaagaaaccttcattcaacatctgaacaaaatcagcattctaatgagatttttcaaaagaaggccagtggtatgtggagtcaggaagatacttgttggtgagggggccattatatttttcatcatagataatcctactttattctctggttacttttaaggtttccctcttttcccttttactatgatgtaaccattgaggaagtatttttatcctgcttaggattcgttatttctctctcatctggatatggatgtatttaattaattattgaaaatttcccactattaaataagcaaatattgcctcattattctctttattttcttcctttggagagcctagatgtgaattagaccttttccttctatctgtcggtttacgactgtctttcatatttcttttatttcaggctgcattttgtgtgaattctcagatctgtcctctgtttacctagttgtcacttcagttgtgagtaatcagatgtttaagctgcccaacaagtttataacttcaacacctcacatttttcatttctgtaagtattatttggttcttttcaaacttgccggttctttccccccaaccccgcccctattatcctctttttcctggtataatttatcagttggtttgatctgggctttaagtaataaaagaccaagtgcaaattatttaaaccataagtttactccacacaataaaaacttcaaagatagggcagctccagagtagttaaattcagtggatcaattatatcatcaaggactcagggtctttccatctttctgttctccatccttaatgtttggctgtgccttgggcctttcctctcatggttcacaagatagctgcagcagcagctccaagcacctcatcctcacatagattgtctagtggcggaaagaggatatcacttcaaatgtccctgtatatgaaccaagaagacttttccataaacttcacagatttttcctcatgtcttgttgactacaattgtgccacacactgttcttaaattataaggagatggagttaccatgactgatttacaccaatcacgatctgtctcctctgactgggcaggaacccaggctcccctgaagctctagctgctttaaaatctaaacaaaagtataataacgtctgtgataagccagaaattgggagaaataactgtttggtaagcaatcaatagtatttattatagcatttattcctttagaaaaatctatataaatactaacaaatacttcttttaaagaattgttcagattattttattacttagggtcatattcttaaggtcataatcctcctacattatcttttgactgtctcagagtcaatcacttccccatgaggcatgtaattttcttataatgagctagcaattgttttccctggtgggaattttataagcacagagccataaaagtggtctgtgtttttattatgtttgtttaaatgtttacttcagctgaggtttccctaatccaaaacctgttttatttatttgtttttctgagatggagttttgttcttgttgcccaggctggagtgcaatggcatgatctcctctcactgcaacccccgcctaccgggtttaagtgattctcctgcctcagcttcccaagtagctgggactacaggcgtgcgcctctatgtctggctaattttgtatttttagtagaggcgggatttcaccatgttggccaggctggtctcaaactcctgacctcaggtgatccacccgcttcagcctctcaaagtgctgggattacaggtgtgatccaccacacctggcctgaaacctgtttttatactaacatttcaacgtaaggaatgtcatactaaatgtgtaatatacatttttattccaccctatgcatggtccaaatgtggggctttgatttcttacagtagacatgtttaatttctacctggaggctcatagggtcaagtgctcttttggtcacccagaaccaggtacatagtttttttccgttctccttttccagaagtggcagcccttccagaatcctggttttatctagaattatccttctcaacaaggctgttttcttgcccaaatctaaggaaatctgatccccatgggagctgtgctatggtggccattcacatcatattgtagctcctctaggctggtgggtgcttgtagcctctagaaactgtattccatctgagctgtctggagaatttcctctttgttttgagctgttaagtattgacattttttttaacccatattttatccagcagttcaatgtgcttgtgattgagggagaggggtccatattagttcatttaccatattaacaaaatgtttttaaagcttttttgaaaaacttcatttaatccacctaataattatttttttcagatgataattgggggtgtggatatttagaaaagctacttagaaaagttttgtctgttgattttgtattctgtgtatcttgtggaacaaataaaagttcaatttttggggggttggttttctgtatagtcatattgcctgcaaataataattttgtctccattttccgatgtgtgtacctcaaaacagttttcttttctgctttatttcattgtctatgattttctatgatgaatagtagtagtgttagcaatcaatacgtctacctttactggaggcgattctaagttgctttttttttttttttaatcaaattgtgatgggtaggagatgcaccgcccacccccttccaaggaatgacttgctgctacaattccttcggggttttcctcaactacagggagctgcctcagccaagagtacacccttcctgcagtgctgggcatccaattattgatcgaggcaggggtataaaagccagattttataggttcagtgcaggacaccgctgatgggctctctctctctttctgccaaatcctgctgccttctcccttccacagggagtgaatcctaataaatatcttgcacattgaatgctgtttcagcatctgctttcagataacgcaggctgaagttttcttttcctccaggttgtttagagtttataaaacaaaaaagaatctcactgaattttatcaaatgtttactaggtgtctagtgagataatcataaatttcacttctattggtcaaaaatgtaatgaattatactgttagatttccattcttaaattcttggtggaaaatctacttatttaattagaagcatttttaaaaatattctgctatactttagttgctagaaagttattaagaattcttgcctctctgttcataagtcatactattctgtaatttctgtttgtttattttaattctattgtctttgtgagctttggtagcagggttatgccagccttgcaggataatttgggggaactttgtatttttaataatgttctgagagagcttacaaacacagaggttacctggttcctgaatgtttgtttgcactcagctataaaaccatttatgtctggggtgttttattagaaagaggatgaagttttgattatcatgaaggtttttgttttgttttggttttcttttctcttttttttttttttttttgagacagagtttcgctcttgttgcccaggctggagtgcagtggcgcaacctcggctcactgcaacctccctgtccccagttcaagtgattctcctgtctcagcctccggagtagctgggactacaggcatgtgccaccatgcttggctaactttttgtatttaggagagatgtggtttcaccatgttggccaagctggtcttgaactcctgacctcaggtgatccactcaccttggtctccgcaagtgctgggattacaggcatgagccactgtgcccagcctatcttgaagttttatctgtggcctttcttttgttttccttggtgattaatatttttctagataatcatctgtttcctctaaattttaatatttattttcataaagcttaacatattattctttttaatttttaaatgttcttgattgtatttatattctatttcccttcctaatgagtttatgtgtgtgtcccttcttcctttttttcttgatcaatcttaacgaagtttgtctatttagttttattatactcaaagaataagcatttagtttccttttaagaactattaatttccactgctctgtcacctgccaccgctgcccaagcctgagtggttcactacaccatgaagacagattccagatgccggcaactggtgcttccaatcctagacgctatgtccagcaaagactccatggttctggcctacagtggggcctggacacctcctgcatcctcatgtggccgaagraamaaggctatgacataattgcctacctagccaacattggccagaaggaagacttcgaggaagccaggaagaaggcactgaagcttggggccaaaaaggtgttcattgaggatgccagcagggagtttgtggaggagttcatctggccggccatccagtccagggcactgtatgaagaccactgcctcctgggcacctctcttgccaggccctgcattgcctgcaaacaaatggaaattgtccagcaggagggggccaagtatgtgtcccacggtgccacgggaaaggggaccgatcagttctgatttgaactcacctgctactcactggccccccccsagataaaggtcattgctccctggaggatgcccgagttctacaactggttcaaggccttcaatgacctgatggaagaatayacaaaagcaacacgggattcccatcctggtcacttccaagaagccatggagcatggaacagaacctcatgcacatcagctgtgaggctggaatcctggagaaccccaagaactaagtgcctccaggtctctacacgaagacccaggacctggccaaagcccccaacacccctgatattctcgagttccaaaacggggtccctgtgaaggtgaccaacgtcaaggatggcaccacccaccagacctccttggtaccttggtacctccttttcatgtacctaaacgaagtcacgggcaagcagggtgtagccatactgacatcgtggagaaccgcttcattggaatgaagtcccaaggtatctaggataccccagcaggcaccatcctttaccacgctcatttagacatcaaggccttcaccatggacctggaagtgcgcaaaaycaaacaaggcctgggcttggaatttgctgagctggtgtataccggtttctggcacagaccagagtgtgaatttgtccgccactgcattgccaagttccaggagcgagtagaagggaaagtgcaggtgtccgtcctcaagggccaggtgtacatcctcagctgggagtacgcactgtctctctacagccagttgctggtgagcatgaaagtgcaggatgattatgagccaattgatgccatcaggttcatcaacatcaattccctcacgctgagggaatatcatcgtytccagagcaaggtcactgccaaatagacccctgtacaatgaggagttggggtctcctcaatttgcagatcccccaagtacaggcgctaattgttgtgataatttgtaactgtgacttgctctccccggctggcagcatagtggggctgccaggctccagctttgttccctggtccccctgaaacctgcaaacgtcatcattgaagggaaggggcggggcagatggagtggggagctataaaattacaattaaaaggaaaaaaaagaactattaatttcctttttattttattgatttcttctcatatctttattgatcacttcctttctttgtcttgttttccttttattttttaatcattactatttagtaataaatgtgtttctctctgtatctttggccatatcctattgatagcacatgggcttctgataatcatttatttacaattaactggtaattgagctttttaaaatctgcaaaccatgatttgcttagaaaactatttttaagtgccagttgtatgtctgacttaaacatagacatataataccttttaatattaatttttaagttatatttgattattgtcaaagaacgtaacttagtatatttccctagaatctactgagttttttaaatagcccaatgtttggtccagagttatatatttttcaaggctattcagaaaacagcccagaggtctttttttcttttttaacacctattatgccatgaattcatagggaataggttccagcagctcatagctccttcccattggttctcacaaagtgtgcttctctgggtggagcaggctggcgcttcatttgaacccaggtaccttctctttggcttctttctttttctgatcattttccttcatgcgtttcagggagctctctcagctctcagagtgcttaatgtgctcaatgtgcacattaattctctcggcaagaatcttgcccttagcttgtttgtttataacaatgccaacagcatgctggggaacattgtagactcttccagtttagccatggtgacacttgtggggcattcctttttgaacagtacccattcccttgatgtcaacgatatcacctttctcgtagattcacatatacatggccaaagaaacaactccacattttctaaaaggcctagagaacatatatcgggtgcttctcctctttccctttgtgttcgttgtcaggcctctgagcccaagctaagccatcatatcccctgtgacctgcacatacacatccagatggctggttcctgccttaacagatgacattccaccacaaaagacatgaaaatggcctgttcctgccttaactgatgacattatcttgtgaaattccttctcctggctcatcctggctcaaaagctccctgactgagcaccttgtaacccccactcctgcctgccagagaacaaccctcctttgactgtaattttcctttacctacccaaattttataaaatggccctacccctatctcccttctctgactcttttcggactcagcccacctgcacccaggtgattaaaaagctatattgttcacacaaagcctgtttggtagtctcttcacacagacacacatgaaatttggtgccatgactcggatcaggggacctcccttgggagatcaatcccctgtcctcctgctctttgtgccgtgagaaagatccacctacaacctcaggtcctcagaccaaccagccaaagaaacatctcaccaatttcaaatctggtaagcagcctctttttactctcttctccaacgtccctcactatccctcaacctctttctcctttcaatcttggcaccacacttctatctctcccttctcttaatttcaattactttcattttctggtagagacaaaggagacatgttttatccgtggaccccaaactccagctccggtcatggactgggaaggcagccttcccttggtgcttaatcattgcaggggcacctctctgattattcacccaggtttcagaggtgtcagaccacgcagggacgcctgccttggtccttagtggcaagtcccacttttctgggggaagggcaagaaccccaagcccttctctccatgtctctatcccttctccacttttctgggggaggggcaagaacccctcaaccccttctccttcacccttagcggcaagtcccacttttctaggggaggggcaggaaccctgacctcttatctgtgtgccccgatcccttatttccacaccccaacctcttatctctgtgccccaatcccttatttctgcacctctaccccttgtctctgtgccccgatcccttatttctgcaccccgaccccttatctctgtgccctgatcccttatttccatgccctgaccccttatctctgtgccccaattccttatttccatgccccgacctcttatgtctgtgccccaaccacttatttctgcaccccaaccgcttctctgcttttctggagggcaagaaccccccaccccttcgtgtctctactgtcttttctctgggcttgcctccttcactatgggcaagcttccactttccattcctccttcttctcccttagcctgtgttcttaagaacttaaaacctcttcaactctcacctgacctaaaatctaagtgtcttattttcttctgcaatgccgcttgaccccaatacaaacttaacaatggctgtaaatggccagaaaacggcactttcgatttctccatcctacaagacctaaataatttttgtcaaaaaatgggcaaatggtctgaggtgccttacatccaggcatttttcacacttcgttccctccctagtctctgttcccagtgcaattcctcccaaatcctccttctttccctcccacctgtcccctcagtcccaaccccaagcgttgctgagtctttctaatcttccttttctacagacccatttgacctctcccctccttgccaggccgagctaggtcccaattcttcctcagcctccgctcctccaccctataatccttttatcacctcccctcctcacacccagtccggcttaccgtttcgttccatgactagccctcccccacctgccagcaatttactcttaaaaaggtggctggagctaaaggcatagtcaaggttaatgctcctttttctttatcccaaatcagatagcatttaggctctttttcatcaaataaaaaaatccagcccagtttatgactcgtttggcagcaaccctgagacgctttacagccctagaccctaaaaggtcaaaaggccgtcttattctcaatatacattttattacccaatctgctcccgacattaaataaaactccaaaaattaaattctggccctcaaaccccacaataggacttaattaaccttgccttcaaggtgtacaattaatagagtaaaaagttgcaattccttgcctccactgtgagacaaaccccagcccatctccgcacacaagaacttccaaaagcctaaactgcagtgccaggcatcctccagaaccacctcccccaggagcttgctacaagtgccagaaatctggccaccaggccaaggaatgcccacagcctgggattccttctaagccgtgtcccatctgtgcgggaccccactggaaatcggactgttcaactcacctggcagccactcccagagcccctggaactctggcccaaggctctctgactgactccttcccggatcttcttggcttagcggctgaagactgacgctgcccgatcgcctcggaagctccgtagaccatcatggacgccgagctttaggtaactctcacagtggagggtaagtccgtccccttcttaatcaatacagaggctacccactccacattaccttcttttcaagggcctgtttcccttgcctccataactgttgtgggtattgacggccaggcttctaaacctcttaaaactccccaactctggtgccaacttagacaatacttttttaagcactcctttttagttatccccacctgcccagttcccttattaggctgagacactttaactaaattatctgcttccctgattactcctggactacagctacatctcattgccacccttcttcccaatccaaagcctcctttgcgtcctcctcttgtatccccccaccttaacccacaagtataagatacctctactccctccttggtgaccgatcatgcacctcttaccatctcattaaaacctaatcacccttaccctgctcaatgccaatatcccatcccacagcatgctttaaaaggattaaagcctgttatcactcgcctgttacagcatggccttctaaaacctataaactctccttacaattcccccattttacctgtccaaaaaccagacaagtcttacagattagttcaagatctgcaccttatcaaccaaattgttttgcctatccaccccatggtgccaaacccatatactctcctatcctcaatacctccctccacaacccattattctgttctggatctcaaacatgctttctttactattcctttgcacccttcatcccagcctctcttcgctttcacttggactgaccctgacacccatcaggctcagcaaattacctgggctgtactgccacaagtcttcacagacagccctcattacttcagtcaagcccaaatttctccctcatctgttacctatctcggcataattctcataaaaacacatgtgctctccctgctgatcatgtccggctaatctcccaaaccccaatcccttctacaaaacaacaactcctttccttcctgggcatggttgaatatttttgcctttggatacctggttttgccatcctaacaaaaccattatataaactcacaaaaggaaacctagctgaccccatagatcctaaatcctttccccactcctctttccattccttgaagacagctttagagactgcccccaccctagctctccctgactcatcccaacccttttcattacacacagctgaagcacagggctgtgcagtcggaattcttacacaaggaccgggatcgcgtcctgtagcctttttgtccaaacaacttgaccttactgttttaggctggctatcatgtttctatgcagtggctgctgccgccctaatacttttagaggcccttaaaatcacaaactatgctcaactcactctctacagctctcataatttccaaaatctattttcttccgaacacctgacgcatatactttctgctccccggctccttcagctgtactcactctttgttgagtctcccacaattaccattgttcctggcccagacttcaatccggcctcccacattattcctgataccacacctgaccctcatgactgcatctctctgatccacctgacgttcaccccatttccccatatttccttcttccctgtttctcaccctgatcacacttggtttattgatggcagtttcaccaggcctaatcgccacacaccagcaaaggcaggctatgctatatagtacaagccactagcccgcctcttagaacctctcatttgctttccatcgtggaaatctatcctcaaggaaataacttctcagtgttccatctgctattctactactcctcagggattattcaggccccctcccttccctacacatcaagctcagggatttgccccgacccaggactggcaaatttgctattctattacttctcagggattattcaggccccctcccttccctacacatcaagctcgaggatttgccccacccaggactggcaaattagttttactcaacatgccccgagtcaggaaactaaaatacctcttggtctaggtagacactttcactggataggtagaggcctttcccacagggtgtaagaaggccaccacagtcatttcttcccttctgtcagacataattccttggtttggccttcccacctctatacagtccgatagcagaccagcctttatta

SEQ ID NO: 93725 - DNA, 19031 bp, Homo sapiens
cctatttaggatttttgaaatataatagcaacattcattgctgctgtggtagttggtagtactgatgcttctcaatgctggtctgtttgatgatagcaatacccaatttctcagtacatttcctatatgaatacagtggcactgcagctttcttctgaatttctgaatacgtagccaaaggctatagtcatatttccttttgttaacaatcctgggtcatccaatattcatatctattattgtctcataataataaattaggatctaaagcaaacaagattaacttataaagtagctgctatatttcttccaagtgactcagaagtaacatgccttgctgtttattgtttctatttaaaagtggaatatgctttatgttttgtgggcatatcaaatgttttactcatttcttgatatcattttatcatttctgaaatagacatttggggtgttttctgctttgtgagaggcatttttgaacaaatgccaggttttagtctttgtttttatgattataaaccacttcattggtgaacagccagaggagctgagctctcagaaagctcccaaatctcctgagtgtgagtctctgtgtgctggctgcatactgactgtgtccattttactcaactccaaaacacttgcctgcttcctgctcacccctgtggctctgtgccagtcctcagaacgtgtttgtgagtaaaggtatgtcctttgtctacactgcattcttggatgactgtgctgtcaaacgagaaatggaaaagcccctctgccttactttgtttctctgaataatacaaatattgcagatgatgcatcacattatgaattttcatagaatactgcaatgtatttgattctgtttaattctcaaaatagccctctggatattatttccattttagaaagacggaattgaggctcagaggtggcaagtgacttgtctgagattattttgttgtaaatggcacttccaggcccttaactcaggatttctgcctttctgcctcctacctctgcatcacagctgcctcaacctgttgttaattttatattaagctgtattaattggggctaggagtcttcataatgctaaatgtaaattctttgttttgttcaatgttcttattttatggttggcaaacaaaaacaacaaaacagcattgacaacaacaacagaaacaaccaactgaagctgcagcttttaatctttctaaagacaataggctaaagtgaggtcctcataataagatgctagtcaccaggaaggaagccagggaaaatctcctcccagggggtaattgatccctattggcctaacactgcatgtagcactgagttaggaggctccatggagaagtgtctgcttcttttcctctgctgtcagaacaaagttcacaaacaactttgttttccccacacctttggagttagctagttagggcccctatttatgtccaggggaccagacctggacatttgtaaaagaactgaatatagatggatagctaagaaaaaaacaaatgttaagattatcattatttatagcccaatgatttagtaatctaaaaaaatccaagaacaacaaaataatccctaagaaggacaagaattttaaaacatgcagtttagaaaaccaaatttctcaggcctagagctcaagtaaaagaaaatctgagataatgaagtctggaacactgggcctgcattctgctcctgactctgtgcccttgggtaagacattgaacttccccaccccagattcatcctacaccctaaggagggtgtaggattttgtagccttcctagtgatggcatactattaatcagaaccttaaccagctctattctcactatcccagtaaaatgatgttaaaaattagacctcgtgacatgagagaagaggggaaattaattacagattacaaagaaattgtgggatctaagtttagggtgaggtgttttattgaacctctagggttggtcatagcacctgccatatagcaggtattcaataaatgatgtgtaatgggtggttagactgatggaaaggcaggccttcccagtgacggtaaaggacctggggcaaaagagacctgtggttgagtcctgatccccacacattagcacactgactagacgaagttataagcttcaatttcttcctgtgtaaaatggagataatacctcatagggttatgaggattaaataagaaaatgcttagttcagtgcctaatacacaggaagcacaccgtaaatattagttattattattactaatactgtgatcatatcttccatccaaagacttctctgaggagcagggggcatccagagataaaaagcctgcaggtgggaaatctgttagccttctagggcgttaggtttctgtggaactctgcacctcttccctgtcctagttcttaagaacagaaactctccagggacctctggtgaggtagccgtgggaagatgaggtgcagaagtaagctgggacctgtgagcctcaatttcggcctcttctgcgctgagacccaagcggatcttgcttggcctgtatgcgttactgggggaaatggacgtgggcctgagcgcggcaggtgcgagggcgctgccccggggccgaccaccctgcggggacactgtagctgtcattccttcttctgcaggcgggtaggggaagcggtggccaaagtgggagtcgaccgctcagcacagtctgtctgagtgttgaccaggaaagtccaggctctttctaaatctcgccgccagacctggtgacgcattcgcatgtatttaaggcgtttgcacgcagaacgttatcacagaatgtagccacctttcttaacggtccgggaaaccagaggtctctccagctactcagggtagaggaatttctcctatctccatgtgacatcttctgatttagaagaactaatgttagatttctcttgggcctttccacctacagctatagtcttccctttgtttagctaaaattgaggcaggtaggaaaatattattgggggcataagcctattagtgtgtaaacgtatttttatgaagtgtgcctccagggagccattaaaaactgacctctcaaccacagaaatagatgagattttgagaacattgagaagctgccttttgcaaagtaaatttgcartggtccttgacgaaggggggtcgggggcggggagaagtccagccgagagaggagctcattccacgctatatttttgcagttgaaaagctgcctaatcatcgctaaccgcttcccgcataagagttctgggaagacttcagaaacaaggcaaatgaagacttttcactgcctccttcgggctgtcgcttccggaagccgaagtcctagcacgcagagcagcaggagagggttactttcaggcaattccactgagcaaaataaatcacttaatggcataacgttctggcttaaaaaattggaatttatcagaggcaaaaatatccttcaagaaactatggacactccgcgccctattcatttccatggcagcagagtatctgcatcttgagccacctatacagattcatgcctcgtatcgctctcacctcctttctttttgaagtaaagccctttcccaagaaggcggccagaaagtggaccccaccgggggaaaaagaaaaatgaaacgcaaatcagcttggcactgcttgcgtcttccaaaacgcggtgggacaaggctattgagtctatagctaattctttcatgtatataaaatgtatacatatgtatatatttttatatacataaaagaattcatatatatgtatatagctatgtggagccctgaagcaattctccatgcttttgtctccctcaagttccccaggtggaggcagtcataagcattataagccgccttagtgaccaccagggacggaaaccgttaattatcacgtttcctttcatctccaggggccctttggcccgtgacacaagaggcttcggtattggcgctttcccagaactggcccagaggagccagttcagagtgtgaggtcgggtctgcattgaacgtacacaccgaggtctatcagactcccccgattttagcgaagggtgctgactgctgtgctgctagaggctagcaagctccctgtgcgcagctgatgagtttcagcaactcgccacctgggcgcttttctttaaattttgggagtaaactgggaaaataaaaaaatctccacgtccactggctctctccccttctccaacttcctctttcgactcgtttgtgggagttttctcctctttgctgggactataatgtgatgcgcaatcgtttgtgaatgaacaaaagtcaccggcaagcagggagacggggacagatcgctgacggcagattgagggtggcagcaaaggcccggcctccaaggataatggggagccgttttccctcacgcctggtctctatggcccccttcgtcttccaggtaaaatgaatgttccttcatccatcatccgcagagtaccctcaggcgtgcgtagaatctgctgatgaaacctattagcgccgactgggcagctttgtggagccacccgaggctctccattgtggcctttgtctgcagaatttaagcatttacataatgcattagcacggaactcagcacccggtggggacatcgcgtgccaagcctggcgcggccaacgcttcagcggctccctcacccggcagctccctaggaccaccctcgaggaggcattggagtcgggctgcaggcgcacgggcaaagaacttagcatctcatccaagtacttcgccttccttggccgtctccgggaggttatgcttaaaaacataaaaataaaaataaaaataaaaataaagggaggcggacaaagtttcggtgggtgaactgaagctgggtccatgtgaccctgaagccggagaaataaacttaacatgaatcttgctttcctggcgggcgttgggaccccgccgtttttcatgccaaccgttggaagcttcgtactcaacggccacaggtgcctaggagcgcagagaggcctcgggttcaaatcaccggcgcgcagggactggactcgcgggtagcgacccccccaaccccccccccsccgccctacacacacaccctcgcgccggctgaaagcatggaggattcagggcatttgaaaaaagaggggctgggcgcggtggctcacgcctgtaatcccagcggtttgggaggtccagaagggcggatcacttgaggtcaggagttcgagaccagcctggccaacaccagcctggccaacatggtgagaccccgtgtctactaaaaatacaaaaattagccaggcgtggtgcctgtaatatcagctacttgggaggctgaggcacgagaatcgcttgaacctgggaggcggaggttgcagtgagcccagatcgcgccaccgccctcctgctctgggtgatagagcaaggcactgtctcaaaacaaaacaaaacaaaacgaaagattcggtcaggaaagaatctgcaggcattcgaggcgctcgcactttgcaaagtaaatgcaatctctttattaagccgaagtccctcatatctatccttttagaggaaggtggtccaactcagaaatctctcccaagaggactttccaccgaagactaccgcgaagtgccaggaactcgccccagtcccgacaggtgcaggacctttcgtgccgccacaccttgggactctacctccctaaataggccacttaaaagccagtagtgcaaccgggatcccgcggcgataaagaatcactgtgcagaaccctggagctgggagtcggcccgcccccctcccaaagaaaccgggatcccgcgtcctccccgccgctagcgcagcgcgccagcggcgcccaatcagtgagctttccgggtctgtgacggccttcggctccgccccctcgacggccataaaaagtcgcagcgaagcctgcacctccgagcaccgcgcgcggccctgcccccggcacggcccccaggtgcgctccttctccggctgcttgtagcactggtctcactgtccccgccgtcagccaccggttccttatccgtctcattccccattgtggcttggctgagccggtcgccaggcctcgctgtcctcctttrccttcctctctcctcagcggccgtactttgcgccgtacctcacctggcctgcaggtgagcagcagcgcagcacccctgcccggcgagcttaacttgcccagcccggcccctgccggagtggcaccggcacctctccaagacgccctcttccctgcaggatgaagaaccccatgctggaggtggtgtctttactactggagaagctgctcctcatctccaacttcacgctctttagttcgggcgccgcgggcgaagacaaagggaggaacagtttttatgaaaccagctctttccaccgaggcgacgtgctggaggtgccccggacccacctgacccactatggcatctacctaggagacaaccgtgttgcccacatgatgcccgacatcctgttggccctgacagacgacatggggcgcacgcagaaggtggtctccaacaagcgtctcatcctgggcgttattgtcaaagtggccagcatccgcgtggacacagtggaggacttcgcctacggagctaacatcctggtcaatcacctggacgagtccctccagaaaaaggcactgctcaacgaggaggtggcgcggagggctgaaaagctgctgggctttaccccctacagcctgctgtggaacaactgcgagcacttcgtgacctactgcagatatggcaccccgatcagtccccagtccgacaaggtatgatgtgtgactcccaggggaagtgggctccgcggagatgccccctcccatccctgaccttttctcttccccgcgagtagggatctaattcctggacacctcccctaccacttccataccatcctttttctttttccttttttttttttttttttttttttttttgagacggagtctcgctctgttgctcaggctggagtgcagtggcgcgatctccactcactgcaaactccgcctccaragttcacgccattctcctgcctcarcctcctgagtagctgggactacaggcacccgccaccacgcccggctaatttatttttgtatttttagtagagatggggtttcaccgtattagcaaggatggtcccgatctcctgacctcgtgatcctcccgcctcarcatcccaaagtgctgggattacaggcgtgagccaccgtgcccggccttccataacattcttaaagttctagattaagtaaggaaagttctggtgttcctaaggtaggctaagtaaataagcaaawggcaacgtgccttgcaggatatctcgaaatgcttagagaaaggatgtggcaatgcaggaccgcttccagagattccagagctgcccagtattgctgcagaagtcatcaggtgtccacccacagtgtagttcaaacgacaaagggcaagtgactgggggtgggggatacaaggaatcagtcaccgctgcttgcaactttaaccaagaatttcacttgaaaggaagaggtccagagtttatatttaatccataacactataaacaaagtgtgtgcctttaaaataaggaaccatgcagttttctccctttgaaagctgcatagagggatttttcattgcttgctataagctatcaaaattcccagtaagagggcccccctggtagktcccttattctttgtgttggtgcttcagagttgtattttccatggtattctgaattctttctgggttggctttgatcctcatctagacttcattgttaagcatcctttacccattagccctgaaggtagattacattgtttatgggttccccagagatcaatacaattagttttcaagaagagatgttaaacattggaaggtaatttttatgagtattttgaaaaaatactcatgattattaaattagccacaaatccaaagggaaaaatggatttttatttccttttaaaacctcttaacttttaaaaatagttaagattttaagcctgaaacttcacttacaattggaaactttctcagccttcattgcacttgttaaagaagtcattgttaatgttcagtctttataatggaaacctgggcaataacatatgagctttagtgttactcttcatgtttagatatttttgggaccagaaaaagctaagtcagtttttttcatgtaaccagtttttaattgctccacatcttggttaatttttttgacccatttgggaacatctttctctatcctctgtgggagagcatggaagtattttgcttttatagatcggtgtatgaaactccttatagattttatagagccacaaaagactcaatctaggaattcttttccaagtaaaataaaaatacagttagagcactgtgcagcgattcaagaatcacagctctagtccaggcctgtttagaaatgaactccaccacatttacaaacacgggctcccaaagtgtacaaaaggaaacatgtcagatttacttaggaaccaagcaaatcatttctctaaggaaaaacagtatttctatcaggtaattaggagttaccctttcatggaacacatatagcgctgcattatatatttctacagaaaaacagtaactagtgcttttgtaaggtagtaaaatatttaatctgcataaataactagttggagtagtttttcatctttggaaactttgttagggtctacagaagtagagaagtgttttaattgctgttgctgcatagcacctcttgtgaaactgagttttgtcttcactttgaatggtctaacaaacaatttggccacagagtagatttcccgggggaaaaaaaaaagttttcatcccaaatttcctaattctacaaactgtttttgaacatgcactgagagaagtaggtcattaatactgaaggaaggactggtttctactttttagaaacataagaaattatttgattctgggtctgattgctgagttctccatatatgcaactaatattaacatgagagttacaaagttgcctcttacttaaatttgagttaataaaaactctcaagaacacactacccctaaggaaaacactgcaattagtttgcaaatgaatgaactggaaaagaacatttactcctttgtggtaacactctattttacaagtttagaagtcataaaataatgggatttttataatactgttgacaatcagtattttgtaaactaaaaattcctttggttaataactattactattccttatgctttttctactatgatttttttttactttgttaatactgctctttcattgccaaaaatgattgcaaatgccccttttaatttgtgtggattgagtgctcacaasagtgttcctacagacttattgaccccttctagaaatttcctactgttgagcaccactaaagatgcctgctggtctgctgaccaagtgaacagraacagggtattagacatgagttgctttttgagaaaaatctgcttttgtgggaaatacagtcgaaaatgattctgattgacttaattataaattaccaaggaaaaaaataaggataactgtatttacaacttagtcatttacaaaaatatgtcttccatcaacctccttttctccytgtcctgaaaacttcaatttgatctttaccatcttaaaatagtatacttctcaatgccttgctagtttattaaaaaaggacaaatagtatgtctgatagaaaaataggccaacatctagataagtttcacacttgtttaggtaattgtgtaaaagtatggatagagataaccatactgtcaaagtggtgtattaaaacatattgaacttgttcattctatcacttaataatttggaaacctagctgcccagtaccatgtaagccactgtagaaaaccctaaaagaacataaaatgccatgtctagaaacagagcttaaaattagtatgaatagcaaaacccatatagaaatgactgacaatcactgcattctggcatcaacggcaatatggtagagataactgtcaacaaatagagtactaataataatcactgtaataccttatgtttatacagcacgtagaagaatacagaggacttgtgcatcaaacatctcagttaatcctcagaacaatttgagtgttcccatttgactacttgaggtgacatagccaataagagctggagccaggactcagacataggccatcatttctaagtaaaattatttttctaaggaaaacattacacatattagaaggatgcattcctcaggggtaaggacaatatttgtctttttttccagcagccagttatktgtcacataattgatcctgaatttagcatatttagtcaggaaatgggatttgacaataaaattagactttctatgcctgtagattttgagacttataaaaaagttatcattggtatcattagattttagaatggcagattggaggaattgaatctacttttaattggccaaattctattatttttactcaagattagagacacctctttgctcatctaattttaaaatatgctattgttattgataagcagtttgatgttttaaacctttagycctgaataacyatgtggttatactttctatagttttctataaatgctgtatttacataggcaactgccattattagttgcctaagggatcatttctgctactatacggtatagaatcagaactggactcttaacattgtaaatttttttgtaagtcataagaaaaagtctagttcttctggtagacagaaaatagctgggaaaactgatttactgtttgatatatgtgattcttcttgggtttagccacctttcctaattttccaatattttattttccagttttgtgagactgtgaagataattattcgtgatcagagaagtgttcttgcttcagcagtcttgggattggcgtctatagtctgtacgggcttggtatcatacactacccttcctgcaatttttattccattcttcctatggatggctggctaacttcatacccccatgtcagtgtgtgtattctgtatgtaaatatgtttatatttatagagcatcaatcaatataagcattattgagaaaaatgtgacccgtaacactgtgttctggataaaaatgtgattaggaatcacgcaaagtgcttactgtgtaagcccaagaacaaaggctttctgaatcttctcaggcagttcagatttaaagcaccatccaaaccttggaaatacgacagggtgtggtagaattcagcaatatgagaaaaccagcccctaaaatgatagccacaagagattaattgtgtttttttttctcctgtaatccttgtactgttcggctgaatttgaagattggaagacttatattgagaccagtaactttactgtaaatttactttgtttcattgaaaaaacaaattgataaacatattaaactggaagaattttctttattcaaatgaaaacatgtttgatgactggtcaaaaaataagctcataatctatttttttcatgtagtatataagtcaagaatgttttattgtcattatgtgaaaccaatattggcaaatagtactttaatgatgaagtaaatgaccagaaattatagaaatctgtgttttcctgtaaaaatagcactatagtatcacttgaacaatttgatttggctttacttactaggaagcctggaattcattatttttttccttttatgtgccactgtggctactttaaatcactctgagaggtaaatggatataggattgaagttatgtgggtatttggcatgtgtgtgtgaaataaatatgtagatagtcacatatacacagactgagagataaattgttcttgattgctttattatcatcatactagtgtgttcattatagagtatctgtagaggtgaatgtaaaagtaagtccaatctattttcttatgtcattgaatttgtagtgttaacttgcatatatgttattggatgggttgtcttttaaagcatttactaatgtactctgaaatttttaaaagccttcagatttgttttctagtcacttttttccatatcatttctaattatagtttatatccttaaaagaaggatgccacagtagtatgtaaaacccaaacaagtagaacccaagcaaataaaattatttaaaataattttaaagtggcttagtactgccagtcatgtaaattgattctgctgagggtcttataagaattgagatataacaatggtaaaacaagcattcaagcacttttacaaaattaccaaattcttaaaatgaagccacagctagacttgcatttcaggtattaaaattgctttcttaactgtcaagaatcacaaaataacaaatcatattatgagtgaatatggggagggcggggccaatcagtcaatgataatctgaacaaattttaagagcagattttagattaataatgttttatcaccactaatttgcccacaacaaactcagtatttaatttttcaaattaaatattaaattatttaagtattttaaataattaaaacattaaatggcaacaccatagaatataggtgttctctggacctattctaaccacttaaaattatcttaagtatgcatacataaaagcaaccactatgagaactaccgtgttagtggtttttcacttactgtatattacccttgtaggaatagtttaaggaaattcatttcttaaaaatatagtgtcctcaaataattaatttttttgcaaactttagttattacaggcagcaaaaaccactgtctgaaactaaatctgtgttcaaagatgaagacccctcattaaaagccaaggacgttcttaagattggaactgacataattagtcttgacttacttcattaaagcaagattcaattccttgttcatttgagtgttcattatatgccaggcattgaccagttgcaattttatggtccagaattaatattattattcgtaaactagctataatagagtatatacagtgctgtgggaatacaggggaagaagcaattaaatctgctagaagggtaagagaaatctgtatgcaggaggcaatgctagcattaagccaagaaatagtgtgaggtgatcttatcacactgatgtgttcaactgtttatgggaaaaggaaactaggatggttttatttgtgaaatgttctacaacgctagaactgttgaacttcttgggagaaaaggagaatctttgttttgttgtgctgagtttgattagttgcttaaccaagtagaaagaaaagcacatcttcctgatcacagttataaaagaaaccctgaggccgggcgcggtggctcaagcctgtaaccccagcactttgggaggccaaggagggaggatcacaaggtcaggagatcgagaccatcctggctaacacggtgaaaccccatctctactaaaaatacaaaattagctgggcgtggtggccggcgcctgtagtcccagctactcatgaggttgaggcaggagaatggcgtgaaccgaggaggcggagcttgcagtgagtggaaattgcgccactgcactccagcctgggcaacaaagtgagactccatctcaaaaaaaaaaaaaaaaaaaaaaaaaaaaaaagaagaagaaaccctgagccattaatgtgtctcgtaacttgaggaagttcatgaattctctgggcttcatccattaagattcatccttatgctcctgcaagtttcttatatttatgtatttctattctgatttctgaaatgataacctagtagtgtctgatgaagttttttcatgcttattttattctttgtcacagatgaaagaagaataggactaattggggctaagatgaattaatgtaagtgtcagatactaggcaggtgttagggatgaaatgatgaatgaggcatggacctgttcctcagagtttatggcccagtagacataattgtattaggactttctgcagttgacatttgcataaagctgactgactgaaggaacagaaagtgagacagacagatatgaccaaatttatacaaaccatgtaccaacacttgaaagatgggtggatattttccaggaaacagattttgggcaggacattccatgcactggaaatagcatgaacaaatgcatgaaaattgcctacaacatgcctggcacatagctgtgaggtaccctatgagttgttgacttgaaaacatggaactgcacagggcattcaggcaagtgcaagtggttcaggggccagcgcagagcagagtgctgagtaaagatgtcagaaaaggaaagcaatggtctggtacaagtcttgtatagaacaagaagtttagacttttgaacaggcaatcgagatttggggttcagaaagataaatcccaaaagtatggagaacaaaggaactcattttaaaggactagctaagatgctcaatctctaaaaaaaaaaggatctgtattcgtgagagtagagagaaaggttgtttaggaagagtcaacagactttagcaaaatccttttatttgattcatgcataactcctgatggagtgtcaaggaagactcattcacttttctttcctgccagaaagttggttcttgcaaaatagattaacttgatgactatgtgtatattggatactcctaattttagctctgttagatatgtttctttctaaggacaagcaactatgtatagacttgttgtttgaattttttttcagtatatatatgtttcttgtttttctatttttctacttcatactgttaatgtcaaatatcaaaaatgttttccagcaatatcaagttatggcaatggcaaaagtccttgttgtagatgagaagcatataagaaatggttgccaatctttgttttgtatgatctatttagagttttaaccaacctagatctgtcagctaagctaattttatatttggtatacatgcatgtcaaataaagttaattttacatactattctctctttaaattttaaatacataaatgtagatcacaaactttttttttcagcgtggtagcctgaagaattttgcctttccaatcttcctttacagattaccaaacttagttttatgcatttgaagttaaaactttatgtggatctgtcttcagactgataatatctatgttatccatatcttgaagcctaccttgattgtgtaggaataggttctgtgtaatattaaataacatatcccttctccattgcacaaaattaagtaacaatgacaacaaataattagtcataatatgaactctatacagttgacccttgggcaaaacaagttttgtttgtttttgtttttgagacagggtctctctttgtcttacaggctgcagtgtagggacacaatcctagctcactgtaatctcaaactcctggtctcaagcgttcctcctgcctcagcctcctaagtagctgggactacaggtgcatgccacaatgcccagctaattttcaatttttttgcagagatggagtcttgctatgttgcctgggctggtcttgaactcctggctttaattgaccctcccacctaagcctccaaaagcactaggattatgggtgtgagccaccaggcccagcgacaacatgggttttaactgggtgggtccatttacgtgcaaaatttttcaaccaaatgtggacagaaaaccaagtattcctaggatctgaaacctgcttatatagggagggccaacttctgtatatgtgggttccagttcctgcagggctgactgccagacttgactatgtgtggatttgggtgtacatgggggtcctgggccaaacctctgaagatatcgagggaacactgtaaccagatttatgggtgaggaggtgatgggatgtgagtagaagcaaattccagggccagtcttgaaatacattcatagcagtgccaaggaccatagaggttactgagcttgatgcttagccatccaacgatatttaaagatgtggaaaatcaggctcctaggggttgaggtgcttcagagaaagactcagaactttgctccagatttcattccattatacctccctgaggtataatggctccctgaggtctcccagggattagaaaaacttttctccaatgaatgtatttatttcttgcacacgttctatgtactttaagcaggatcacacaagaataaactggttagaatcttagtcctggaattgctcagactaatgtaaaagaatggcaagattttaaaataatggtaggcttgtacaagtgtcagaagagcagatatgaaacctttacctgtctgatggggaccaataaaggagaggggtgtcacgtcacagaagtcttcattaataccttaactgacctgtaaagaatatgaacacttaaggtgaaaaagacctcctttttccaggcctttcaggcacagggaggagcaactattacacaaagggatggagccaggagaacccatatcacagttgggttacaacagggcgttaagaacaatcacttgagattatattgttgctgtgagagaaaggtgccagtcctgccacaaagaactcaccattcctttggagaagaacaagtctgactcagataatgctgcagacaggaggcaagttcacggaggactttgcattgtgaaagtttggagaggaaagaaagcatttcccaaactttgcaactgggtcccgtgagtattaggaccatgtgattttctgaaacacatgaagaagaggtgtgcagttagtttgtgaggaaaagaaacacttttttttttttggatggggtttcatttaaggttacaaggagaagtggaaagtacagaaatcacttcagtgctcagcagatgaatagtcactgctccctgctcagctcacaactgttcctgcatcctcaaatgactctagtgatatcttcttctcgagtctggattctggtgctgctatttgctcccatttagcttatgatggctactcgcgtggcggcccacctactgccgctaactcacactgcaccattgtttctgctgccttgtggttttcattacacttctaccctgttacttttagcttctgctccactgtacctggtcgccgtctttcatttaaaattgcaaagggatctaaccaagctgaccagtcactatgcaatatttgtggtcacagtaaacagttctctagccaggctactgaatggaccattgattcccctgatggcctttaggtctggtaccttcagatcaggtgacatccttaggctaatcacttgttgccaaattgcacgaccatgtgttcccaggcatggagatctactcttattcttaaggagctactcataactgatatcacttggaggatggctgtctgctttagtttaaatgggagacctatatctaacgatcactttagagagcttattctgtagcaatatagagaatggattggacgagatgtaaattaaagaatatgaagtctattaccaagatgcagaagagaaatgatgaagactagatgaagtcagtgtgagtggagatggaggggagagaatggattgatttgaggggtgtgaaagatggagagtgtttcatatagggtccaaccaaggaaacaaaaaccattctaggtactgtctagtggtgtgtgtgcataagagataccgtggcttctcctttcctttcctcttaccctccaatctcctgtgaggacttcacattgggcagctaatgcagaaaccagctaacaggagagcctggaaaacagcctgctgagcaaggcaacaatgtatctgagggacaataggcagaggcaggcaccagattagtgtgactgattgtactgtggcatcatggctaatttagggaattttttaaaaatgaggcttgggagaagtatgaatctggttttggatctatgaagtctgagtatcccagggtctcacagttctcacaggtaggcaataggaaattggagtctcataagacagagttcagggataggaatgtatttgggagttattataacagtggtggttcaggccaaggatgtgagtgagctagaccatcctggggaagtttatgaagaacttttttttttttaagataaggatggaagactagggtcacaaacaaggggaaggaagaatgatccagaatagttccaggaggagactgcaaaataatggtacaaaaagttagagcagacctcatacaggagagattgtatgaggaagccaaggaggagtgagcttttgaaggtatgggtgtgaacagcatcaagatacagaaatgagataagaactgattagtgcctacattggatttggcaaaaaggagactgtgagtgaccttgattaataggcattccactaacttcaagtatgggggtgttagggatgttgcggttgcggggagaaggcagactgtgggttgagatttaaatggaaaatgactacgagcttctctttgtagcagtttggtgggagaagaaagaaacagataaagcccaaagactcagaaagcagtataacgtgatatctcttactacttccgcatgctttagaacaaaatgtaccgtgacctgttgcaagttaatttttgtaattattttctgagggacaaacactctttttttgtgacattatcacaattgcactttttttccaagactgattactatcagaggttcagtctaatcaatgagcattctcatttctactggcttctttgaaaagaacacatattcagattcagagtctaacaggctcagaggattgggaaagggtagaaattaaaactgcactgcatgggactctcgattcttgggctctcattcaaacaacctgttgaggaaagtccattaccattccttccctttcacggaatgatagaacagaga

SEQ ID NO: 93726 - DNA, 14281 bp, Homo sapiens
taattgtaaggtgtcaacataacttaaaaaagatatttaatgtctacaattttcccaccaccaaaaaaatcatatttttaaaaatccacaatctctcaagaacatatctgttcttataaacataaaggtaagtttgcaactttctcttttgtttcttcctcaacttttccatgatgtgctttaccctttcaaacaaaatctcttctgtttaacacagttgtaaaccccaactttcaggctggctggggcccaaatgccttctaaaaatcactgaatcctgctctgcctgtagacagaggctgttccagtgtacaagttgttgacacatttgaaagaccaaaatagttaccaatgattagaaaaattatggttctttcgtggaaggaaagcactgtcattttaaagagatggtttcctcctcctggaggaacgtagagactctctggcccccactacccttcttcccattccttccagtaaaagattttcgcctccatcaccagccacaggtatagtgcttcaatgggtagaaccagaatccactaaactacttaccacacacagtaacaagagcacacttttcactttgaatttttataattttttattgcattaatcacttgatcagataaaccagatctgtttgccatgtgccctacattccacaggtattgaggtctccatgagaaaaccccctcaagcgcatcacaaggtttccatgtgagctatgacaaattagaaatcaacaggccatactcaaaaaggaggcaaagctggtttccatctttattcaatggagagtgaaaaggagaagaagcattcattgataaaggctattcctggccaattatttagcaactggtatgacactgatttaccaactgtgtagaatgtcaagggtacctaccaggtggtaactgtgagctctgtggaatgacataaactaaataaaacaagggatcagggaaggaggaagggcaaaaagtaggaggaagaaagaaaggaagagggatggagggaagaaggattgaaaaagaaaaagttgtatagtttagtttgaccaaaagtcaatttttaaataaacaagtactaatagcacctctcttaggcgactaaaaaacctccctttccaacaatgtctttttgttttaattaataatttctttccacggaggagaaaaaaaggaaaaaatatttcatctggagaggagaaagaggccaactctcagaaacaatgagatttttatcttaagtcatactatgctcaagatcctctaggtaattttgaaataatcacttccctatttcctttagcattggaaagactatgtaaatgtcctccattcagcatgctctctggtcttcgatttatctactaatatagtcatgaaattacctttgacgtcccctgaaacccagctttctgctagactgtgatcctttatcctcagatcctgaaacatccatagaaagggaaccccaaagtgcaagtgcacacacacaaacacacacacacacacacacagtctttctgccttcctaaatctaaaaggtatagtaacaccataaattaaaagaaaataaaattaattttcagcaaaattttctcattctctaatatcaggtttcagttagatattaatatttaaaatatcttctaatacattattctaccttccatttgaggaaaggaacaaatgtaaacacagatatggtcccctcccctttgtaacctttcttttctttccattttttaatagctgcaaacttacaggacttctgcctcttaaatcaagtattactaaatttctacttcagcaccttctgggatgacaagattccaaatatgtaataaaaataaattgccattaatagctaggtctttggcagagttactggcctgttttgtttacttacccagtgccggtgtgatgttctactttgggcacagctgtgaacaagactattaataatcaggctgcatcaaaaaggagtcagttcatagttctgtaattcaacgatttttttactcttttataaattgaagttgttcacatagttcaagattgacctgttaaaatctctgatttttttttttttttttttacagagtatccctctgtcaggttacagggcagtggcctaatcttggctcactgcaaactctgcctcccaggttcaatcgattctcctgcctcagcctcccaagtagctgggactacaggcgcccaccaccacacccagctaatttttgtatttttagtaaagaaaggggtttcaccatgttggccaggctggtctcgaactcctgacctcaggtgatccacccacctcggcctcccaaagtgctgggattacaggcatgagccactgcacctggcctctgttttttttgtttgtttgtctgtgttttttgtgtttttgaaaaaaacctgtgtggtttatgaataaaactaccttagaaagaggacaactggcacacaatcctgagagcctgtaaaccccattaacctaggcctgcaaggaaattttaccaaattcaacaatatgaagggtcctcctgaatgatcacaaagtaagtataaatatagtacaaaataatctaataaagactggctcatcctagtttgttccaggataagatcaccacagtatttcacagtttcttaggaaagcattgatatactgctattattgatattttctttatcaagatttcatttgtacactgaaagattcagagtcaaaaaaaaagtcatcaaattaaatccattatttattttagtctctcacacaagtggcatcgattcactgaacctgactgtgggatataagcatgagtggagaatgggtgcagcggctcagcctataatcccagcacttcgggagtctgaggcgggcggatcacttgaggccaggagttcgagaccagctaggccaacatggcgaaaccctgtctctactaaaaatacaaagattagccaggcatggtagcacacacctgtaatcctagctattggggaggctgagacacaagaatcacttgaaccctggaggcagaggttgcagtgagccgagatcacaccattgcactccagcctgggcaacacagggagactgcgtgggtgaaaaattttaaccagcctcactcccatcactttcccgtattcagtgtcataatctgacacttaagtgctctctctgcatttcccacgtcaaccattccggaaccaccacccactccgccatatacttgcttatgtgctcaagagcttagctgctctaagcatacttgtggccaaataaatgtaagaagagacagttgctgtctgatttcaccaggtggaggtaaatgcttgagattatccataaaccaatccattccataatgtgtcctgcagaaacttttttcaatattctaatcagaattactgttttcttcctccatgcacacttagccctttgtcactactattgtctttatattattctctctgtgtctccctccaccccaactgaaggctcttcgagcatcaggatacacaggggaaccatcgcagtgcattacaatggctctcaaagtgtggcctctgaaccagtggcatcagaatccctgggaacttgacagaaaagcaaaatttcaggccctacctcagacctactgaatcaaactctgggggtgggaccccagcaaccagtgttttaacaagccctccaggtgattctgacgcaggctcaaaattgagaaccactggtatattggaataagtatgggttttggaagcagataatctaaggcttttaaattcctacggtgccctttattagccaatgatattaatcaagttgtttgctatctttgagttgcctctactcacttatgaaattcatgacttgtgaaaatatgctgagggatggaattttttttaataacagtcttttcaataagttgtgctgggacaatgggatatccatctgcaaaagaaggaaagtggaccctctacttatccgataaaaaagttaactcaaaatggatcaagatttaaatgcgagagttaaagctataacactcttagaagaaaacgtaggtgtaaatctttgtgaccttagattasgcaatggttttttagatatgacgcaaagaggacaagaaacacaagaaaaaatacataaattggaccacatcaaaatgtaaaacttctgtacttgaaaggacactatcaagaaagtaaggagacaacacacagaatgggagaagatttttgcaaattgtatatctgataaggggcttggttccaggatacgtagggagctcttacaactcaacaataataagataaattgcccattttaaaatgaatagacagccccaggtgcagtgccacatgcctgttgtctcagctaattgggaggctgaggtgagaggatccccagagcccaggagtttgagacacagcggaactccgtctctttaaaaaaaaaaaaaaagttgggtcgggcgcggtggctcatgcctataatcccaacattttgggaggccgaggcaggcagatcacctgaggtcaggagttcaagaccagcctggccaacatggcaaaaccccgtctctactaaaaaataaaaaaataaaaaattagccaggtgtggtggtggatgcctgtaatcccagctactctggaggctgaggcaggagaattgcttgaacctcggaggtggaggttgcagtgagccaagatcacaccactgcackccagcctgggcaacagagtgagactccatctcaaaaaaaaaaaaagaaaaaattgaagcccggcatgatgcttgtaatcccagcaatccacttgagttatttgggaggctgaagtgggagaatcccttgagcccaggaatttgaaaccagcctgggcaacatagccggaccccatctcaaaaaaaaaaaaagaatggaagtttctccaaagaagatatacatatggtcaataagcacatgaaaagatgcttaatgtcattagccatcaaggaaatgcaaatcaaaacaacatcaaaatatcacttcacacccagtagaatggctctaatcaaaactacagcaaaaaacaagttggcgaggatatagagaaattggaacctttgtacactgccgatgggaatgtaaatggtgtagtcattttggaaaacagtctggcagttcctgaaaatgttaaacaaagaactgcaatatgacccagcaattccactgctaggttcatacctaaaagaaataaacacacatatccacaaaaaaaacttgcacataagtgccatagcagcagccttgttcatgatagacaaaaaattgaaacaacccagatgtctatcaactgatgaatggaaaaacaaaatatggtaaatccacataatggagtactaatacatgctacaacatgggtgaaccttgaaaacattatgctaagttaaaggagtcggccacaaaagaccacatatcacacaatttgatttatatgaaatgtctagaataagcaaatctacagagacaaaaagtcgattagtctggtggcctagagttgttggagcaggattgggaggaattgggaaaatgaggaataactgctaatgggtatggggttctttttgaggtgatgatataaatgttctaaaattgtggtgatggctgcacaacactgtggatctactataaaccattgaattttacttttaattgtgtgaactatttggtatgtgaattccatctcaataaagctgcaacaaagtaataatgaccacaaagattttcagccattaaatattaaaatatttaataaaagagacaagttttaggagggagcttaagaacagtacaattctgaaatctgagggaaaaactgtgaagtcagttcatttgtattctccttggttataatacatttaaaaagctaatacaaaagataagaatgaaattaaagagaagcgctctccactgctgttctcttcagctcaacatggtggtctacysggcgattggcagcctcagccacttctctgccttcaggatcctccgctcccaaggttatatacgccgcaattttacagggtcctttgctttgctgaccagaacccatattaactatggagtcaaaggggatgtgatagttatttaaattaactctcyccattcaaagataaatacgctgaataaacaaacagctgcattcagagttcacggaagttatgaatgaaatctgggctagtgatcaaatcagaagtgccatccttatctcaccaaagccaggctgctttattgtaggtgctgatatcaacattttagccacttgcaagacccctcaagaagtaacacagataccacaagaagcacagagaacatttgagaaacttgaaaagtccataaagcctgttgtgactgccatcagtggatcctgccattttatgccaatataaaatagcaacaaaagacagaaaaacagtattcggygctcctgaagtcttgctggggatcttaccaggagcaggaggcacacaaaggctgcccaaaatggtgggtgtgcctgckgcttttgacatgatgctgactggyagaaacatccgtgcagacagggcaaagaaaatgggactggttgaccaattggtggaatctctgcgaccaggactaaaacttccagaggaatggacaatcaaatacytagaagaagttgcaattactttcccaaaggactagctgataagaagatctctccaaagagagacaagggattagtggaaaaattaacagcgtatgccatgactattccatttgtcaggcaacagatttacaaaaaagtggaagaaaaagtgtgaaagcggactaaagggctttccctttatcccacacctctgaaaataattgatgtggtaaagactggaattgagcaagggagcgatgctggttatctctctgaatctcagaaattcggagagcttgcaatgaccaaagaatcaaaggccttgatgggactctaccatggtcaggtcctgtgcaagaagaatacatctggagctccacagaaggatgttaagcatctggctattcctggtgcagggatgatgggagcaggcattgcccaagtctccgtggataaggggcgaaagactatacttaaagatgccacactcactgggttaggctgaggacagcaacaagtgttcaaaggattgaatgacaaagtaaagaagaaagctctaacgtcatttgaaagggattccatcttcagcaacttgactgggaagcttgattaccaaggttttgaaagacagacatggtgatggatgctgtccatccatcacaacttccttagttttaagcacagagtgctaaaggaagtagaagcagtgattccagatcactacgtctttgctagtaacacatctcctctcccagtcagtgaaatcgctgctgtcagcaaaagacctgagaaggtgattggcaggcactacttctctcccgcagacaagatgcagctgctggagatgatcacaaccaagaagacttccaaagacaccagtgcttcaactgtagcaatcggtctcaagcaggggaaggtcatcattgtggttaaggatggacctggcttctatacyaccaggtgtcttgcacccatgatgtctgaagtcatcygaatcctccaggaaggagttgacccaaagaagctggattccctgaccacaagccttggccttcctgtgggtgcygccacactggtggatgaagttggcgtggatgtagcgaaacatgtggccaaagatctgggcaaagcctttggggagcagtttggaggtggaaacccagaactactgacatagatggtgtccaagggcttcctaggtcgccagtctgggaagggcttttccatctatcaggagagtgtgaagaataagaatttgaattctgacatgaacggtattttagcaagtctgaagatgcctcctaagtctgaagtctcctcagatgaagacatccagttcygcctgctgacaagatttgtgaatgaggcagtcacgtgcccgcaagaggggatcytggccacacctgcagagggagacattggagccgtcttcgggctcagcttcccaccttgtcttggagggcctttctgctttgtggatctgtatgaagcccagaagatagtggacsggctcaagaagtatgaggctgcctatggaaaagagttcaccccaagccagctgctagctgaccacactaacagccctaacaagaagtttcatcagtgagcaggcctcatgcctcactcagtcagtgcactaaccccagctgccggcagtgctggttctccaacagagtggcatctagatttatcagagtaacgagaaggaagacaaactccggcattgggtttgctccctgattaaagtgccttcagccaagatcatctccccctcctggtgaaatctgactgtgaattagagtttgcgctattggaaggtggaacccactgtgctcattgtataagccctgaggcctagagtggcagccaagagccatctggagccatctctttgcctgttcctgtcaggaggccagggtggccaggggtggtgagggcaattctgcacccagacaaacacataacaataaaaaccaaactctgtaaaaaaaaaaaaaaaaagaatgaaattaaaaacatgaattacaagaggctttcaacatcctcttttcatgttgttagcaagccagaaaacacattccccatggcatatgttacaatttaaatttcattcaaaaattaaatcattgtcacattaatagtggtagtaggattttagagctggggccccaatgattatttattccaacttccagattttacaaaaatagactgctctaacattttccataccactccacactgcttccccatcagtgtgcagacattaatttttacttaatgcaattctaataaactgttttctggaacatgtgtttcatggcctcaagaatatgattttttttttaatttcttacactgttttcttttcacatttagttgacatgagcctttcctggtttcaatgacaggtggtgatggtttcctttatgatacacacatcataaaacagtcgccttcagcttttgttttttaatagcttgcttacataagttttacagagctatgaaagaatcaaatagcaatcaaaatattcttcataatcaccgttaatttctagttgattcccagtgttaactttttcaatctgagttcaaatttggtgtgcctgcattttagttcaggatcagatatttcccagtgttcgattgtttcaaatccagaaaaacagaagaagagtctggcattttacattccagatttcaaaagaacaatctatttccaaagaaaaaatatcttaaaaatattttttataaacaaaggtagttttctcatttctgtttttccacttgccacattcttcaggtttttgtattgactcctcttcgggggagagtaagtctttttgtgacatatttgcaagtgtatattttaatttacatggtgcattaggccattcttgaattactataaagaaataccggagactgagtaatttataaagaaaagaagtttaattggctcacggttctgcaggctgtacaagcatggtgcttgcgtctacacggcttctggggagggctcagggagctctcactcatggtagaagcaggagcatgcacgtcacatggagagaaagggagtaaggtgggggaggtaccatacacttaatcagatctcgcgagaactcaccaggagatagtgtcaagtcattcaagaagaatctgcccctgtgatccaaacacctcccaacaggctccgtctccaacactgggcattacatttcagcatgagatttggtcagggacagatatccaaactgtatcacatggtgtcatgtaaccggccagaatcactagaaacaccaacatcctttaatactgaagtatgcatctcaacaattctgtgtaactatgagaataataaaggttacaaatgggaccagtcatttatgaaattctttcaaagatctgaagaggtaaatgatcatctaagcaaactctgagagaatcaggctgaaaatgttggccactattattattagcacattttccttctctttcacaaataaataggtacaaaacagtagtggcttcttgatccataaagaagctttattacatttttattaaatatatatttttgatggaaatatctcacaaccttctgaagaaagaactgatataaaaaataaaataatctgtccatttatcacctttccctaattatcctttcctcttcattccattgtcaccacacctttccaggtcctcatcaaattatgccagtattactctatcagccttttgcccagcctcccgacccctactttaaacacatctggcttaatattaaaataactaattttattacaacaccactttccacagaatcattctatgctcacaagactgcagaagcccctgtaacccaccattgtgtctaaattcctctgtccagcttccagggcctcatatattgtggcatcactcaatctttccaaaagtatttcatgttcccccacacataaaccctcctccactcaggaaggcagatgttccacaagacaagaaataatgagaggagaatacagtttgggaaataataataatttctattattcattaagtgtatgttgtgtgccattaactgtgctcagcacattacatgtgctatttcattttacccgcacataaatcttacgtgacaggtttcatgattttacagagtggaagctgagccacataaagactttcttctttaaggccattaagctattaaacggcagacctggcagccttatgtctcactccaatgctcaagttcttatccacatgttgactatcacttatagtaaaagtgtactaggcaggtggatgtgcaaatccaaagctcactggggagaaacaagggttatatttttccttcaccggcttctagttaactgcacctgttgttatgagtgagcctgtctatggaaaaggcgtgtaacgaagagaagaaaccaagaacagaactctaagcaatggcaccacttacagggtgtacagaagagaaggccgcagaaaagactgagaaggtgtcaggagaaccagaagagttatccagtacaaatcaaagaagtggggtttcaagtcacactaaaggggagtagtcagctgtgtaaagaaaaaaaaaatcaaataaggtcaagtaagataaagattgaaaacggctcattagaactggtgatgaagagctgggataactcataatttatcatccaaactaggacagttttgagggtgaaagagggctctattaacaaataccccaggaacactgaatatgttggaaacaaagacataaggtcaccctattaagaagtcagtagtggccctttgtgagaaccatatgaagagagtaatgcagtgactgccacaatgatatgagttcaggaatgaatgtgtgttgaaaatagtatgtaatctttcaaaaaacttagtttattccttctttactcccactgcttcacttgactagcctttaaaaaagaaaggcttggtttgatgaatgggtgagagaaaaggtgagtgttagaggtgaaactgcccttcacttactccttatccatttgtttgacttcttcctcttgactctactgaaactacttccccaaatgtccccagcgacttccaaccagtgctgggagtgagtgacctttactgtatcctctgcttcattaacttccacagcactgggcatcgtcatatgcccccagtcctatcttgagactacagctctgaatcatacctactgcctctttctttgactacatctctctgctctcttcttgctcatttaatcttaaaaatgttggtgtgttctaagtttctgcctgatacactttctctcctttgcctattctccctccctcagtcatctcatccataatcaccattttcaccctcaccagtcatgcaagtgattcctaaatcttttcctctgtcctcaaattctgctatgaaatgaatttcatttcaaactgctggccatatatctctctccaggtggtgggtccacaacacctccctaaatatgtcaaaagcatacaatatctttttcttaaattagcaatgcacaagtgatctatttctgttaactcccaaacaaatgaagtctaaatcctcagtctagcatttaaggatattcatgatatggccaaagacctacttgtaaagattttgcttcctctacatgtacagtaaggtctaagcacaaagtgctctgttattatcctctgaacattatcttggaacccactcttagagaggctgggattataacactgatgattgcttctgtttctcctagaattctcttctctcctctacactggtcaagattaagccaatcagaagtctcggtgagtatccttattaaatgtgtcctccattcttcaatctcaaacttcgctttgtattactcttaaggtacttgtcattttctatcttatcataacatatgcatgtgtcttatcctccctagtatatagggaactcctttaaaagaggatatgtggccaggcacggtggctcacacctgtaatcccagcactttgggaggccaaggcatgtggatcacctgaggtcaagagttcaaaaccagcctggccaacatggtgaaaccccatctctactaaaaatacaaaaattagctgggtgtgttagcgtgtgcctgtagtcccagctactcaggaggcaggaggccagggcaggagaatcgcttgaacttgggaggtggaggttgcagtgagccgagatcgtgccactgcactccagcctgggtgacagagactctttctcaaaaaataaaaaagagggtatgtcttttcacagatgtacaacaggtatttattgtttagaatcaacagttataattagtagaatagatgcatttgacatcttaatacatcttacttgaaaatccattatttttatcaccctcaaaagtaaaagaaaaactgacagctgtttatgctctgatatattaaacatcctcagtaaacattattttaaaactacatctctggtttatgaacatataatgtgagagaacagtttatcaagtagattaatttttaggcacatcaagattaatatgatcatttagtatagtacatttaggcaattaaatttttataatataagtaagtaccacaataaaaccctttaatgcctactgtcaaagcctagaatagtgaattaattggttataataggttgtgatttgaagtggaacttcttagtcattgattgattaaaccaactaatgcctgcaaaacatatttttaacacctcagtgtatatcacctggtattctttgtttaacagaactgtacctttaaatacagctaatgccagatggtctcctcagaaaaaaaacagcaggaggcaacatattaatgccactcaacaagcaagtctgcagacagccagccaatgaaatctgtcttcagttgctaagccgttctgtcaccatggcaacacctacttcagaaaaaatattggattttcaagtcaagtgagccacccaccttaaaattccagatcttccaaactatgatcaccagatactttagttaaaataactgcttagattttttccattgacctaaaatcagggctatcttgaaaagccacttgcctctccatttttaaatgtttatttactctcagtttctaactttcctgatttctagataaacatactccatttaaatgtgtgtgtatgcatatgtatacacatgcacatttgtatatatgtacctatatgtatatatgtacctatatgtattcatacacctatatacatatatgtgtatatgtgtatgcatgtgtatatgtgtgtgtatatatgtgtatatattagcagttgtaggctaatagtcctaaacataaagaaaaatcttaatgtctcagaaaattgtcactggtacatgctcttatcaatcttttactaatattatatctgatgtaaataagcaattaataaaataagtttatgtattaattagaataattaattaattgagaccagaacaatattctttttgttaccagcctctaaattatttagtatgaatgtacaagataacattaaaaccttagtggggttttgttttt

SEQ ID NO: 93727 - DNA, 27860 bp, Homo sapiens
  misc_feature (1)...(27860): n = A,T,C or G
cagttctttgttcaagcgttcctctggggaccggcagcagaggcaccgtgttctctcagccctggatacgtcttgtaatctttcacactttattcctaaaacgtgtcttatttttatgcagctcattttttctttaaaggagaaaacttgtaggtgtttaagaattggttttgggagggcgaggactgggccaggttagaggcagatggcacaggggcgtgtggcgggcgggtgaggctgctttgcacacctgtgttggtggctgtcccctgccgcccctccctgtggcagcagcaggacaggtgtgtgcccagcaccctccctacctgggcctggaagcagatgaggggaatacttcatgcaaagaaaaaagtaacatgtgcaaaagctccccgtccagctttgacagtcagttttgatgtcagctcctcggcagggtaggcctgatgacagccctgtccctccctgcctctgccttgcccaaggccacggagggcgtctgcagagaggcctgccttccggattccaggcgggcatgccctgcaaaccccgcctgggcctcccttggtctgcccagccctcggttagccctgcctgaatcagtagatacttgaacgagtccccagtctgcgggaggcagtggtggggccatggacccatgcggggggttccagggtcacacgccacataacagacaaaaatacacacacgtgtgtttttctttgcaatacttgaaatattgccactgtgcttggacttagaagaagaaaatccccgtgacttcttcctcatcaccttgatggctttattctcaccttgtggggcatgtttgtatttattgcttcatggccgactggaatcctgagtcctgggaagctggcactgcggggatcttgcccggtgtcctggtcctcttgcttccgtcgcggccgcatgtgcgtgtgtccaagcaggtcctgggcgcctcaactgctgcccctggttgaatgttctcttgatagtgctggaccctttgtctattttaaagcgaattttgtgtgatttcctgccctttgcgttatattgtataataccaacgtaaggaaataaacctttggaattgttgggctggtgtcaccacttgtcttcgttggcttgtcactgttttcagggttctgtcattttctttctcagccgaggcgcaggagcccagggcccctccacaggtgcccacaatggtcgacacagccctgggagcagagccccagggcagaagctggatgtgttgagggacaatgcaaacccctgcgccacaggaagcctctcccgccaggctgggggtcctgcacagggtgaagagagtccagagggcagggcatctgccttggtatagctttgggcacctgctttgactcctttgggggatacacctaggaggggctttcggggccacgtggagctgtgtgttaacttccaagaagcaacacggttcgttcactgcagcctctgagcagctgggcctccaaggccttgccgtgtggttttgatttgcatttccccgaggggtcatgacgtggagcatcacaggtacttggcggccatttgtgtgtctttggaggaacatctaaatcctttgcctccccctttttatttatttatttattttttaatttgaaatgagtaactctgttgctcaggccggagtgcagtggcgcgatctcggctcactgaaacctctgcctcccaggttcaagagattctcctgcctcagcctcccaagtagctgggactacagccaccaagcccggctaatttttgtttttgttttgttttgtttttagtagagacggggtttcaccgtattagccaggatagtttcaatctgatgttgtggtctgcctgccttgaccttccaaagtgctgggattacaggcatgagccagcgcacctggctgtttttttttttttttttttttggagacagtctccctctgtcacccaggctggagtgtagtggtgcaatcttggctcactgcaatctctgcctcccgggttcaagcgattctccaggctcccgagtagctgggattataggccaagtgccaccacgcccaactagtttttgtatttttagtagagacggagtttcaccatgttgtccaggatggtctcaatatgaccccgtgatccacctgcctgcctcatcctcccaaagtgctgggattacaggcgtgagccaccacgccccaacttttttttttttttttttttttagttgaaatctcactctgtagcccagactggagtgcagtgctgcaatctgggctcaccgcaacgtccgcctcccaggttcaagcaattcttctgcctcagcctcccgaatagctgggactacgggcatgcgcccagctagttttttgtatttttagtagagacggggtttcacatgttggccaggctggtctcgaactcctgtagagttcgcatttttaaaactatatattgtttttattagataaaaataacttgctaaaaactgctaaccgcagtaagaagtgaaagttcattgagaggttggtgttctcgaggaaggggaaggcggagaccttgatttctgagtcccaagaggggctgcttccaaactgagcctcctcagacaggaacagctgcactcggcaccgggtgagaaggtgtggtggagcagctgccaggctgtgggcgccgtgatcctcctggtacttctgaaacgtaaagaaatgcccagacggtcactacaaacatggaattttgttggtgttaatatcattttttagagcagttttatatctgtaggaaaattgagtaggacgtacagagagatctgccctctcccctgtcagtaacacgtcacattcgtgcagtgcctttgtctctgcttttgaacccaatattcatattttagatttttaaaaatcatggacacttctaatactacaggttctgtcatagtacccgaagtccatagttcacatcatggggtcactcgatgtacactgggctttgcagaagtgtcacgccacacatcaccctaaggtcctctgggctccacctgttgccctctcccagcctagctctgctggccccggtcttcctgtcctcgtagtttttcttgtttcagaatgtcccgtagttggaatcatacactatgcccagggcttgggagctcatttcctttttttttttgagacggagtctcgctctgtcgcccaggctggagtgcagtggcgcgatctccgctcactgcaagctccgcctcccgggttcacgccagtctcctgcctcagcctcccgagtagctgggactacaggggcctgccaccacatcctgctaattttttttttgtatttttagtagagacggggtttcaccatgttagccaggatggtcttgatctcctggcctcgtgatccgcaggcctcggcctcccaaagtgctgggattacaggcgtgagccactacgcctggccttttttttttttttttttttttttttgagacagtctcgctatgttgtccgggctggagtgcagtggcgggaactcggctcactgcaacctccacctcccaaggttcaagcgacttttgtgccccagtctcctgagtagctgggattacaggcgtgagccactgcacacagcctggctaatttttgtatttttatttatttatttatttattattattttttattgatcagtcttgggtgtttctcacagagggggatttggcagggtcacaggacaatagtggagggaaggtcagcggataaacaagtgaacaaaggtctctggttttcctaggcagaggaccctgcggccttctgcagtgtttgtgtccctgggtacttgagattagggagtggtgatgactcttaacgagcatgctgccttcaagcatctgtttaacaaagcacatcttgcaccgcccttaatccatttaaccctgagtggacacagcacatgtttcagagagcacagggttgggggtaaggtcacagatcaacaggatcccaaggcagaagaatttttcttagtacagaacaaaatgaaaagtctcccatgtctacctctttctacacagacacggcaaccatctgatttctcaatcttttccccaccttcccccctttgtattccacaaaaccgccattgtcatcatggcccgttctcaatgagctgttgggtacacctcccagacggggtggtggccgggcagagggggctcctcacttcccagtaggggcggccgggcagaggcgcccctcacctccctgacggggtggctggcctggtgggggctgacccccacctccctccaggacggggtggctgccgggcggagacgctcctcacttcccagacggggtggctgccgggcggaggggctcctcacttctcagacggggcggttggcaggcagagggtctcctcacttctcagacggggcggttggcaggcagagggtctcctcacttctcagacggggcagccgggcagagacgctcctcgcatcccagacggggcggcagggcagaggtgctccccacatctcagacgatgggcggccgggcagagacgctcctcactttccagactgggcagccaggcagaggggctcctcacatcccagacgatgggcggccaggcagagaagctcctcacttcccagacggggtggcggccgggcagaggctgcaatctcagcactttgggggggccaaggcaggcgggtgggaggtggaggttgtagcgagccgagatcacgccactgcactccagcctgggcaccattgagcactgagtgaacgagactcccgtctgcaatcccggcgcctcgggaggcggaggctggcggatcactcgcggttaggagctggagaccagccccgccaacacagcgaaaccccatctccaccaaaaaaataggaaaaccagtcaggcgtggcggcgcgcgcctgcaatcgcaggcactcggcaggctgaggcaggagaatcaggcagggaggttgcagtgagccgagatggcagcagtaccgtccagcttccgctcggcatcagagggagaccgtggaaagagagggagagggagaccgtggggagagcgagagcgagagggggagggggagggagagggagagcgagagcgagagcgagagggagagggagagagatttttgtatttttagagacgggttttgccacgctggccaggctggtctcaaactcctggccttaagtgatccgccctcctggcctcccaaagcgttaggattacgggcatgagccactgtgcctggcctcatttctttttagagctgcatagtattccattgtctgtaggtaccacagtttttccattcacctgccgacatatcggttgtttctgcgtttgggcagtggtaaataaagctgctgtaaaggtccttgtgccagagccaggtggtgagggtgggcccaggggaagccatggcagtacaggaaggacctcatccctgcacacactggccatgtgggggcggggctccaagccagggggaccaggccttggtgcccacactgccacagaactgtggcccccctgggtgcctgtccaaacccccccacctcagtcctggagcctgggctggtggaggggtgccctcctggggggtcacttagtacagctgagccaccctcccagctggacaattgcatctccctcctgcctccccttcctgcctcggccaccagctcctcacaagccactcgcagcccactgagtgccccttgggaaggggtgtcagattggatccctggggctcccatctcactcatagccaatgccaagtcctcggtggcccacgaggccccacacaacctggccccggaccccttggtcctcttttcctatcagtccctccagtcatcacgcagccctgtggtttctctacctgcatactccaggtgggcacagtgcccaggccccactgagtcctcacctgtaggagaaggcacagcccctggagggcgggagtggggctgctgcagacggctgtctcctgcctcctggctcttgcactgccaggaacacgctctccccaacacctccatggctcattccccaaattcaagcttgtagttggttgaattgtggccccagagatgggattaaggattttgagattatgccagattatctgcgcgggcccaggatcatatgagtttgtctaagggaaagcaggagacaggagggcaagcttgggagaggaggcaaggaagtggtgggcgcggtggccacacctggaatcctagcacttcgggaggggaggcgggaggatcgcttgagctcagcagttcgagatctgcctgggcaacatagtgggccggtctcttaaaaaaaaaaaaaaaaaaaaaggccgggcgcgtggctcacgcttgtaatcccagcactttgggaggccgaggaaggcggatcacgaggtcaggatatcgagaccatcctggccaacatggtgaaaccctgtctctactaaaatacaaaaaaattaaccgggcgtggtggcgcgcgcctgtagtcccagctactccggaagctgagacgggagaatcgcttgagcccgggaggtggagattccgagccgagatcgcgccactgcactccagcctggcgaaagagcaagactctgtcccccgccccccaaacaaaacaaaacaaaacaaaaaagagtggctacttttcaggagaccgcatctctataaaaaataagaaaaaattagctgagcgtggtggggcgcgcctgcgaggaccgctggagcccggaggcggaggctgcggtgagccgtgacccctctaccgtgcgggtgaagggcagggcggagccgcccctgcgccccagcgtctgtggaacggggacggggagcggggctggggccacacgagggccgcacagggtgggtgccactgagggtctgggggccgagcccgtgggagcggacccggcaacggagaggagcggggccagcgtgggctcagcgcttcccctgctccgctgggcgggcgacagcaccccgggaggcggcggcggagcgaccagtcgcgcggccgcggtgctggatgcaggannnnnnnnnnnnnnnnnnnnnnnnnnnnnnnnnnnnnnnnnnnnnnnnnnnnnnnnnnnnnnnnnnnnnnnnnnnnnnnnnnnnnnnnnnnnnnccgccccaccccacccccaccccctagtctccgcccccatcaccccctccgtctctgttcccgccctgcctcttctcccgaattagttttgtccgcgctcggccgccgtgcagtcggtcgttccacttccgccttcgcccacgtggtccggctccggctcagtcagccgcgtcgcgaatggggcaggagcgagcctctctggtcccgacgcgggtggcccgggtctcctcgactcctgaggaaagcccaccgggcggggcgggaggtgaagaggctggggaagtcagaggttaacctgggcgtcaggggacgttggagttgatccgtcagggtcccggggcggtctgggggcagtagagacggggcttgggcgcggggcctgagaggtcaggggtcagcaggagtgaggctggggcgtccaggtccgagaggtcaggggtcagctggagaggggctggggcgccggtttcccggaggtcaggggtcagaaggaacagggctgcagcgtcagggtccgagaggttaggggtcggcagaggcggagctggggcactgggggtcaggggtcggggatcagggcggggtcgggtgcactggtagcctgcgcatgggcctccagcttcgcgcgctgttgggagccttcggacggtggaccctgcgcctgggaccgcgtccgtcctggtaatgaccgcgacgccgggcgaccccgctatgcccgcccagcccagcccaccccagtccaccccgcgcggtgccgagcgggcccccgctcacgccgcccttctccgcagctcgccgcgcatggccgggaacgcggagccgccgcccgccggagccgcatgcccccaggaccggaggtcctgcagcggccgggccgggggcgaccgcgttctgggaggacggagaacatccggcgaagaagctcaagagcggtggcgacgaggagcggcgcgagaagccgcccaagcggaagatcgtgctgctcatggcctattcgggcaagggctaccacggcatgcaggtgtggccgcccgggaagcggcaggtcccgcggggtttaggtgcaggtgcggccgccggggaagcggtgggtccggctgggtttaggtkcaggagcggtcgcccaggtagcggcgggtccggcaggatttaggtgcaggcccaagcagctttcactgctcctgctgcacgcgagctcctgctgctttccatcaggcccggccctgccgctaaccgctgttatctggggcggggttcacttgctgggtgcctgagtcctcatctttaggatgggagtgctcacagcacctgctaagtagagtgtgaagatgagctaggtgtactgacgctcggtgctgagaacagtggacagctcggggcagctcagaagagcctgctgtcgtgagcgttaaggggacagagagctaagtattaaagttgtgaggattctctcctcagcccacttccttttctggaaggtagagggtctgggtacattcaggtaggtgtatttttttttctttttgaggcgtggtctccctttgtggtccaggctggaatgcagtggtgcatccacactgctcgctgcagcctccacctcctgggctcaagagatcctcccacctcagcctcccgaacatcgagggctgtaagtgtccttgacctcacggcctgaataattttttttataatttgcaggaatggtgtcttgctaagttttttattatttataggaatggggtctcgctgtgttgcccaggctgctctccaactcctgggctcaagcgatcctcctgcctcggccttcctgtgttgtgattacaggcatgagccactgcgactggcctcaggtagacattccttttgttcctttttgtagttaccactgtggctttgcgcagttctgtgttctttaaacatctttaaacatttccacagaagttcatgcagtgcgtgcagtgtctgactgaaacaaaagtttaagaaaataatgcttaacttcggcagttgttataacagcttttatggtgaaagttataagtaatagattgctttttttttggagacagagtcttgctctgtcgcccaggctggagtgcagtggtgggattttggcttactgcagcctccgcctcccgggttccaccgattcttgtgcctcagcctcccgagtagctgggactacaggcgctcgccaccacgcccatctagtttttgtatttttagtagagacggggtttcaccatgttggtcaggctggccttgaactcctgacctcagagtatcctcctgtctccgtctcccaaagtgctggaattacaggggtgagccacagagcccggccaaccactgtgcactgcaacctctgcctcccagattcaagcaattctcctgcctcagcctcctgagtcactgggattaaaagcatacctaattatttatttatttatttatttttgagacagagttttcctctgtcacctaggctggagtgcagtggtacattatcagttcactgcaacctccacttcccaggttcaagcgattctcctgcctcaagagcccggcaccacgcccggctaatttttgtatttttagtagagacagagtttcaccatgttggccagactggtctcgaactcctgatctcaagtgatccaccctcctcggcctcccaaagtgctgggattacaggtgtgagccactgcacctggccatagattactttatagtcaatgttttttttttaaagtataggtagcacccacggcactgattttgtaactgacagattgtggaagtaggtgtatgcacaggttcaatcaaacctgtgttttgattccattccacactacccaccccctagcatggagcagcccggccccagggtgagtgagcagaaaacagtgttttcacatgagcgtggcagctcacacttgtaatctcagcacttcaggaggccagaggagtaagcggccaggagttcgagaccagcctgggcaacatcatggcgacctctgtctgcaaaannnnnnnnnnnnnnnnnnnnacatcatggcgacctctgtctgcaaaatataaaatctgtttttgtctcctttttccagaggaatgtcgggtcctcacaattcaaaacaattgaagatgacttggtgtccgccctcgtccggtcaggctgtattcctgaaaatcatggtgaggacatgaggaaaatgtccttccagcgctgcgcccggacagacaaggtgggtggtggccttctctgcccctcccccgctgctatgagcagcacgtggcccactttccagctcagtgttctggcttgttatgctgtttctgagcacataatgatgtacaaatcaaactagcctacgccttatgtaggtgagacgtccaggagcctggtcggctcaggtatagctggatctagatgctccctgccagtgggactctgtgttctctctggtctttgctttctcttgtgttgattctgttctcagggacacacattcttgcaggtggcacagtggcggccgcaatgtctgctttcgaccctccaatcaggctcactctgaggcagatgtaattgtgtggctgcaaaggcagagagccacacttgtatgatgcaacattctcttttctttccttttttagagtcaggatctcattctgttgcccaggctggagtgcagtggcatgatcatggctcactgcagtctcaaactgctgggctcaagcaatcctcctgcctcagcctcccgagtaggtgggtgtattagtctgttgtcacactgttataaagaactgctcaagattgggcagtttataaagaaaagaggttgaattgactcagttccacatggctggggaggcctcaggaaacagatcatggcggcaggtgcgagagagtgaggagggtaaggggaagagccccttgtaaaccatcagatcttgggagaactcactcactatcacgagaacagcatgggggaagccgggcccatgatccagtcacctcccaccaggtcttccctagacacttggggattaccttcaacatgagatttggcggggacacagcaaaaccgtatcactggaatgacaggcactccaccatgcctggctaaattttttttttttttttttttaatatggggtcttgctgtgttgctcaggggtctcaaactcctgggctccagtcatcttcccaccttggcgtcccaaagtactgggatttacaggcatgaaccgccacatctggcttgaaattaataaataattcactgtattataaactgagtatattcaggatatcctcatttcggcgtgtaatccatataaaaatctcttcatgggataaatgtaatactgtttttgtgtgtatgctaagtccacactcatcacaaatccaccaccctggacctgttttgtggtctcagctgcatggggctggtgacccagcactgttccttcagaaccacaaggctgagtactcctgtttgcgattggttttcacgtccaccctggacgctgctgctggcctgtgtggaagcacatgccaagtggtcctgtgacgccacattcctgtgcttgggactgaaccatgggattgggtgtgcacagagtggcccgccacagggaatggggatgtctctaaggagggacccagtgtagggtccagccctacagggcctgtgggttttctcttcatgtgcggagacaagagatcgtagaaaaataaagatacgagacaaagagatagaaggaaagacagctgggtccaggggaccactaccaccaatgggccraacctgatagtggccccaaatgcctggacgcactgctatttattgtatacaaggcaaggggacagggtaaggagcgtgtgtcatctcaagtgattgataaggtcacgcgagtgacatgtccaccggacaggggtcctttccctttgtggtaggtgaggcggagaggaaggacagcatacgtcagcatttcttctatgcacttatcagaaagatcaaagactttaatactttcactaattgtgctactgctatcttctaagaactgaaaagcaggagccaggtgtgcaggtggagcatgaaagtggacaaggagcgtgaccgttgaagcaccacagggagctgtttaagcccgctgatgactgcgggcaggcctgggtaatgtcaggcctcccacaagaggtggtggagcagagtgttctctgactaccctggggagagggagactccctttgccggtctgtgaagtaacaggtgccttcccaggcactggcgctaccagtagtccggggagccttcaagcgacccttatctgggcgtgacagggggctcacacccttgtcttctggtcacctctcacagtgtccttcagctcctgactctatggcctgatttttcctaggttataattatagaacagagattattataatagtaaagagtaatactacaaactaatgattgataatattggtatataattatatctatatcctatttctagtataacttttcttattctaattattttctttattacactggaacagctcgtgccttcagtctcttgcctcggcacctgggtggcttaccgcccacaacccaacgtttggcagacggggacagcagagccggagagaacagatagcttttctgtagcacgtatgaggcatcagtgaacgtgatacctgtcatccttgctcttccgagtgcctggctctgtcacatggctctcaggctgcctgaaggcattaggggcctatcagagacataactttttgccggtcaggatcctccgggaatctgaataaagctatggctctttttcccacaaatgcctagtttcaaaaggcacacagatccctgggggatccatgggatgcattctggnnnnnnnnnnnnnnnnnnnngagccgtcgtacagaggggagaacacaaagagggatccacaagttcactcctagtgggtgagaacacaaagagggatccacaagttcactcctagtgggtgagaacacaaagagggatccacaagttcactcctagtgggtgagaacacaaagagggatccacaagttcactcctagtgggtgagaacacaaagagggatccacaagttcactcctagtgggtgggggtgatgcatctgtggctcaaggtagagagttctgtgggtcttaactattttcattttctttttgattcttccatttacagctctctggttgttttcagggaagaaaagtaacaatttgtccaagctgatgaagagagcatttcaaaatagggtccttgtatttatttttatttctgctgttattagagagatggtttcattctaatacgttttctcacttgtatggggaaacctgcagaagtaaatccatgaggccrgcacggtcacacccgagtgccctgcccttcagatgaaaacacagtaacagtttaacatttttgttatttatttattcatttatttttgagacggagtttcactccttgttgcccaggctggagtgcaatggcgtgatcttggctcaccgcaacctcacctcctgggttcgagccattctcctgcctcagcctcccgagtagctgggaatacaggcatgcgccaccannnnnnnnnnnnnnnnnnnnnnnnnnnnnnnnnnnnnnnnnnnnnnnnnnnnnnnnnnnnnnnnnnnnnnnnnnnnnnnnnnnnnnnnnnnnnnnnnnnnnnnnnnnnnnnnnnnnnnnnnnnnnnnnnnnnnnnnnnnnnnnnnnnnnnnnnnnnnnnnnnnnnnnnnnnnnnnnnnnnnnnnnnnnnnnnnnnnnnnnnnnnnnnnnnnnnnnnnnnnnnnnnnnnnnnnnnnnnnnnnnnnnnnnnnnnnnnnnnnnnnnnnnnnnnnnnnnnnnnnnnnnnnnnnnnnnnnnnnnnnnnnnnnnnnnnnnnnnnnnnnnnnnnnnnnnnnnnnnnnnnnnnnnnnnnnnnnnnnnnnnnnnnnnnnnnnnnnnnnnnnnnnnnnnnnnnnnnnnnnnnnnnnnnnnnnnnnnnnnnnnnnnnnnnnnnnnnnnnnnnnnnnnnnnnnnnnnnnnnnnnnnnnnnnnnnnnnnnnnnnnnnnnnnnnnnnnnnnnnnnnnnnnnnnnnnnnnnnnnnnnnnnnnnnnnnnnnnnnnnnnnnnnnnnnnnnnnnnnnnnnnnnnnnnnnnnnnnnnnnnnnnnnnnnnnnnnnnnnnnnnnnnnnnnnnnnnnnnnnnnnnnnnnnnnnnnnnnnnnnnnnnnnnnnnnnnnnnnnnnnnnnnnnnnnnnnnnnnnnnnnnnnnnnnnnnnnnnnnnnnnnnnnnnnnnnnnnnnnnnnnnnnnnnnnnnnnnnnnnnnnnnnnnnnnnnnnnnnnnnnnnnnnnnnnnnnnnnnnnnnnnnnnnnnnnnnnnnnnnnnnnnnnnnnnnnnnnnnnnnnnnnnnnnnnnnnnnnnnnnnnnnnnnnnnnnnnnnnnnnnnnnnnnnnnnnnnnnnnnnnnnnnnnnnnnnnnnnnnnnnnnnnnnnnnnnnnnnnnnnnnnnnnnnnnnnnnnnnnnnnnnnnnnnnnnnnnnnnnnnnnnnnnnnnnnnnnnnnnnnnnnnnnnnnnnnnnnnnnnnnnnnnnnnnnnnnnnnnnnnnnnnnnnnnnnnnnnnnnnnnnnnnnnnnnnnnnnnnnnnnnnnnnnnnnnnnnnnnnnnnnnnnnnnnnnnnnnnnnnnnnnnnnnnnnnnnnnnnnnnnnnnnnnnnnnnnnnnnnnnnnnnnnnnnnnnnnnnnnnnnnnnnnnnnnnnnnnnnnnnnnnnnnnnnnnnnnnnnnnnnnnnnnnnnnnnnnnnnnnnnnnnnnnnnnnnnnnnnnnnnnnnnnnnnnnnnnnnnnnnnnnnnnnnnnnnnnnnnnnnnnnnnnnnnnnnnnnnnnnnnnnnnnnnnnnnnnnnnnnnnnnnnnnnnnnnnnnnnnnnnnnnnnnnnnnnnnnnnnnnnnnnnnnnnnnnnnnnnnnnnnnnnnnnnnnnnnnnnnnnnnnnnnnnnnnnnnnnnnnnnnnnnnnnnnnnnnnnnnnnnnnnnnnnnnnnnnnnnnnnnnnnnnnnnnnnnnnnnnnnnnnnnnnnnnnnnnnnnnnnnnnnnnnnnnnnnnnnnnnnnnnnnnnnnnnnnnnnnnnnnnnnnnnnnnnnnnnnnnnnnnnnnnnnnnnnnnnnnnnnnnnnnnnnnnnnnnnnnnnnnnnnnnnnnnnnnnnnnnnnnnnnnnnnnnnnnnnnnnnnnnnnnnnnnnnnnnnnnnnnnnnnnnnnnnnnnnnnnnnnnnnnnnnnnnnnnnnnnnnnnnnnnnnnnnnnnnnnnnnnnnnnnnnnnnnnnnnnnnnnnnnnnnnncgatccgcctgccccggcttcccaaagtgctgggattacaggcatgaaccaccgcactccgcccgtttttttgtttgtttttgcttgctttttatttatcttttttttaccttttttgagacagagtcttgctctgttgcccaggctggtcttgaactcttgggctcaagcaatcttcctaccttagcctcccaaagtactgggattatgaatgagagccactgtgcttggccttttctatcttaaaatggaaccatttgagagtaagttggagacatcatcatcctttaccctgaaacatcttagcatgagtctccaagggactgtgacatccttcagcaacctcactctatcaacctgatagagtaccatcatctaacatgtccaaagtaggaaactctcttttctgttttctttttcttttcttcagcttctttgatgtggcatgccttttatttttgttaactggtctgggatctaatctaggatcattagtggcattcagttgtcatgtctcttgagcttcctttaatcgaaaacgatctccttggccgggcatcattgcttacacctgtaatcccagcactttatgagactgaggtgggaggatcacttgaggccaggagttcgagaccagtctgggcaacatagcaagaccctgtctctacaaaaaaaattgaaaactagccaggcatcgtggtgcctgtctgtagtactcagnnnnnnnnnnnnnnnnnnnnnnnnnnnnnnnnnnnnnnnnnnnnnnnnnnnnnnnnnnnnnnnnnnnnnnnnnnnnnnnnnnnnnnnnnnnnnnnnnnnnnnnnnnnnnnnnnnnnnnnnnnnnnnnnnnnnnnnnnnnnnnnnnnnnnnnnnnnnnnnnnnnnnnnnnnnnnaataaacaaacagtaaagtgtgcgagtcttaagtgtaaacttgatcagtttttatctgtgtacctacctgtgtacgcactgcctgtcctcagaaggcccctccctttcctccagggccactgcagttctgactcaggtggggaccccttcctcactctgctcttggttctaagttgtgttttctcttttccccaatctttgggagtcatattttcatatctttttttttttttttttcctttgaggtggagtctggctctgtcacccaggctggagtgcagtggcacgatctcagctcactggaagctccgcctcccgggttcacgccattctcctgcctcagcctcccaagtagctgggactacaggcgcctgtcaccatgcccggctaattttttgtatttttagtagagactaacaatacatttagtagagactaacatttcatgttagccaggatagtctcgatctcctgacctcgtgatccacccgcctcggcctcccaaagtactgggattacaggcgtgagccactatgcccggccctccagatgcatttttaacagctgaattcatgtgtgaaatgacgtaaggtccgcgtagtccttctttctcagagaccagcgtgcgaggcccaagggacccaccttccgtcacccgttctgctttgtttacagggtgtgtccgcagccggccaggtggtatccctgaaggtgtggctgattgacgacattctaraaaagatcaacagccaccttccctctcacattcggattctgggtaagccttgcagtgcaggcggccacacacctggttgtagatggtcttgcagagacacgaggctatgcatgctcctgccttttccaactgtctctgatgcagaagcgtagtcagagttgctttgcagctggttctgaccttcagaaacgggagccactagacaggagtagaaagctgttcatttgcagtgcttgttgctacacgggcgccttgttttaagcaaacacaggatgtgaaaatccaaattcatggttaaaatgaacagttgttccctcttacggcaggactggtaaatggaatttttaggcctccttaaaatgtgactgtctaccttttaagtggcaggtacaggcaacttacataatacattcgttcattcatttattctgtttgttttttgagagagtctcgctctgtcacccaggctggagtgcagtggtgcaatcatggctcactgcagcctccgcctcccgggttcaagcagtcctcagcctcctgagtaactgggactacaggtgtgtgccaccacacttcatttttgagtttgtagagatggggtctcattgtgttgcccaggctggtcttgaactcctgggctcaagtgatcctcctgccttggcctcccagaagccgcttatatttaatgtaatgataggtgtggctgggcgtgaatctgtcgtcttgctctctgttttcctttcctttttgttttggtgtcatcccaagaaaacagaactgttgtctgcctgactggtctgcttggagagaagtgtttgagacagggtcttgttctgttgccgaggctggagtgcagtggtgtgatcacagctcactgtagcatcgaccacctgggctcaagggatcctcccgcctcagcctataagctgggactacaggcacacgccaccacagccggctgaatttttatttttatttgtagagatggggtttcgccatgtcgcccaggctggtctcaaactcctaggctcaatcagtttacctgcctcagcctcccaaagtgttggcattacaggcatgagctgctatgcccagcccacagcctgattattttaagattcatccgtgctgttgtgtatgtcagcagtctgttccttctcattgcygcggggtgttctgttctgtgggtgtgccacggattgtttatacagttacctgctgaaggacattggatgatttctagttttgggctgttagaagtaaagccactaagaacatttacatatgagtcataaataggattcagtaatccctgttgattttacccactgttaagtttttgtttttatttttatattttttatgatggagtcttgttctgttgcccaggctggagtgcagtggcgtgatctcggctcactgcaacctccacctgcctcctgggttcaagtgattctcccacctcagccttcccagtagctgggattacaggtacacgccaccacgcccagctaatttttgtatttttagtagagatggtgtttcaccatgttagtctcaaactcctgacctcaggtgatccacccacctcggcctcccaaagtgctgggattacaggcatgagccactgcgcccggctgcttttattattttaaattcacacataattgtacatacttatgtagaattatgtgtgatatttccagtcatgtataaagatcaaatagggccattagcataatatatccatcactccaagcatgtatcatttctttgtgttggagacattccgtatcttctcactattggaaaattacaataaatggttgtaaattcagtcaccttatagagcactgcacctgtccctcctgtccatcgtcctcctgtgcctgttccccagcctgtggctgccccctccccagagaagccgatgcttgctggagcttggtcggtgctctgggtaaggagacgctggggctcacrccgtgctcaggctgctccctggtcatccrggcacttctcacctgcctttctcctccctgaccacctcccccctaggactgaagcgggtcacgggcgggtttaactccaagaacagatgtgatgccaggacctattgctacctgctgcccacgtttgcctttgcgcacaaggaccgggacgttcaggatgagacctaccgcctgagcgccgagacgctgcagcaggtcaacaggctcctggcctgctacaagggcacgcacaacttccacaatttcacctcgcagaaggggccgcaggatcccagtgcctgccgctacatcctggagatgtactgcgaggaaccctttgtgcgggagggcctggagtttgcggtgatcagggtgaagggccagagcttcatgatgcatcagatccggaagatggtcggcctggtggtggccattgtgaagggttatgcccctgagagcgtgctggagcgcagctggggcacagagaaggtggacgtgcccaaggcgcccggactcggcctggtcctggagagggtgcacttcgagaagtacaaccagcgctttggcaacgatgggctgcatgagccgctggactgggcgcaggaggaaggaaaggtcgcagccttcaaggaggagcacatctaccccaccatcatcggcaccgagcgggacgaacgctccatggcccagtggctgagcaccttgcccatccacaacttyagtgccaccgctctcacggcaggtggcacgggcgccaaggtaggggcacagtcccagcagkgctcagcagaacacaggcccacattgttcccattgtacagaggagtgagctgaggcacagagaagtgtgtcacttccccgmaaggccacacagctgctgcaggagcaggggcaggcggtcttgagatgttccttgtctgcatgcctgcgccacccacttgctcccccacggggtgcttttcgaccctgggagggctgtcccagggtcaggcttgctgccagcacacctactatggacctggcatggagcataatcagcagctagacagctgcggaatgtagcttagaaccggaacatacaggattgtaggtgcagaagctaaaagctaagtgaatgaaaatgtcattctcagttcttcgctctggggtgagagatgtccccaaagcccgagtttgttctttcttttttttttgttgtttgagacgaagtcttgttctgtcacccaggctggagtgcagtggcgcgatctcggctcactgcaagctccgcctcccgggttcacgccattctcctgcctcagcctcccgagtagctgggactacaggcgcctgccaccacgcccggctcattttttgtatttttagtagagatggggtttcaccatgttagccaggatggtcttgatctcctgaccttgtgatccacccgccttggcctcccaaagtgctgggattacagtcgtgagccactgcgtccggccagcctgagttctttcatggtggcccagtgaggtttcaaagggtgacattcccaggcagggctcagggagattcttcctgtcatctagatatctgtgaaaagagagtccttcctgcatacctgggtggcagattcaactgtgtgcaggccccagggaggtaaggtgggcaggcgaggggccaggcacctggcgagccgtcctatagatggggcgatgagaggcccccagcccagggacggcagggagttggggggccagcggtggccaggagcctcgtttcatctgaagggggtactcgtggctcagtggcagctggtggtggccatgttggaatgtgacagtgaccgtatgcttaaatgttatcaagggaaaccagcgttgcatactggtatgggaaatctcttttttaagtgctggtagttaatttttcccaagcccggtgcaggctaaatacagcgcaggtgctgatttggcctgggccagattggactgctgtggactccactgatgagaggcatatatacttccgaggcacctgcatttgttgagtttccaaatggccccattttattttcccctgtggtcagtgcracctgtgaggatgtgaaggagcccaacaaaggcccctctagtgtccccagcccttggctttccctgcgcaggttcctgacctggttaagagaatgaccgagaacaaacaccagactctgctcctgatgagggagtggtgggggcaaggctyctgtgccaagcctgtcatgggcccctgtgggcatccaggagcagtggagagagtgcttgcctcttattctccatgtggtcttcttctgcaggtgcccagtcccctggaaggcagtgaaggggacggagacactgactgaggcgatgggagctgcycaccagagtgcctctgagcagctcacagtgtgtgcccagatgtgccacccctgtgggcagcaagaagctgggatcgctgcagccatgttttcccggccatgccggcgttgtaacctcaggaccttcccttgtaggaacagcctttctcgaatctgttttcagctcttgcattgcatagatgaacctcagcatgtaaagaactatttttttaaagaagtgattttcttattaaacaagtacaaattttgcttagtcaatccttggtttgcctttttcttagtcttttttaacatttttttcgtccacagagatgagcacagcatggtgtcccgttgagaacagatacggctgaacaaaagagaaaggcccaggaggttggctcagcctgtaatcccagcacttgggaggctgaggtgggcagatcgcttgagtacaggagttccagaccagcctgggtaaaatggtgaaaccgcgtctctgcaaaagattagctgggcatggcggcatgccctgtagttcagctgctcaggaggctgaggtgggaggattgcctgagtctggagaagtcgaggctgccctgattgccactgcactcaaaaaaaaaaaaaacaacaacaaccaaaaaaactggccaggcgtggtggctcatgcctgtaatcccaacacttcgggaggctgaggcaggtggattacttgaggtcgggagtttgagaccagcctgaccagcatggagaaaccccgtctctactaaaaatacaaaaattagctgggcgcgatggtgggcgcctgtaatcccagctacttgggaggctgaggcaggagaatcgcttgaacctgggaggtggagattgcagtgagccaagatggcgccactgcactccagcctgggtgagagagccaaactccgtcaaaaaaaaaacaacaaaaaaacccagcatcctgcactctgcagggtggtcccgaggcagggctgtggagggcactgaagcaggggccccgctgacctgccgcatccccgagaggggtggcagccacgggctcctcttcctagacagccccatgcgtgcagcctttgccctggttgcaggtcggtactcgcctcagcactgtcccggtgccaggcaggtgggggttggggcagagggcagaaggaaagggtgcatcgcggaacaggcccttagtggagcttactggaagaccccaccagccgctgctgcacgtcattggtcacaggtgcatccagcggcccttcgtagctgcaagggaggctggggaagactgcttttgaagtggcgcttagcgtggaacaaaacacactgcgttagccaggagcaggggatccttggctggcgggctgccaggagcccagggaggggctcagcggaggaagtgccgtgcatacacgtggcctcccagcctgcagcccgtgggcgcacgtgaccaatgcacgagtgcctgatgccccagcggtgcacacaactaatgcgcatgcgcctgacgtgccaacaatgcatgtgactaatgcgcagtcgcctgtcgccccagcagtgcgtgagtgacatgtgcacgtgcccatgatgcggtggacaccgtgtgtgagaagtggggcaggacaggtgggattgggagatgcttcaggcagtgagctcctagggcgtggggtgcccaagagagtggagctggttttagggattttggccagaggagcagtggggctcactgcttcgggagccagggagtgcaggtgtgaggcccactgggctttgggtttgagggatggatgagctgggccgttaactggaacgggagacagggaaaggaatgggtttggagaacaagcaggagcttggttctaagcatgttaattttacctgggatagacaggactttattttttatttttattttgtttgagacggagtctcgctgtgttgcccagcctggagtgcagtggcgcgatctcggctcactgcaacctgcgcctcccgggctcaagcgattctccttcctcagcctccagagtagctgagagtacaggtgcccgctgccacgcccggctgatttttgtatttttggtagagacagggtttcaccatgttggtcaggctggtctcaaactcctaagctcaggtgatccacccgccttggcctcccaaagtgctgggattacaggcgtgagccaccgtgcccggcctgggtgacccatttaaatcacttttgatgatcctggggtatgtgacattttaaaataatatgtatatatggaaggaaataaaaaactataaaaaagggaagttgcctttcattctctaattcccagtatccctgtccagaggccactgctctcactagtgccctgcggcttcttctggagagttccatgtatatataagcgtgcgtgagcctttgcaaggatggtaatgcatctccagcaaacacgggataatgttttcactgctctgtggtagccaaaaggtttttctttcttctttttttctattttgagacaaggtcttgttctgtcgcccaggccggagtgcagtggtgcgatcatagctcagtacagcctccacctcctgggatcaagctatcctccggcgtcccaagcaactgggactacaggcgcaccaccatgccaggccaatttaaaaaaaaaaaactggtcagatgcggtggctcacacctgtaatcccagcactttgggaggccgaggtgggcggatcatgaggtcaggagattgagactatcctggctaacacggtgaaaccccgtctctactaaaaatacaaaaaattagctgggcgtggtgacatgcgcctgtaatcccagctgcttgggaggctgaggcaggagaatcgcttgaacccaggaggtggatgttgcagtgagccgnnnnnnnnnnnnnnnnnnnnnnnnnnnnnnnnnnnnnnnnnnnnnnnnnnnnnnnnnnnnnnnnnnnnnnnnnnnnnnnnnnnnnnnnnnnnnnnnnnnnnnnnnnnnnnnnnnnnnnnnnnnnnnnnnnnnnnnnnnntgataaattgattttcaccaaaattaatagcttctcattggaacagccagtctgaaaaaatttgctgaacccatcatttcacttacttggactcagtatttcatgcctggggatgaagcagtaaagtcctaaggtgggggagttgcagtatggttttctcagtgtgagtgaggatggaaaccgttgtgtcgtggtgctccgtgttgccactgggcagcaccacctgttacttgtgtcctgaatcctgcactaatggctgaatcaacacctcacaccaccaactcctctcctctcttctcctttagccgcttcatcctggctgcccctgcctggattccatagtccaccacttccaggattctgtgcctccttcagacggtgccttggcatgaaagcccctagccgtggtttttacccaactgctggccttgtttttttttggtttttttggttttttttttcgtagcggtgctctgtcgcccaggctggagcgcagtgttgcgatctcagctcaccgcaacgtccagctcctgggctcaagtgattcttgtggctcagcctcccgaatagctgggactacaggcagcaccatgaccaactaatttttgtatttttagtagagcctgcgtttcaccatgttggccaggctggtcttgaactcctgaactcaaatgattcgcccacctctgccttccaaagtattgggattacaggcatgagccactgcacccaatcaactgccagccttctaatgctcatttatgacgatgagggagaatgtgattggtgctgtgctctgtgtccactgtcactgccatttcaacagtcacccagagtttctactggcagacagtcccatgacacttctctaagtcagtgtcttctcaccggcatatccgattgcctccattctcctcaccccagtgaccactgtcccatgctctcagcaggtgggtcactcccactccaggagagaatgggggccaggaaatgccactccccatcctcttgaatcccaccccaggcttgcacttcctgctttgcagtggaagaggtctccctctctagtgcccatgccctcgatggtttccccgttgtctttctcctgccttctcagaccttgcactttcactctgtcttttctcgtaccgtcagcatgtctactgcctcacggcacttcaacatgcaaaatcactcccctctgttatccacctaatcttatccccttccaaccttccctctgtctcttcccttttatagccaaattgttttctctttaaaaatttcagtttatttattttttattttttgtagagatgaggcccaggctggccttgaactcctgtgttcaatatcctcttgtctcagcctctcaaagtgctgagattacaggtaagagacactgtgcccagccaaaaattttcagtgtgtttaaagttaagcattcatcactttacctcgcagcccacatttcttttttaaaaaataaatgcagacataattcacatacataccataacattcacccttttaaagtatatcattcagtgacttttagtaaatttataaagttgtgtaaccatcaacactatctcattttatgacatttttatcaacccaaaaaggaaaccccacattcatttgcagttactgcctatcctctccccacagtccctgacaaccactaatttactttctttttcttttctttttttttttttttgagatggagtcttgctctgttgccctggctggagggacagagtctcactcaggctggagtgctatggcataatcacggcttcctacaccctcagcctccctgggctcaagtgattctccctcagtctcctgagtagctgagactacaggtgtatgccaccatgactgacttttaaattttttgtagagatggggtctctctatgttgcccaggctagtcttgaactcctgggctcaagggatacaactgcctcagcctcccaaagtgctaggattacaggcaacagccaccgtgcctgcccttttaattgttatgttgtaaattatttactttggacacgagttccatgtcagacatatggacttaaggtaatttctcctgttctgtggattatcttttttaaatggtgtcatttgcagcacaaaagttttaaattgtgatgatgtccaatatatctatgtttgttagttgcgttttcagtgtcatatctaagaaaccatttcctaacccacaaccccgaagatttatgcctatgtctttatctggagacagaatctcattctgttgcccaggctggagtgcagtggcatgatctcggcttactgcaacctctgcctcccgtgttcaagcgattctcctgcctcagcctccggagtaactgggattacaggcgcctgccaccacgcccagctaattttttgtatttttaatagagacagggtttcactatgttggcccggctggtactggaactcctgaccttaaatgatcttcccgcctcggcctcccaaagtgctgggattatagacgtgagctacgtctgtgtcttttaatagagttttgtcgtttttggccgggcgtggtggctcacacatgtaatcccagcactttgggaggccgaggtgggcggatcacttgaggtccggcgttcgagaccagcctggccaacttggtgaaccaacccccctactaaaaatacaaaaaattaaccaggggtggtggcgcgagtctgtggtcccacccactcgggagactgaggcaggaggatcactggagtccaggagttcgaggccagcctgggccacacagggtttgggtcttgcatgtgagcctggtctgtttggtgaatctgcagagtgtgagagctggcggcccacttctgttccacgtgggcgcatttcccgaactgcgcgtggaaaagccgggctgccgcgactccgtcagtctcggccccgcccccgccttcctcagtctcggccccgccccgcctccgtctgtctcgggaccggccccgcctccgtctgtctgggaccggaccccctccgtccctctcggccttgggttcggcccccgcccaccccgcagagtctcgcggagccctagtcctccggcgccctcgacctccggcgccctcgcgcggtcagagcggcgnnnnnnnnnnnnnnnnnnnnnnnnnnnnnnnnnnnnnnnnnnnnnnnnnnnnnnnnnnnnnnnnnnnnnnn

SEQ ID NO: 93728 - DNA, 17386 bp, Homo sapiens
ttttatgtatggtgtgacataggagtccaaattaatttttttgcaattcacttgtcccagcgccatatattgaaaggctctttgtcactgaatttcctcggcatctttgtcaaaaatcagttgaccatgaatgtaagggtttatttctgggctttaattctattgcattgatctgtatgaatgttgaatgttcttataccagtaccacactgtcttgattgctgtagctttgtgcttgatatggttaggcttggtgtccccacccaaatcttatcttgaagtgtaatccccataatcactataatccccatgtgtcaagggagagaccaggtggaggtaattgaatcgtggaggcagttccccatgctgttctcatgacagtgagttctcataagatctgattgttttataaggggctctttcccctttctcttggcgctgcttcttgctgccttgtgaagaaggtgccttgcttccccttcaccttgattgtaagtttcctgaggcctccccagccatgctgaactgtgagtcaattaaacctcttttctttataaattgcctagtctcagaaagttatttatagcagtatgaaaccggactaatacagtgctgttttgaaatcaggaagtgcccatccttcaactttgttctttctcaaggttgttttggctattttgtgtcccttgtatttctttcactatttttcttccttttgtagttttaactgaccattttatatgacttcattttttctctccttttaattttttctatttttttcttagcatattcattgtgcttctttttttttactttttaacaacttttttcagtggttgctctaggttccctttattttttttattttttttgtattttttagagacgtggtctcactgtgatacccaggctggagtgcagaggtgtgaacatggttcactgcagcctctacttcctgggctcaagcaatcctcccacctcagcctcccagataggtgggattacaggcacaagccaccacaccactctaattttgttgtagtagtttttggtagagagtctcaccgtgttgcccagtctggtcccaaattcctggcctcaagcaattctcccgcctcagtttcccaaagtgttgggattacagacatgagccaccatgcctggccaactcttgtattttaatctgaattttagaatcagcttgacaacttctgcaagaaagaaaactggggttttgataggattgccttgaggctgggcatggtggcttatgcctgtaatcctagcacttttggagggcgaggtgggcggatcatctgaggtcagaagttcgagaccaccctgggcaacatggtgaaactccgtcattactaaaaatgcaaaaattagctggatgatgtggcacacacctgtaatcccagctactggggcggctaaggcactagaatcgcttgaacccaggaggcggaggttgcagtgggcctagatggcgccactgcactccagcctgggagacagagcgagactccatctcaagaaaaaaaaaagatatcacactgtaccccataagtaagtgcaattattatgtgtcaaaaataaaaaattatataagaactaataaacaagtacaccaatgttgtagggtacaagatcaataaatgaaaaccaatcatatttctggccgggcatggtggctgggctcagtggcacaagcccaggagtttgagaccagcctggccagcatggtgaaaccctgtctctactaaaactacaaaaattagccgggcgtggtggctcatgtctgtaatctcagctactcaggaggctgaggcatgagaatcacttgaccctgggaggtggaggttgcagtgagccaaggtcacgccactgcactccagcctgggcaatggagtgagactctgtctcaaaaaaaaaaaaaaaaaaaaaaaaaaaaaagtccatgtagtacatgtatcaaaacatcacaccgaggctggctgcagtggctcacgcctgtaatcctagcactttgggaggccgaggcaggtggatcacttgaggtcaggagtcaaagaccagcctggtcaacacagtgaaaccccgtctctactgggaaaaaaaaaaaaaaaaaaaaaaaaaaggaagaagaagaagttggcagcatggggagggggaggaacaagtggggagtggtgctgttgttaaaaaaaatactggtctgcttcaacccaaggggaatcagaagatcaaaagcagtttgggaaagccagaaccgtcagggatggagggagaaggaaaatccagggggtggggggttctgtttggcaactggggtgaagggattgctttctccctgctgggattctccccaacccttccggtcaggcaggaagggagcagcctatttcactgcaggcccagatgaagtgcgtgcatggaccatccttgaactcctgggtgcaagggttccttctgcctcagcttcccaagtagttaggactacaggtgtgtgtgccaccatgtccaggtaaggttttttatttctggggggtgggggagctgtctcgctatgttgccctggctggtcctaaattcctgggctcaaggaatccttgcactcagcctccccagtggctggattacaggcataagccactatggccagccctcctgtaatacttttaaatcatctctatgttaagcctggctaatttttgtttttttatggctttttgttgttgttgttgttgttgttttgtagagatggaatttccccatgttgcccaggctggtctggaactcctgggctcaggcaatcctccctcctcggcctcccaaagtgttgggagtataggcatgagctactgtacttggcctagcagtggtgttttaaataaatatgcttttggccaggcatggcagctcacacccgtaatcatagcactttgggaggctgaggtggtagggctgcttgggcctgggaggttgaggctgcagtaatctgtgatcacaccactgaactccagctggttgacagagcaagacactgtctcaaaaactgtgtatgtatatatgctttggattttcatactttctctagcaccgcagactgctaaataatcatagtcaattaatggaaatgaactcctattcttgcttattgagttatgaattaaaatgagtaaattatgaaaacatactaattattgatattttgtgtagatcagcaatatttgaactttctcccacctgagtggaaggcaagctaaacttggaagcactcttggatttttttgttgttttttctttttttattttaatatttttattgcttatatttcttttttacgttttaatctgttaaagtcaaagattttttaaattcctagactgatggagagtagttatttaaaagcttgacaaaataattttaatactgtctaaccagcaaagtttatgaaatctttttttttttttttttgagacagggtcttgctctgtcacccaggttggggagcagtgttgcaaccatggctcactgcagccttgagtaccaggcccaagcaatcctcccacctcagcctccagagtagctgggcctacaggcaggcagtgccacgccaggcttattttttttagtagtgacagggtctcgctatgttgcccaggctagtcttgaactctcaagagctcacacaagcctcctgcctcggcctcccaaagtgctgggattataggtctgagccactgtgcccagcctgaagtctttaattgatacacctaaagttacttttatgatacatcattttatttatttatttatttatttatttatttatttatttattttgagacagagtcttgctctgttgttcaggctggagtgcagcggtgccatcttggctcactgcaaccttcgcctcctgggttcaaccgattctcctgtctcacccttctgaatagctgggattacaggtgtgggccaccaagcccggctaatttttcatttttagtagagatggggttttaccatgttggccaggctggtcttgaactcctgatctcaagtgatctgcctgccttggcctcccaaagagctgggattacaggcattagccactgcatccaaccttatgatgcataattttagagattgcttttttagacaaatattgaactcatgtattaaatagtttaatgaaaactcagactctatctgatatgatacctcttttttttttacttttattcttaagttatatatttattataaaaatattcaagttagtagggaatttttaaaaatgtaaaattctgttgttcatcttaaatcccatttttcagtagtgactactgtgaacactttttgggaggggggaggggacagggtctcactctgtcacccaagctggaatgcagtggcacggtcttggctcactgcaacctccaccttctgggttcaagagattcttgtacctcagcctcccaagtagctgggactacaggcgtgtgccaccatgtctggctaattttttgtttgtttgtatttttttgtagagacaggtttttgccatgttggctaggctggtctcgaactcctggcctcaagcagtccacccacctcggccttccaaagtgttgggattacaggcgtgagccaccatgcctggccctgttaacagttttgtgtgttaccttccatatctttatctatgcgtatacaaatctgtcctctgtaacccattttgtacatattttttattgtataatttattttttaaaaaattcttttcatagaatactttttcacactaaagattcccacagtgggaaaataacaatttattacttatagttttatgtttgtggacagattgttttagaacaagtaaaacacacttaagaattaagtctcaatttggaatttgtaatattttgatgcatctacaaggacgacctagtccttaagtggaacttctgtatattcagaagctctttaagcttttcttcacaggatttagaaattcataatgtgagaaatcggcatttcctaattttaaactttccctagtatatgtagtcatcagtagctggtatctaccaaacaaagagggaagtttttgaaaattaaacccggctaattttctgcaaagtttttattcatgaattaacagtatttccctttgtccatttttcccagggcaaatatagaagcagtttggtcaggtactggcagtaataaagctggattctctttaagagattgatgaggtcgagcgcggtggttcacgcctataatcccagcactctgggaggccgaggcaggcggatcacttgaggccaggagttaagagaccggcctggccaacatggtggaacctcgtctctactaaaaatgcaaaaattagcctggtgtggtggcgtgtgcctgtaatcccagctactcgtgaggctgaggcaggagaattgcttgaacgtgggaggcagaggttacagtgagctgagatcgtgccactgcactccagcctgggtgacagagcaagactcggtctcaaaaaaaaaaaaaaaaaaaaaaaaaaaaagtggagggaaatcatacgtttgcatctgtaatgtccatgtatcatggactctgccctagactagactagtgtcgtccagtgcagtagccgctagccacaggtagctattgaaaacttgaagctgggcatggtggttaatgcctattatctcagcacttgggaggctaaggcaggaggataacttaaacccaggagttcaagatcaggttgggcaacacagccagaccccatctctgcaaaaaattttaaaattagtcaagtgtggtggcatgcacctgtagttccagctacttggaacggtgaggcggcaggatcatctcagcctggaagatcgaggctgcagtgagccatgatggcaccacagcactccagcctgggtgacagagtgagaccctgtcttaaaaaacaaacaaacaggggccgggtggtgtggtgtcggtgtcggcagcatccccggcgccctgctgcggtcgccgcgagcctcggcctctgtctcctccccttccagccctcacctccacgcgggaccgctcgcgccagtcaactccgcgcacgttgcccctgcttggcagccaataaaagggggctgaggaaataccggacacggtcacccgttgccagctctagcctttaaattcccggatcgggcacctccacgcaccgcggctagcgccgacacccagctagcgtgcaaggcgccgcggctcagcgcgcaccggcgggcttcgaaatcgcagtcctccggcgaccccgaactccgccccggagcctcagcccctggaaagtgatcctggcatcsgagagccaagatgccggcccacttgctgcaggacgatatctctagctcctataccaccaccaccaccaccattacagcgcctccttccagggtcccgcagaatggaggagataagttggagacgacgcccctctacttggaagaagacattcgccctgatataaaagatgatatatataacctcacctacaaggataaggaaggcccaagccccaaggttgaatatgtctggagaaacatcatccttatgtctctgctacacttgggcgccctgtatgggatcactttgattcctacctgcaacttatacacctggctttggggggtattctactattttatcagtgccctgggcataacagcaggagctcatcctctgtggagccactgatcttacaaagctcggctgtccctgtggctctttctgatcattgccaacacaatggcattccagaatgatgtctatgaatgggctcgcgaccaccgtgcccaccacaagttttcagaaacacatgctgatcctcataattcctgacgtggctttttcttctctcacgtgggttggctgcttgtgcgcaaacacccaactgtcaaagagaagggcagtacgctagacttgtctgacctagaagccgagaaactggtgatgttccagaggaggtactacaaacccggcttgctgttgatgtgcttcatcctgcccacgcttgtgccctggtgtttctggggtgaaacttttcaaaacagcgtgttcgttgccactttcttgcgatatgctgtggtgcttaatgccacgtggctggtgaacagtgctgcccacctcttcagatatcgtccttatgacaagaacattagcctccgggagaatatcctggtttcacytggagctgtgggtgagggctttcacaactaccaccactcctttccctatgactactctgccagtgagtaccgctggcacatcaacttcaccacattcttcattgattgcatggccgccttcggtctggcctacgaccagaagaaagtctccaaggccgccatcttggccaggattaaaagaaccggagagggaaactacaagagtggctgagtttggggtccctcaggttccttcttcaaaagccagccaggcagaggttttaatgtctgtttattaactactgaataatgctaccaggatgctaaagatgatgatgataacccattccagtacagtattcttttaaaattcgaaagtattgaaagccaacaactctgcctttatgatgctaaactgacattatttcttctcttatcctctctctcttctaggcccattgtcctccttttcactttgttgctatcatcctcctttctcttattgccacccaggcaagcagctggtcagtctttgttcagtgtccagcttccaaagcctagacaacctttctgtagcctaaaacgaatggtctctgctccagataactctctttccttgagctgttgtgagctttgaagtaggtggcttgagctagagataaaacagaatcttctgggtagtcccctgttaattatcttcagcccaggcttttgctagatggaatggaaaagcaacttcatttgacacaaagcttctaaagcaggtaaattgttgggggagagagttagcatgtatgaatgtaaggatgagggaagcgaagcaagaggaacctcttgccatgatcagacatgcagctgcctacctagtgaggacttcaagccccaccacatagcatgcttcctttctctcctggctyggggtaagaagtggctgtggtgtttggcaatgctaattcaatgccgcaacatatagttkaggccraggataaagaagagacactttaagtttgtagtaaaagtggtctctgctggggaagggttttcttttctttttttctttaataacaaggagatttcttagttcatgtatcaagaattcttgaagttgggtgtttccataattggtaaaaacagcagctcacagaattttgagtattccatgagctgctcatyacagttctttcctctttctgctctgccatcttcaggatattggttsttcccctcatagtaataagatggctgtggcatttccaamcatccaaaaaaagggaaggattttaggaggtggagtcgggtcaaacaakaaatatatatatacatatatacattgcttagaacgttaaactattagagtatttccctcccaaagagggatgtttgaaaaaactctgaaggagaggaggaattagttgggatgccaatttcctctccactgctgtacatgagatggrgaggttgagggacaggatctataggcagcttctaagagcraacttcacacaggaagggatctgagaacacattgccrggggcttgagaaggttactgagtgagttattgggagtcttaataaaataaactagatattaggtccattcattaattagttccagtttctccttgaaatgagtaaaaactagaaggcttctccccacagtgttgtgccccttcactcattttttwttgrsgrgrwggggggctctgttaacatctagcctaagtatasaactgcctggggggcagggttaggaatctcttcactaccctgattcttgattcctggytctaccctgtctgtcccttttctttkacyagatctttctcttccctgaacgttttcttctttccctggacaggcagcctcctttgkgtgtattcagaggcagtgatgacttgctgtccaggcagctccctcctgcasacagaatgctcagggtcactgaaccactgcttctcttccgaaagtagagctagctgccactttcgcatggcctccggagtgtctccacctacacctctgtgctcccccgccacactgatggctcaagacaaggctggcaaaccctcccagaaatgtctctggcccagaaagcctctctctccctccctctctcatgaggcacagccaagccaagtgctcatgagccagtgggcctgccacagagcaaacgagggtttattttcagtcccctctctctggatcagaaccagagagcatgctgaatgcccctctgcttgctcggtaagggtgccccacctgaatcagtgctctcagctggcagtgcaatgcttgtagaagtaggaggaaacagttctcactgggaagaagcaagggcaagaacccaagtgcctcacctcaaaaggaggccctgttccctggagtcagggtgaactgcaaacctttggctgagacctgggatttgagataccacaaaccctgctgaacagagtgtctgttcagcaaactaaccagcattccctatagcctagggaatagtatagaagtctggcaaaaacagaaacagaacatcagtgttttgagaaccttggactactcctgtccctgtagctcagtcatcaaagcagaagcctggctttgctctattaagattggaaatgtacactaccaaacactcagtccactgttgagccccagtgctggaaggaaggagggcctttcttcctgtgttaattgcatggaggctacaggggttagcctggactaaaggcatccttgtgttttgagctattcacctcagtagaaaagaatctaagggaagatcactgtagtttagctctgttgacctgtgcacctaccccttggaaatgtctgctgttatttctaattccacaggtcataagatgccttcttgatgatatatgaacgataaaaacaactttcacttcttcctattgtaatcgtgtgccatggatctgatctgtaccatgaccctacataaggctggatggcaccctcaggctgagggccccaatgtatgtgtggctgtgggtgtgggtgtgggtgtatctgctgagtaaggaacactattctcaagattctaaagctcaattcaagtgacacattaatgataaactcagatctgatcaagagtctggatttctaacagtccttgcttcggggctgtgctggcaacttaactcgggtgccttacatcttttctaatcatagtgttgcatatgagcctgccctcactccctctgtggaatccctttgcacctgagagcctactgaagtggctggtagaaaaaggggcctgagtgaaggattatcagtatcgcgatttgcaggattcccttctgggcttcattctggaaacttttgttagggctgcttttaagtgcccacatttgatggagggtggaagtaatttgaatgtatttgatttatatatatatatatttttaaggttaaaagatggttgtagcatttaaaatggaaaattttctcctcggtttgctagtatcttgggtgtattctctctaagtgtagctcaaataggtcatcatgaaaggttaaaaaagtgaggtggccatgttacgctggtggttaaggccagggcctctcctaccactgtgccactgacttgctatgtcaccctgggcaagtcacttaactataaggtgcctcagttttccttctgttaaaatggggatrataatactgacctacctcaaagggcagttttgaggcgtgactaatgctttttagaaagcattttgggatccttcagcacagggattctcaagacctgagtattttttataatagcaatgtccaccatcaacttgatatgtccgtgtgtcccagatgctgtcattagtctatatggttctccaaaaaattgaatgaatccattggagaagcagtggattaactagccagacaaaatttgagaatgcataaaaaacacattgccacggaaacatacagaggatgccttttctgtgattgggtgggattttttccctttttatgtgggacatagtagttacttgtgacaagaataattttggaataatttctattaacatcaactctgaagctaattgtactaatctgagattgtgtttgtttataataaaagtgaagtaatccaaaaaacaaacaaacaaaaccataaaacaaaaccttgaaatgtggctaatctggattgaattatgctgtaaatgtaaaatacacatcagatttctaagagttagaacataaaagagaatgtaaagtatctcaccagtaatttttttaattgatcacatgttgcaatggtaatgtttaggggtatattgggttaaataaagcatgttattaaattaattttagctgggcattgtggcacatgactgtagtcccagctgctgggaaggctgaggtattttttaaagtgagtgttggccaggtgcagtggctcatgcctataatcccagcactttgggaggccgaggagggtagatcacctgaggtcaggagtttgagaccagcctgaccaacgtagtgaaaccccgtctctactaaaaatacaaaaattatccaggcatggtggcgcgtgcctgtaatcccagctactcaggaggctgaggcaggagaatcgcttgaacccaggaggcagaggttgcagtgagccgagatcgcaccattgcactccagcctgggcaacatcagtgaaactccatctaaacaaacaaacaaacaaacaaacaaactgaatgttaaggattgctagagcccaggagttcaaggtgcagtgagctatcatcatgccactcactgtactccagcctgggcaacagagcaagaccctgtctctttaaaaaaacaaacaaacaaacaaacaaaaaactatgttgcccaggctggagtgtactagctatttacggtattcacaggcacaatcatggcacgctatgggctggaactcctaggctcaaatgatcctcctcttcagactcccaaatagttggaactacaagcccttgttagcacacctgattttttttttttttttttttttgagatggagtctcactctgtcacccaggctggagtgcaatggcgcgatctcggctcactgcaacttccgcctcctaggttcaagtaattctcctgcctcagcatctcctgtagctaggattacagacacgtgccaccacacctggctactttttgtatttttagtagagatgaggtttcaccatgttggacaggctggctcgtctcgaactcctgacctcgtgatctgcctgccttggcctcccaaagtgctggaattacaggcatgagccccgtgcccagccacgcttgagtttttaaaaagacctgggtgtttatctgggatgtgagcccgtttccttttactgtttttaatatgactgctaaaaattttaaactacacatatggctcacgttatatttccactggacctcgctgctctgaactaacagatgaggaccataacactggctttaaaaattacgtaatatgggctgggcgcggtggctcatgcctgtaatcccagcactttgggaggccaaggtgggcggatcacaaggttaggagactgagaccatcctggctaacatggtgaaaccccatctgtactaaaaaatagaaaaattagccgggcgtggtggcgggtgcctgtagtcctggctactcaggaggctgaggcaggagaatggcaaaaacccgggaggtggagcttgcagtgagcagagatcgcgccactgcactccagcatgggcaacagagccagactctgtctcataaataaataaataaataaataaataaataaataaataaattacataatatggcctggcacagtggctcaagcctgtaaactcaggaatttaggggaacttggccgggcactgttgctcacgcctgtaatcttagcactttcggaggccaaggcgggcagattacttgaggtcaggagtttgaaaccagcctggccaacctggtgaaaccccatctctactaaaaatgcaaaacaattagccgtgcctggtggtggtagtggatgcctgtaatcccagctacttgggaggctgaggcaggaaaatcgcttgaacctgggaggtggagattgcagggaaccgagatcatgccactgcactccagcctgggtgacagagcaagactctgtctcaaaaaataaatagataaatagatagatagatagatagatagatagatagatagatagatagataaaaaggggaacttggaatggagaccatgcgggagtggtgctgggtacgaggcctgtgtatcttgttccagggctatcttgagtcacggtcccctgacgtgggctgctgtcatctcatcatctcaacaatggccaggttgtagattaactgccttgaggtgatctctggtatttagcagttgggtcttcatgcctgatgtatttcaaaattagcccctggagtttctaaatatgtgcataattagataagcgagcactgtgcacaagagtatctatctggtgggaagggagagaaacaaagagctttatttattcatttattttcgagacagagtctcactctgttgcccaggctggagtgcagtagcatgatctctgctcactgcaacctctgtctcctgggttcaagctattctcctacctcagcctcccgagtagctgggattacaggcttgcaccaccacgcctagctaatttttgtatttttagtagagataagctttcaccatgttggccaggctggtctcaaactcctggccgcaagtgatccacctacctcggtctcccaaagtgctgagattacaggcatgagtcaccaggcccagccaacaaataattttaaagtatgtttcaaggctaaatgtaagaaaggaaaaaagtttcaaaacgcattttgaagctgagctacttggttacatattgatgcttttatttctgtaggatagatttcccaaacagactgctagctcaaatgttattttccaaattggctttagcaatttatattcccaccagcatgtatgagtgtcctttactcatgctttcagtatgaggtatgattactctttttatttgtttgtttgagacagggtttctttcgctctgttacccaggctggaatgcagtggcatgatctcagctcactgcaacctctaatcctggctcaagtgatcctccagcctcagcttcccaagtagctgggaccaaaggcatgagccaccatggccagcccagttttgtatttcttgtagagacggtgtttcaccatgttgtccaggctggtcttgaactcctgagctcaaagttatctgcctcccttggcctcccaaagtgctgagattacaggcatgagccaccgtgcctgatgcagatatggttactctttataacttttgtcagtcactgaaaagtggcatctctttcttgttttaatttgctttttcctgaatagtgaggctgaacagtatctttttatatttttattgaccatttgaatttcctcttctgcaatttgcctatttgcagcctttgtccatttttctatttgtcattagtttctttctaattactttgtagaaactatttatatgttacagactttcattcatatgtgttacaaatattttccccaatctattgtttttttcttaatttcgtttacgctctcaccatggaaaaaacttaactttcctttatgattcctcttaatcaagttctcttcatacacacctcctcacttttatttttattattttatacttagatatctaatgcatttcaagttatattatcttacatgatataacatagtggctgattgacccaaatttgcaatcaactctataaaatagaatctctactacaatgccttaatcaaataggggtgaggcatggtggctcacacctgtaatcccarcactttgggaggccgaggtgggcagattacctgaggtcgggggttcgagaccagcctgaccaacatgaagaaatcccaactctactaaaaatacaaaattagctgggcatggtggtgcatgcctgtaatcccagctacttgggaggctgaagcaggagaatcgcttgaacccagcagacggaggttgcagtgagccaagatcacgccattgtactccagcctgggcaacaagagtgaaactctgtctccaaataaaaaaaaaaaaaagtttttttttggtttgttttttcatataacaagaagaatagaagtaaaagatcaggacaggtgtggtggctccaccatgccatcaaagatccagacatcttctccctttcggttccacaactcaggaatcattcttttcttttttctttctttctttttttttttttaagatggagcctcgctctgtcgcccaggctggagtgcagtggtgcgatctttggctcgctgcaacctctgcctcccgggttcaggtgatcctcctgcttcagcctcccgagtagctgggattacaggcacctgtatcttgcccggctaatttttgtatttttagtagagaggagttttgccatgttggtcaggctggtctcgagttcctgacctcaagtgatctgcccacctcggcctcccaaagtgctgagattacaggcacgagccaccatgcccagcctattattttctttttcaggcaagccagtttctttactaaaagggtcatatttacatgttacgggcaggaagaatatagggtgaaggacccccttcttttctttttatcaagaaaacaatagctttcctggaaactgtacccattagacttctaattgtgtctcaccaagtgggacatggccactcttattttcaagagagtctagggtggtaaatagatttgtctgggcacattgctgccctaaacaaaatcaagattctgaatgaaaattgggtagggaactagcggtgtctgtcataggagctagctttattttcttctagttgtatactcaattatgccagaaccgtaaaataaataaaataaaaaataaaataataaaataaaataaataaataaaaagtcatcttggtccttgtattagtctgttctcatgctgctataaagtactgcccgggaccgggtgatttataaaggaaagaggtttaatcaactcacagttgcacagggctggggaagcctcaagaaacttacaatcatagcagaaggggaggcaaacacatccttcttcacctggtggtaggaaggagaagtgcccagcgaagggggaaaagcccctyatagaaccatcagatcttgtgagaactcactcactatcactagaacagcgtgggggtaactgcccccatgatttaattacctcccactgggtccttccacgacatgtggggattatgggaactacaattcaagatgagatttgggtggggacacagccaaaccatatcagtcatttattagattgccatgtagttcgatcaattttggggttctatttttcttgttttaaaaaatagagatggagtctcgttctgttgcccaggctggaagtatacaagcatgatcataactcactgcagccttaaacttctgggctcaagcaatcctcccacctcagcctcctgggtagctgggactacaggcacatgccagcacacccggctaccttttttatttttatttttcgtagaaatggggttttgccacgttgcccagggtggtctcaaacttctgggcctcaagtgatccgtgatctaccctcttggcctcccaaaatgctggaattacaggcatgagccatcacacccggcctaatttaaaaaatatttatagacatggggtctcactttgttgtcaaggctggttttgaattcctggcctcaggccaggcgtggtggcctgtaatcccagcactctgggaggatgaggtgggccagaggccaggagttcgagaccagcctggccaacatggtgaaaccctgcctctactaaaaatacaacaattacctgggcgtgatggcaggtgcctgtagtcccagttattagggaggctgaggcggagaatcacttgaatctgggaggtggaggttgcagtaagccaagatcatgccgctgcactccagcttgggtgacggagaaagaccccatctcag

SEQ ID NO: 93729 - DNA, 57175 bp, Homo sapiens
  misc_feature (1)...(57175): n = A,T,C or G
ccgctcactgcaacctctgcctcccaggttcaagcgattctcatgcttgtattgttcttgcacctgttctgcaagtacaacattgtgggaatggaaaatgcaggaaatgggcagtaaggctatgaacgaagcccgcacaggagtgtgggtagcagagttctctagtccaggctcccrcctgaggtgctgggacctagaagaaaagcctctctgcagacagaactggagttaacgctgtccacgataaatggcccaggccctgttaagtttgccccattgagcaaaacaagtacccacccgcctttgcagccttgcctagctcacataaggtgccagcccttgctgtacagcagaacctttggggagctggacaaaagcctatcaaggagcatacccccaggaagcccagtccaggtggggagcccagccacacaatggcccttgcccccacacctcctcattcagtcagctaaggccatggcagctgagctgcctccacagctcatataggaaaagggtgtggaaaggggccaccaatgtggtcaggcctccatggcctgagtaggtcaccaagcctcaggtgcacagacttgatgtcatcaatcagggtctgtcagcacacctagccctcaggaacactgctccccactgcaaccccacaccaaggcatcctgggctccctctgggttctccaggccccagggaagacagacagagtctgccaccaaaggtttgagctctgccactggctacgaagcaataggggatgtcagagcaagggaggaacaggacaggagtatacgtgggcaggaagggattacagccaaggaagacaggaggcaggtgccctgattttgaggctgtgccccagcaggggcttcccagaagctgtatttgtcctaagacacccctctgcagctgaggggctagagatggatatgtagctgtgttaggccattcttgcattgctataaagaaatacctgagaccaggtaatttataaagaaaagaggtttcattggttcacagttctgctggctttgcaagaggcatggtgctggcatctgctcagcctttgaggaggcctcaggaaacttacagtcatggcggaaggcaaaggggaagcaggcacatcacacagtggaagcaggagtgagagagagagaggcactgggaggtgccacacttttaaacaaccagatctcgtgtgaactcagagcaagagctgactcatcaccaaggggatggcccaagccattcatgagggatccacccccatgactcagacacctcccaccaggccccacctccaatattggggattacaattcagatgagatttggtggggacacatatccaaaccatatcagttatcagtagccatactggatgaatgccaggaacttagaattaggacacatggtcatttaggcaagtggcttgtcctgtcaatggtaccctgatagtcgtggggttgccccgtacaaaaagcgagaggaagtctacagagctgtcaaagaggggcaggtggaaaggcctgcagaggagtcccctgctccacaaccaggcgtgcacctcccacatcctcggggctgtaggccccacatgagagcagaaagaaggatgcagaggaaggccaagaacacaaggtgtgcccttggaaaggctgggcacaccaaacacaacctaataaacaacagcaatgagcacacagggaaagtactcacagggaaactgcatcatgaactagaggctgatcccacaccctgccacatggggccccaggccccagcctatcaaccagtggtccttattgccacagcgattggtctttggataggcacctgatgcaagcttcagccaatcaacaggccactcagctggccatcagtaggccatccaatcagagcaaagcccaggactttcttcgactcttagaaaagagaagcaaagtaactggcacagattggagaggatcaaggaaccccgagctggatacatacaaactttgggttaacatggatgattaaatacatatgtttatgtgaaccacctcccaaatatgctccactataatgacacaagacaaagggcagggggagaccaattgcaaggtggcgcaaatgagagatgctaccaagggtggcgggggagagaggggagcagttgtcaagttaggaggcaacaggctgagggacagggaccagcagacggggagggaggggctgaagcagaagtgtccagtgtctggagggatggggccagaaaggcaaggggcatcctgaagaagctatacctggggagggcagctctctccccacctgctccccaattcatcagccaggaatgccccatccaccccaccccagggaggaggacagaggactttcgtttgggagcattgaatggttcagagattctgcaactctgcggtccccaactaaactgctcattgtttcaagcagtccctgttgggtaaatgtcccccattgtaaccggactcggattccaccgcttgaaagccaaatacaagaggagaggtttggtgggaggaaaagtggttttaactagagccagcaaaccaagaagatggtgaattgttgttttaaagcattcaattatctcaaattttaaaatttatcataggattctgaaaggaaaacttggtatgggacatacgtgggagcagtgcagggtacagggtctatgtgtcttgatccaatggctgtcttgagtatcacctatcctgaggtctggttggtgttatctttccttcggccagatggtggtgggtgaattgtttcgactccccctaagttggaggattccgcaggggttccgtgtctggtttttgtttcaagattagcccctggaattcccaaataagcatagagttagataagcgggcatggtgcaaaggagtgtctagtgggaaagggagagaagcagagtttcaaagtacatttcaaggttacattttaagactaaagaaaaagccttaaaatgcatttttaaagctgatttaatgcttggctacactaggctgtggccagtgtgcagtgtggctgctcttggatcaggtgatgtttcatcagctgtgtccagggagggcagggccatgtggcagaacctgggacctctgtgtgagggactaccttggcccctgtccttagcaggaagctatggtaaggaacccttagggagacattaaattggggagaccgtccctgccaatcctttaacctccccagcctcagcgacctcagttggaaagtggtggtaataatactaccactgaccaggtgtggtggccagacattccacactttggcttcagccgctccctccccactctactgtaatcccagcactttgggaggaagaggtaggcggaacctgaggtctggagttgagaccagcctggtcaacatggtgaaaccccatatctactaaaaagaaagtacaaaaaattagccaggtgcagtggcacacgtgtgtggtcccagctactcgtgggtctgaggcatgaaaattgtttgagcctgggaggcagaggttccattgagtggagatcgagccactgcactccagcctgggtgatagaacgagactctgtctcaaaaaaataaaaataaaataataataataataccactgcctgccacactaagattgtctgattagatgacagaatgaatgcaaaagtactttgtgaatcataaatgttttcatcaatattagttataatgacaattgctccttctcctaataaatgtattgcctttctttaggaataaatataacaagaaatgtgtaagatatatatgagaaaaataataaaattcacctgaaggacataaaagaagaccaaaataaatgaaacaacacatacttctagatgagaaaactcaatattataaagaggttagttctctaaaatgaatccctaaacccacaaagtcaatgtatttccaatgaaattgtcaacagcattattttccgaagtgggatgagtagtgctaagatttataagaaagccaacattccagagcagtggggaagggattgcttcaccaccaaatagccatattagagattcccttgcaccatacccaaaccaccatctcccaggacccgggagagcagaaaagaggaatgagaagaaaggcgaggatgtgaggtgtgccctcataatggcggtgcacgcagcacaagcaattgcagaaagactaaagtactgaacaaatagaaaacttggaaaaatattagaaggaaatgtgggagaacatttttgcaatttggggattggaaacggttttcttaacaagatataaaaaccccaaaacaagaaaacaaaggttgaaattcataaaaactagatacttctgtatgatgaaagacacgattaatcaagttgttaagtttagcaatagactaggggagatatcatagtatatttaacagacaaaggattaatagatactacagatgaaatataaaatagtttctccaagtccataggcagaagataatccaatagcaacatagttaagtaatgtaaacaaatcatccttagaagaagaaatgcaatcaccaagaaacacatgaaaaggtgtccagcattttgcaattcaagcaacaatgaggtgacagatcggcaaaaaactcataaagatttatcatctgaaggattggccaagataaagccaaacttctcgtgttggcagaagaaactggtgaagccatgtgaagaggccacgtggtcctgcctaccaagatgtaaaatgtgtacagcatttgaactagcaattcagcctccaggagccatccagaagaaacactgacacacacttagactccggtgaaattcaaggacttctgccacagcctgcttcgtaatagtgaaaatctgaaactgcctcaatgaccgtcaataggaagttgattttaaagtgttacagcacatctgtctggagagatcgcactggccactcctcctcaccccctctgctggacctctgagcgtaggtggcctggagctgggtcctgagccctctttggtctataccgacactacccaatatggtagccaccagtcacgctggacacttgaaaagtggccgatcctgactgagaagggccacgagtgggaaaaacacaccagacctcagtgacttaggcagaagtatgttttgttccagactattgactgagcccgcagctgagttggctccagcaccctggccccctgctccatccactcactgggactccccactgcacagggcaacctctccaggggcacttgggctgcgaaggggagagtgggtggcatcccaggctgaagcttcctgagcagggccagaggaggagccagtccctgtgggcctctgttctgacagtgtcaacctcagccaggcttgtgtgggccaggtgtactgttctggttcagatttcaaggagatagtcagggcaggccgcgccaaagccctccgatgggctcccctactgcctggcagacctgtccagctttggactctggccctgcgacctggaagtcaggctgccaagaggtccaggcagtggcctccactgtggagggtctctggagagtttacagccctagataggggggttagggatgtgagatggtcccaggggcctgctcctgagccacgccaagctgcctgctccctttcctctgcttccagactcacgggatcctctgctcatcagaacaggagtgtgggagaccctgagacactgccccaggatctgaacaggtggcaaaggcttaacaggctrgcggtcactgtagtgacaaggcgattgagtggtcaccatggtgatggggatggaggctctttgccaccagtcccagttttatgcatggcagctctaatgacaggatggtcagccctgctgaggccactcctggtcaccatgacaaccacaggccctctcaggarcacagtaagccctggcaggagaatcccccactccacacctggctggagcaggaaatgccgagcggcgcctgagccccagggaagcaggctaggatgtgagagacacagtcacctgcagcctaattactcaaaagctgtccccaggtcacagaagggagaggacatttcccactgaatctgtctgaaggacactaagccccacagctcaacacaaccaggagagaaagcgctgaggacgccacccaagcgcccagcaatggccctgcctggagaacatccaggctcagtgaggaagggtccagaagggaatgcttgccgactcgttggagaacaatgaaaaggaggaaactgtgactgaacctcaaaccccaaaccagcccgaggagaaccacattctcccagggacccagggcgggccgtgacccctgcggsggagaagccttggatatttccacttcagaagcctactggggaaggctgaggggtcccagctccccacgctggctgctgtgcagatgctggacgacagagccaggatggaggccgccaagaaggagaaggtatctcgccctccattgggcattctgggagtgtttgcttgcctgtccccaacattccatggtttgtttgagcctcagaatctgattttatgcacaggctctttgagaagggtcttgccaggggtgccttctggggcaggaaggcccctactgcctggcagacccatccagctttggactctggtcctgcgacccggaagtcaggctgccaagaggtccaggcagtggcctccactggggaggggctctggagagtttagagccctagatgtgggggttagggacatgaggtcttgtggacaaagcccactacctgattttgagacaacactcactagacatggtgacaagtcaaagatgccttgcctcctaccaggaatcacttcgcagggagcccgagggctgctgtggcctgctgaggagtgcagggcagttactttttccaaaaacaaagagaaatccaggcatgctctgagccagccctgagcccagcagtgagcaaggagagagctggagacaggggactttgctgtgaaacactggggggaatgtgcctgcatcaccccagctgggggcccaggcagagtgggggagaaggggtaagtgggcaragccagtcactttgggcatgcttccctctcgcctctgtgtgaaatgaccaggtcagcataaaccccgggctggctgtgcttctggcagagctaatgatgttaggaggaaaacaaccaacccaagtgagagggtgcgcagccagacagctggaccggccgaggccccaaccaagtcccagatctgcctgtcactggtgctatggcagcaatttggatgagaaatcctgcccaaaggggccccttcaggccacccggggagaaggaagcggctgtctttggcatgaccagaaagatggctcggagctagggagaggtggacatgtgggctgtggagatctggcactttccccaaacaaggagagaaagcatagtgtgcctatgtgtgaatgtgctatgtgtgcatgtttgtgcctgtgcatacctgcatgtgtacatgcatgtgcacatatgtgtgcacagggaatcactttaataaaggccacagcagagctgtccctgagccccttgcattcacagtggcatgtgagtgaaccaccttcttaggctgggcatccagtctcagactctggggctgcccatgccccatcctttatctgctccacgtgtgaggggktgctggtcctgaccagggccagctgtgaaccccagaatcctgggaagtcactgacattcttgtcagggccaagagtggagcaaggcaatgcctcgggcacaaactttaaggggtcaccagaaacatcaatcatcaagatatatgctattttaaataatcaaaatgaatgcaaaaaaaatttatgatggacaacataccaaattctaaacaaaggcaggatgagtatcactggcttctgcacttttctccacccagtctacccctmttctagtgcctggatcgcagggtgccaaggcctggatgagggaagcgtggagctgcaatggccactcctgtctgcytgttctggctgcacagaggactcagtccttgtcttgggggaacctatcttggttttagggtcatcctaaggatctgatgttttccaagtgagctggctgtccaggcccacccaggttcagtccagtcctgtgtctctgggaagtgctgcccctaccccaagccagtgtttgaccttggagcaatgagcaatgccctccttccactttcaaagttgtccccaagacgtcagctgtggttgtctctgtgcagacaccsaggaggaactgtcttctttctccttttggttgctttggaggaaagtaaagtgttgctggtttccctctttctacttctttgattgagagcagccgtcttgccggtaccaaccttccagatcttacctgtggttgcaggagcctgtggcctcagtcctgtgcccagtgacttctccatgtggatgtcagctccttaggggcaagcctgattccactgacactactcccacccctcataagccccttcttaccagctgcagttgcctggtaccccaccatcgctgactcattcctttggcatcaaggttcatcccttactgggccaccacttctgggtggcctgaaatagggccctgggcatccctcttggggaccttttggtctatattttcactctcacctcactaaggacagatgagtaaatctggttaactttgcctgatagatttggtgaccttttttcaggaaggagcctggaaagatgagattcaggtgtattggtcagcttagactgccataagagaataccatccactgatggcttagaaacaacagaaatctatttctcactattctagaggctggacrtccaagatcasatgccagcatggtcaggttgcagggagggctctcttcctgacttgcagaccgccaccttcttgctgtgtcctcacatcgtggagagagagtgaaaacaagctctctggtgtctcttcttataagaatgctaatcctatgatgggggctccccctccttacctcatctaaacctaattatctcccaaaggtctcatctccagataccatcacactggggttagggctttgacatatgaatctggggggacacaattcaatcygtaacaccaggagggcatgccgggaggaactgaccttcctccctccagctgccctggacacctttgccccattgaaggagcaggctcagaagtggaatgaggatggaataaggtgcactccatcatgcttacccacatccctggcaggaattgtcctgggccccagcaggagagatgcccccccatactgccatggcacctgctctgagacaggtgtgcagagtgcaaagctccaggtggcccccaagcaggtgtgctgggaggaggggcccgtgtgggaggagcaggcagcgccaaggcctagcggagcagtgacaggtccctgacttcagggaatgggcasgctgtgggcaggcagctggtgtgggggtgagggctggggctgcatctgtgggaccagggctgggccatccatcatatgccgtgtcacaaccccagtgcccctgctgtagccaggacaggaggctgggccaggctgggaggtgacaagagtgggggctgtccccaggagaagcactctgctgcctgtggcccaggcctctggggatgaggacccctcagaaggagtagctatgtctaggaagccccagggcaggagcaagccaaaggggacatcattagtgagatccaggggatcagtgggccacagaagccccagcgtgagcccctctgactgatgcagctaggcccacacctgcacctgcccacagcaagacccccaggaggagaggggacagatggagagaggcacaaagtgcccctggcctctgccttgaagccaccccaaggcaagagagatttgagcccctgtttagtgacctccaggggaacattctggcccatctgatgtgggaagccccttgtggagtctgtcattcctcagctgagccaggcctttggaggcagcccaggcatgtcccctgtgtgctcctatccctgtgttgggacacctggcccagcccctccttctgcctttctyttcccttcccttctcaggagtggacacttcctcctttagccccctcacagctgtgtgaacttctctgtatctctctctttctgtctctttctccccctctctctctgtctcattgtctctctgtgtgtctgtctgtagtattctctctctgtctctgtcactctgtctctctctctctctgtgtctacctttctgtatttcgctttgtttctttttctckgtgtgtgtgtgtgtgtatctgtttttctcactctctctctgtgtctatctttctgtatttcgctttgtttctttttctgtgtgtgtgtgtgtgtatatctgtttttctcactctctcaatctctctctctctttctgtctctcttttgctggcctgagcaaagagggagccccatcctgatgctacataaccgtgaaccagcacagacagaattgtaggaaagtcctgcaagtagaaggatagaaggatgagggaagaaacgccatgtgagtcatgacagatccctttccaggagccactgactcaccctgcctcctgccctcccactgtgacactattactcacagacaggcccggattaaacctatgttccaggtgccctgtggttcccacagtgtggctccctgggtctggcctcaggctccacaggtgcccagccctgccaaagtctccagagcagctgtccagctggggagctgcggggccccttcacagagcgcatgggaagaagttccatcctacacattacatcragagggacgtgcctgagaaggggagctggagcccgtgcagccccctgcttgcgtgcagaacatagtgtaccctgagcatgccatgaaaaacacaaacgcacaaagttgtaaagaaaaaagaaatgacaggtggctgtaaaatcagttatagcccaygagaggcccactaatgagtggtgatttcagctgattacaaagaaatgatggtgtttctgtaatgaactaaacatgcactcgtgcgtgcacacacgcgcacgtatagtcacataactgaccagccctatgcatcacttgttaattacttagtaactgtaacaataatagtttccaataagtgagccttagtctctgcgcaagggtcagtttattgagcacaygggggccttgcagtgggggcaggtgatctgctcctgggagccgccagcctctcctctcctgctcttcatcttcctccgtggtgggaaattgtctcactgcttctacacctgaggctgaacatctccctttatttcagtctgaaacacatgtaaaaatatactggaatgaattaaggttgcaattattgatatcaggcagtgagtacatcagggtttattatactatctcctttacttacttygaagttctctattaccaaaaaattaaaaactataaaagaaagaaaaaggaaatgaggctagattcaacacagattactcttaccaaacccttcgtagtcccaggagtcccctaacacaagcacttgtgacctggagtgatattcacagcattccttacctggcaatacctgagtattagcccccccagtgggatctttgttgtagacaaccagcaactatcagcccagccaataaacaagtaggaaaggggagtgctggagaggccaagaagtgggattttccatgctcctgggctgtgatccagagggcacggctgtgaggctgatctcaatgaacactctgtcttggaagtacagggatcctctgctacctgaaaacgttctgagtattcactttcatggattgcaaagtcatttacccaaaattcactctccaaatgaaaagtgagtatgatgaatcagtattcaagttccacctgggtcctgggagagggcatggacatcatatcccagctgttccgacaggaggacccaatctgagtctcactgcctgcctgcatcgtttgtctgctgccagcctgcacagtaggaagggaaaacatgatttgtatctgttttaggtcaggttcccaagaagtagagcctgagattggaattcttggaaaatggtgtttgcrggagcgctgtcagcagaagctataaggaagttggggggacagaaaacgagaggtaagaagccagtcaaaaaggcaggtccagcttaagtccgcctcagtctggttccacaagggctctgatgcatgaagaatatcacagggttgtccctcctgggagaggggccagcctattgtacctgtatcaaagccaccagctgagggccagtggggagggaagatcttccaggcatttccaggaaactctcaggagaagggtgtagctgtgagcagtctgcagctgctgctcactgcggctaaaggctgggtgtgcaggccagtcagccagtgaggygccaacagcaggcactacagtccaccccttgactgctcagacctactgctttccactttaagctctctccatccaggcacagcttcagggaaaacttacaattggagaaacagagggatgaactacaatgcccacttctgcatgtgattgtaagactgtcactgatactcaccatcatgccccatccccaccatccattctagtgtccccttccccttggctaacactgctggtctaggtgacttscctasagcaggagccaaacccttatccctgaggcatctgaatcctggattcctttatcaggctattgttgttgtaagttgtccattcccaattacaactggacatgagactaccaagaaacaccctggcaaatcatctgagtgcaagccatattcttcctgctccattatgtagcggtagtcctacctcctaatgacaagggtaaattgccacattttgcwmcttgtgccaggatggtaatacctttctctacctgcttggctactggcacaaggaagcacagcatgaccaggaggcaattgtagctgtacatttagtgaatgtgttaatgtatcacctggtggaaggaccccctctgagaaccaggacttctagacccacaaaacctaaagttgtgaatggcggaagcacaaatttcccaagtggatcatggagagtgatgaagagttcttggttcccaaacccacatattttacctttcaggaacatggcctcatcccatagccattagagtgcatattgcattctggaggagactgggccctcctcatgggtgtcatcttcaagatgacagctccactgtgcctccaagaggatgctccaccaccctatctgtgattccttggttagcaggacaggctgckgcactgagggtaggaaaggcaagtccattgatggctggaatacatgtcaatccaagtcaagagaaaatgccgccctttccaggttggaaggggcccgatttagccaacttgtcacccagtagtggctggttggtctcctccaggagcagtgttataccaggaattcagcaccagtygctattgctggcagttcttacattcaacagcagcaaaactaggtcagccttgatgagagggaatgtatgcttctgggcacaggcatggcttccttctctgacyccatgaytatctatttctgagtgcatggtggccgacattcagctgcctgcccatcctatccacttggttattattgcctcttccacaagaagtggtttctggctgtcattaatgtctcatactttgtgcccactcacacaggtttagctctacaacttttccccatgccaccacttttccacaatcttctaatgttgctccttccaagctactgaagaacgagctaagctattcaccaatgtccatgagtctatatttaccttaggccacatctctctccacacaaagtgaataagcaggtgcaccctccaaaactctactaagaggatttcttctccccagtgtctttcagggccaccttgagtggggctgaagtacagcakaagtccatttccagcttgcatcaacattccaaactaacctatccatgatcaatgcatagatgggtttttccctcctccagcagctagacaaaagacaccccccaccaggaggccatatttgcatgtgggtgaaagagaggcacaggggccaatattcgtgcaacagtggtagatggcaggtgggtctgggccacctgtccctgcagcttatctgtgccatctggacctgctcaarcctgattccagatataccatttccatcttatgatggatggcttatgacctagtgggtctgacagcaccaaactcataatgggcagttatggccacatggtcacttaatgtcctatggtcagacactctgctgagtggcatgccaggaaatgctttacaagtggtgtttggttctctgctgcagatggcatgaccttggtccggagccctaggggtttggacagtgactcctgttggggcctaatctcacattccatgcagagtatcatcagatttgccaatcacatagcctaagggtcaggactgatccaaccagtttttgcagagatcaaactggagaatgaaaggttgatatgatgtgaccatcatatcacgtttttctctcttgaaaagtatgcagatgtctgaaagagacaagtgccccaggagaaaatgcatgccttcctcaggatcggcccccacctcccctcctggccacaaggagggtcaaatctcagcatggcccaacttggacctgtcaaggaagaagaaaaaaattgtatgccaaaggaactcagtctttggctaacaagtactagacatcctttaagtctttgagaatggtaataatttctgccatccctccagatttgtgtttttctgttttggctgggtgggaatgcagcattttcactttgcctttgttattacaaatgttgcttattctataaatcaaggaaccattgtaagggctcttctgatggttaagtatatccattccaatgatttattcgggatccaaggaaatgatttctgggtgaatacacagaactagtggatccaatttgagacatacctgggccagaactatatttgtcgtcttaccccaataagcctgcactctactaggacagccatgacagcactttgggaccctagatataagtgtgaattgctggctggkcatggtggctcacgcctgtaatcccagcattttggggggctgaggcaggtagatcacctgaggtcaggagttgaagaccagcctggccaacacggtgaaaccccatctctactaaaaaatacaaaaattagctgggcgtggtggtgggtgcctgtaatcccagctactcgggaggctgaggcagggagaattgcttgaacccaggaggcggaggttgcagtgagccaaaatcacaccactgcactccagcctgggtgacagagcgagattccatctcaaaaaaagaaaaaaaaaagtgtgaattgctatgaaatcactatcaaaagatctgagtgttacccttactcagtgtggtcgaatataaatagccataggttcctgttatacacacttgctgtggtgcyacagagtctttcctcatgggaacccagtccctctttcagtcaatgggttctggttcgagaactggctgaggtttggaaactgtgcctttccatcataactttccactggggtgactgaccttggccttctgttcatcctttctagcccctaagaatccaacactctattagccttctccttagacccctataagctaatcccttctagttgttwgtctgaccttggtgcccaatatgataattattcccactttgcttctgatrtgcttctaagtgctgcccctggtctctgcccttaagtgatctatcatccccactgccattagggggagaagctctgaaaaagagttgtctcccatcaactctggtctacaaaggacagccctactgagcctcagccatgtgcccgacaccagcagattctttacagcctgggaagcaragtgtcttccctgcctttccagggaacatagccagcttayaggctttttgatcttatagagtaggtcagttatattttgccccatttcttttatccttttgrtcacttcctcttggcccaccatgtaaactcaagcatccctgcttcatttaatcgagctgttgctttttctaagctaccaagagcaaccccagcaatatatcagagccctctcttgggacccttgctagggtgttaaatcctgcatcataggagaatgcccccacatcagcaaagtccccttatcctcttgatatcccacctgccccagtccagcaccttcaggatctggtctcaatcacaggatccagcacctttgggactgttgcaagcataagatccagcacttttgggatctagtctcccacttcctgctagtacttgttagccaaagactgagttcctttggcatacaatttttttcttcttccttgacaggtccaagttgggccatgctgagatttgaccctccttgtggccaggaggggaggtaggggccgatcctgaggaaggcaytcattttctcctggggcacttgtctctttcagacatctgcatacttttcaagagagaaaaggcctccttctcacagcaagactacttctgtagatgcaggtggctcgtgggaatctggcaattcaaaattctcaagtgtactcactagcacattagaaaaccagtagtacacatctctttccaaatcttcattcagtgacactatgtcagtagctggaaatgggccatggtgggtgtatttaaaccatgaaaatcagaaaatgctacaaaccagggcatcccgcatctctagacagcagattgttggccatttcccagcataccattgtgtatactccttcccatcagggccgtggcttgccttggtggaggactcagcccttgctgaagttctgctactgctcttacaattgagtcctatgcctggtctccagctctgcctgcctcactacaggagacaagcatctctttgaacactgccgagaagaccctctggctctcaggcttggctttaaatcgatagacctgagcctgccattttctcttttccatgcatcactccactgatccacaggtctcagtggcatagtccttcgggttagcatctcccccacaccctcggtgccagagacactgagtaagaaagtacctccctgtctacccccatccccgctccccacaggcagggccttggcgatccactgctgcaatgtgccagagactgtcagtactcctaccaccagtgaggtggcaaccagctgggaagtgatccaactccagagtcccgccctcataggctgatttctaggaccacccctggtatactgtgttaggttcttgaagcagagcctgagataaggattctggcacctgtgattgagtgggagggtgctctcaggatgagatggggtagaaataggcaaaggtacagattcagcagcagttgagcctcagtctgacccagcagggagctctcaaaygtgaatgacatcacagagttgtccctctgaggcaggggccagcctttgtgctcctacatgagtcagtcactggctggaggcccctggggaaaggctagggctgccagctttagcaaataaaaaattagggcactcagttaaatttgaatttcagataaacaacaaattattttttagtatatgtcccaaattgtgcataacataatgtgttttctccgccagccctgggaagggcrtaacttcccaggtatttctaggtgaagtaactttgtagatcaggagtaagtcccaggaaagaagtccagctcttctcttcagccctgggcagctgggggtaggcacaggggcccagcaggcacccatagcatctcctacagcatctgaaatgaacagggtcatcacgtactacatacaaatgtacccactgctgagttcttcagggattatatcattaggtacttggtattttaaatacattacattatgcagaagtcctttgtggattgctatatttggagagttttgtgatattggggggattagatggagttttcagatgggcatcatacggtttttcatttaaaaccctagagtattgtaatcctagrgagtgatcctgcgattagtaaattagctctccaatagattttcaatgtggttgcaaaggacatgcatgtggttcaccctcccaggaaatccagaagggcagcattggcctgagtggcctgagtttggctggttgggctggtaatgctggacaaagrcaatgggtggaatggtttgcttccctcagtcctttcagacacagcccagccmaccacgtcaagccagtgggtgcatctgcaaccaatccccatgagaactgcagcctctcagaggtgggcaagttggcccgggtgggtcaggaggatcagatgttgaggaaatctttggattggaggcaggcagagcagggaagcatcgggtgattctatgacagacccagggctccaagctgcagttcaggaggggcactggcacggcctctgctcaactcccccttgagtgacatcaggtgaagtgccgacaacacagaaggcagyaaatgctgccagtcaggtctgcttcccaggacagccagttgctaacccttctccagcacagcactggattttggtcacctggctgggagctccacctccccagctgctgcctcacctgcttttccaaaccccaccctgtaaayggtaactacattttgtgcccactacgcctcgtttccatctctttggagcacctctcacgtggagctgaacagaacgacctgttaagcccaccgtgtctgttagggttgtctaggctgtatcagatacccaactaaaactggattcaccaacaggtattgtcaaagcacataagaaagagtccagaggcaggcagctctcagcctggtgtcaggctctgggtcagctttccagattctcttaaccttccccacatctgccagatgccgccacaggcacaggaggtacaaacaaacccaaaaatgttctggaaacaagaagggaaggggatccccaccatatctccccagaggccttccttctcacatctcactgtactgaagccagctctagcagaagacagcagggtgaatttgtccagggtattcagcccccagtgctgggtccattactacttgacccctgaataaaacagaggttccatgagcaagaaggaaggggaactggatgttagagggcaagaatgtatccatcccacccctaggagcacgcatggacaactgccccatttttgctcctattgcagcccaggggctagcccagagaccttgccagtgctgagtcacaagatgctgggaaagtgagaccagagcctggtcttggggaacagctcaaggccgcattggtctgcaggtcatagagcagctgctgagcagtgagagcccacgatgggccaggccctgggtcttggagacctgaatgagatagactgggttcctgttctcctgggcattgcctcttagagggcaaagacaattaacaataaacaaatagaacatgaagtgttttccgatagtgactgatatactttggatatttgtcctctccaaatctcatgttgaaatgtaattccttatgttggaggtggggcctggaaggaggtgtctgggtcatgggggcagatccctcatgaatggtttagtgccatccccttggtgatgagtgagttcacgtgagagctggttgtttgaaagagcctggccccctctcattctcctgctcccactcttgcatgagacacctgctcccccttctccttctgccatgattttaagattccagggrcttcacaagaagcaaatgctaacgccatgcttcttgttctgtctgcaaaactgtaagccaattaaacctcttttctttgtaatttatccagtcttgggtatttctttataacagcacaagaacagcctaatacagtgatgctctccaagtgacctttgggctgagacctgaagaagaaggggaagcagttaggtctgatagctcatgcctgtaatcccagctctttaggaggctgaagtgggaggactgcttgagcctaggagttgaagaccagcttggaaaacatagcaagaccctggctctacaaaaatattttttaattggccaggtgtggtggtgcacacctgtagtcccacctacttggaaggctgaggcaggagcatctcttgagcccaggaggttgagactgcagtgagtcatgttcacaccactgcactccagcttgggtgacagagcaagacctgtctcgaaaaagaagaaagaagaaagtaggaagaaggagaagaagaagaagaagaagaagaagaagaagaagaagaagaagaagaagaggaagaggaacaagaacaagaagaagaacaagaagaacaagaagaagaacaaggagaacaagaagaagaataagaagaagaaggagaagaagaagaaggagaggaagaagaagaagaggaagaggaggaagaggaggaggaggaagatgaggaggaggaagcagaagcagaagaaaaagaaagaaaagaaagaaagagaaagaaagaaaagggaaggagggaaggaaggaaggaaggaaaaagggaaggaaagggaaggagagggagagggagaaggaagaacaaagaagaaagaagaaggagaagcagaggcttgtgctggatagccttgcttttgccaatgaccttgctgattttcagggggtcctggtgtcttagtccatttgtgttgctgtaaaggcatacctgaggctggataatttacagagaaaagaggtttatttggctgagagttctgcaggctctacaagaagcatggcaccaatgcctacttctgatgagggcctcagtctgcttccactcatggcagaaggtgaagcagagcctgcatgtgcagatatcacatggtgagagaggaagcacgagggggcagggaggtgccagcctcttcctaatagtaagctgtcttgagaactaatagagtaagaaataactcacaccctgcccccaaggaagggcattaatctattcatgaagtatctgcccccatgacccaaacatctcccattaggccccccacctccaacattgaggatcaaatttcaacatgaggttccggtgggcaaacatccagctataatactgggcaatgctgaccagactcttcccctctcaggcccagagctccttggccctgtaacaacagaaaattgcgtttgagtgtcaagatttttcctttagtccccatgcagctccttagaatgaggtggcatcttctcccttttcataggtgaagaaacagaagctctggaggaacgaatcattcatccaaggtcaggtagctagtaagcgtcccaccagctccccagatctcctgtttcctgtcccaagtcccactgagtgagctggaacaatggcttcactggcacctgccgggaatggtggcaggtgcctataatcccagctactcgggaggctgaggcatgagaatcacttgaacccgggaggcagaggttgcagcgagccaagatcacaccactgcactccagcctggataacaaacggagattccattwaaaaaaattaacatataatatacatacagtaacattcactttttaagtgtacagtttgatgagttttatcaaatgtatatggttatataaccaccatcaccattaaggcagaatcttcccatcactcaaataattccctcagccccacctcttgctgtcaatcacttctcccaccctagccactggaaatcattcatctgttttctgtccccttggttttgccttttctagaatgttctatacatgagaccactgagaatatagtcttctgtgtctggcttctttcacttaacataatgcctagctcagcagtgtgtcaatcctccctcccttgccattgctgagcagtgagtattccactgtatggctgtgctacggtgtgttcatccatttattcattcaccagctaatgggcatttggattgtttccaggctttggctatgatgagtgaagctgctgtgaatgttcaagtacaagtctttgtgtagacaggggttttcaattggcgggataaatacctaggagtagtatcgtgtggttaagcgtacgtttaaacttagaaaaactgtcaaactgttttccaatgtggcctgtaccatgttgcatttccatcagcagtgtttgagaattccaattgctccacatcctcctcccgacacttggtttcacccatcttttaaatattagccactctggtgactgtgtagtgatatgtcagtgtggttgtaatttgcatttctatgattgactaataataatgttgcagatatttctgtatgcttagtgggcatttttggtgagtttttaaaaattgggttgttgtcaccgtcttattgagttggaagaattctttatatgttctggatgtttattcatgtgtgtgtctgctaagaggtgagactggttctaccctggtcctaacaagcaccctgggcctgcatccctttttgtgtctgtgagctgggtctgcagccctctcctcccactacctactgcccagcagtacccctcacccatcactgtggctcctgcaatgacatctcagcctgtctctccctccctccagctagccagaggcaggatggctcagtgacacagggtgggccctgaagacagagtgccagggtttggaccttgtattagcaagagtcacaagggaaacttactttatctctccatagctctgttgtgaggatccaataaattaatccatagaagagcttaggacagcacctggcacaaagtatacatgagctattatgatgttattcttccaacccattgtttctgtgttgtcataaacatgaatgcaggactcagtgtcccagctctgtgtccctcgcatacattccctaacagcccacaggtcttgcctgtcaccgcctcattcaataagtgatgactctgcctcttccttggctggggccttgcattggacatttctgtatccatatttgttttttaaaaactagctgttggccgggcgcggtggctcacatctctaatcccagcacttgggaggcagagacaggtggatcatgaggtcaggagttcaaggccagcctggccaacatggtgaaaccccatctgtacaaaaaatacgaaaattagctgggcgtggtggcatgcacctgtaatcccagctacttgggaggctgaagcaggagaatcgcttgaacctgggaggcagaggttgtagtgagccaatatagcgccactgcactccagcctgggcaacacagcaaaactccatctcaaaaaaaaaaaaaacaaaaaacaacctagctggacttgacactcttgttagaggaagatttttccacatctgttaacttttcttctattgttatccatctgtgcaggtttttctgtcctcctgagtcrttttgataatttatattatattttgaaaatcatccatttcctatagttgtttattagtgtcttctctgttatatttgatcagattaccaaatcttgctcattgattgcccatttattttattgtgtttatttttttgagacagggtctcactcgacagcccaggctgaagtgcagtggtgcaatcatggctcactgcagccttgacctcctgggctcaagcaattctcccacctcagcctcctgagtagctgggacctcaggcacacgccaccacagctggctaatattttawttatttatttatttatttatttatttttgtagagatggggtctcactatgttgcccaggctggtttcaaactccttggttcaagtgatcctcctgcctcagcttcccaaagtactgggattacaggagtgagccaccatgcccagcccctatttactttatagtaagtgccttcatgggcataaatgttcctctgagacagctttggctattagccatacttttaatattttgtacattcatggttattcatttataaatggtctgtaatgcaatgcagatttcccctttggcccaaatgccatttacagcagcacttttctctttctgagcagacaraatattttggtttcccctctgttgtttatttctcgtctgcctcgcctcatttgctaggtgttcccttggtgtgccttaagtatgagccactcaaatatttgtgtttctctaaacacccctgacactgtcctgctggtttctctatctggaatatccttcccttcttggccagttccccctagtgcatcaaagaaatcctgctcttttgccttcagaaaacaaaacaaaacgaaacctatcagtctccttatgtccccaaagacatagctttgctggtatctggttgtattgagctgttcatttgtctcttctgctagatggtaagctccttggaaactaaaaactaatcacttttctaacttcagactgagcacaaattaggttctcaagaaacattgaataatgagtgatccggtatccccttccaacatatttttggtcattgataccatcattctgagtagttactagggaacacttcactgcagtaaccaatacagcaaaacgtgaaatacagttacatagtagaattgtatttcttgcccatataatagtcaagtgcagttcttcatcagctgggaggttctcctccacacagtcatttaggaatccagggaacatagcagaggttgctagctctagacccaaacccatgtcctctttgtccacagtgaggacaatgccagcaacagctggccagctgttctgtagttctcagcctccctcgcagtgagatgtctccatgcaatttcagtggagcaacatataccatttccatttccaggtgtaggctcctaagaagagggtggcttcttcatgttctttctcacctttccgtaggctagctgcagataatgatgaggctttagggagtgggtggagccataaagtagaagcctggattcctaaatgacggtgtgaagtgttccctaatttcacgtaattgtttcttaatttcctgtttgggttatttgttgctaaggtataaaaaaaccctgatttttgtgtgttgatatttgtgtgctgcaactttgctgaattagcttattagctcaatttgatctcagatattagctcaaatattttgggagattatttatggttatctacataagatcatgtcatctgaaataaagatagttctatttccttctttctatcttagtccatttgggctgctgtaacaaaatgccataaattggaggctgagaagtccaagatcaaggcccaagctaattcactgtctgatgaaggcctgctttctggttcatacatggcaccttctagctgtgtcctcacatggtggaaaaggcaaggtagctctctgggattcctttttgtttgtttgtttgttttgttgtttttgtttgattttttgagacagagtytcactctgtcaccaggctggagtgcagtggcacaatctcggctcattgcaacctctgactccctggttcaaacgattctcctgcctcagcctcctgagtagctgggattacaggtacccatcaccatgtccagctactttttgtatttttagtagagacagggtttcaccatgttggccaggatggtctcgatctcttgacctcgtgatctgcccaccttggcctcccaaagtgctgggattacaggcatgagccaccgtgcctgtcctccggtattctttttataagggctctttttctttttatgtgggctctaccctcatgacctagcaccttctaaggccccacctcttaatatcatcacacagcagatttaatatatgaattttgaggggacacattctttccatagcactttccagtatggataccttttatttatttttcttccctaattgctttggttagaaatgtcttccctaattgctccactactatgttgaaaagaagtggcaaaagtgggtattcttgtcttgctcctctcttaggaagaaagtttaagtcttttgccattaaatatgacgttagctatggggttttcatatatgacatttatcatgttgaggaaattttcttcttgtttcaatgatgacagggtgttgagttttgtcagatgctttttctgcatcaatcaatatgaccatgtagtttctttgttttattccattattgtagtacattacattaatttttgcatgttgaactattcttgtgttcctgggataaatttcacttggttatggtgtataatccataaccataacctgaagatatgctgaagaggctaagtgccatggctcatgcctgtaattccaacactttgggaggctggtgtgggaggatcacctgaaatcaggagttttagaagagcctgggcaagtaaacaagatcccatctctacaaaaaattgaaaattaccgctgggcatggtggctcacgcctgtaatcccagcactttgggtggccgaggcaggcagatcacctgaggtcgggagttctagaccagcctgaccaacatagaaaaaccccgtctctactgaaaatacagaattagccaggcgtggtggcacatgcctgtaatcccagctactcaggaggctgaggcaggaaaatcacttgaacctgggagacggaggttgcagcgagccaagatcatgccattgcactccagcctgggcaacaagagcaaatctccgtctcaaaaaaaaaaaaaagaaaagaaagaaagaaagaaaagaaaagaaagaaaattagcttgatgtggtggttgtgcacctttagtcctagctactcaggaggctgaggcaggaggattgtttgagcccaggaggttgaggctgcagtgagccatgattgcaccactgcactccagcctgagcaacaaagtaagacctcatcactaaaaacaaattttttaatactgaagaattttatttgctggtattttgttgaggattttgcatctatattcacaagaaatattactctgtagtttttcttcttgtagtatctttgtctggtttcagtatcaaggcaatgctggcctcatgagatcaatcaggaagtgttacttcctcttttattttttggaagaatttgagagaattggtgttaattcttctttaaatggttggtagaattaccagtgtagacatctggtcctgggattttctttgttgggaggttttttagtactaattccatttccttacttgttattagtctaatgagattttctgtttcttcttgagctagttgtagtagctcrtgtgtggaatttttctatttcatctaagttatccaagtttacctaagttaaagttccattttatctaacttgggtaagccaacaaacaatactaaattgttcatagtattctctcatagtcctttttttctctaaagtcagtaataacgttcactctttcattttttcattcctgattttaataatctgagttctttctctccccctccctgcaattgagagtcatttaaaagtgtcttgattaaattttatatatctgtgagttttccagttttccctctgttattctcttctagttttatttcatgtgatccaaaaagatactttatatgatttcaatttttttacatttactaagacttgttttgtgactaaaatatccttgagaatttccatgcacatttgagaaaaatgcacattctgctgttgttggacagagtgttctgtatatgtctgttaggtctaattggtttagagtattgttctagtcctctctttccttattgatcttctgtctagttgtttaatccattattcaaagtagtggccgggcacggtggctcacacctgtaatcccagcactttgggaggccgaggagggtggatcacaatgtcaggaggttgagaccagcctggccaacatggtgaaactccgtctctactgaaaatacaaaaaatttgctggacatggtggcacacgcctgtaatcccagctactcaggaggccaaggcaggagaatcacttgaacccaggaggcagaagttgcagtgagctgagatcgcaccattgcactgcagcctgggcaacagagcaagactctgtctcgagaaacaacaaaaacaaaaacaaaaaacaaagtagtgtactaaagtctccaactactattgtagaactctatttctcccttcaatgttgcaaaattttgtttcatgtattttggtgttctgttctttataatttttatatcttcttaatggatgaaaacttttatcaacatataatgttctttgtctcttgagactttttttttttaacttaaaatctatttgggctgataatacagccaccacaactctcatattggttgttattttcatagaatatcttcttccatccttctactttaaaattcttctatctttatatctaaagtgagcctcttgtagatagcatataggtggataatgttctctttattcactctgccaatatctgccttttaactggagtttaatctatttatatataaaataattactgattaggaaggacttacttctaccactcagctattttttttctgtgtgtcttatacatttttaagtttctcaattcctccattactggattttttttttacttcttgattttgtgtctgtgttgttacattttgattattttctccttttgatagcggcaggaggcagccaaatgcctggcagatagaagcttgtcccccatgaaaccccaccttcaagccaaaaaatagcctgaaggctgaaagaccggactgctggtcccagatgaaacccatgatccagagtgagaacttccattcctgtttgcctgccctctaaataatccctkttaaccaatcgaatgttgccttttccaatactacctatggcctgcccctcccccattctgagcccataaaagccctggaatcagccacattgggggcactttgccaacttcaggtagggggaccacctctgtatcccttctctgctgaaagctgttttcatcactcaatgaaactctcaccttgctccctctttgattgtcagcgtatcctcatttttcttgggtgtggtacaagaactcgggaaccagtgcacaagccagacttggtctgggcagcacgggttagtgggccatctcccayagcaggtagcatggccaagtgaggcctgggcagggcatcaccaaggtccctggcttgcaaagtgaccaaggaaaaaatcctgtgtcacttwccttttctcatattttttagttattttcctaatgattgccttgaggatggcaattaacatcttacacttataagaagctagtttgaataatagttccaatagtacatgaacactctactcctatatatctccatccttcttcctttatattgttattcccacaaattatgtttttatacattatatcctcactaacataaacttattattattttctgcatttgccttttaaatcatacaggaaaacaagaatcacaaagaaaaactacattaatatttgctgttatatttacctatatagtgacatttaacagtgtatttttatgtcttcagatgtctttgaattactacttagtgtcttttcattttagcctcaatgtttccctttagcatttcctatagggcaggcctgccggtaattaattccctttggttttctttatctgaaatgtctaatttcttttttattcttgaagaatagttttgctggctataagattcttagttaatagtttttttyccagcacttcaattattattaaagtgwtattattattattattattattttgagatggagtctccctctgtcactcaggctggagtgcagtggcgcaatctctgctcactgcaacctccgcctcccaggttcaagcaattctcctgcctcagcctcccgagttagctgggattacaggtgcccgccaccatgcccagctaatttttgtatttttagtagagacggggtttcaccatgttggtcaggctgatcttgaactcctgacctcaagtgatacacccaccttggcctcccaaagtgctgggattagaggcatgagccaccatgcctggtctaaagtgtaattattattacagctgccatttggcctccttggtttctaatgagaaatcatctgttaaacttattgcaaatccttggtatgtatgctatgtgtcatttctctcttgctgcttccaagattctctctctgtctttgtcttttgacaatttgactataatgtgtttcagtgtgaatttcttagagtttatcccacttggatttcattgagcttcttggatgtgtacrtttgtctttcaccaaatctgggaaattatttcaccatttctcaaatatctttttcttcccctttccatctctcttcttctggagctcccgtatacttagttggyatgactgatggtatcctactggtccctcaggttctgttcatttttcttctttctttttttctgctctgcagactggataacttcaatcgccttttcttcaagttcaatgattatttcttctgcctgctcaaattggccatttaacccctccagtgactttttcatttcagtattgtacttttcagatccagaatttctatttggttcctctttaataaattctttttattgtcattccccatctgttcatacattgctctcccaatttcctgtagttctttgtccatggttttctttagttaattaagcatatttaagacagttgacttaatgtctttgactagtaattccaatgtctaaaattccttatggatagcttcttttaaattatttttgtcctgttagagagycatatcttcctctttatttgctttgtaatactttgttgaaaacttaacattttgagtagtaaaatgtggtaattctgaagccagattctccccctcctttgagattggttttgttgtttgttgagggctgcagttgtccatttgtatagtgacttttccaaacgatttttgcaaagtrtgtattctctcttgtgtctggtcactgacgtttctgttctggtgcctctgcagtcagcctatgacctggaagagcattccttaaatgcatagatttttttaaaacccaagaaacaaaaaacctagcatgtatgtacctttttaaaaatcttctgatagatgccacctggaaggctgctgctgcctgaaggggcagaaacaaaggcaagctctactctgagccctcagggaaccaccagataaacaaaagaaatttgattctccaaatttctggaagacaaggtcctttctgcccactcctgctccagccagctgctctaggaacacaattactgtccacatggccacaggaatgttgaagaatgcaggatggtagctggtttgcccacaccactcacttatgagccatcagcatgcctctcccttcatcgagcactcccatggttgctgtaagtgtccaatcaggttccagaattctgaaagagttgactcttacaggatttttttcttttctaacttgctggttgtttagatagaggaaccaattcctgaagtttcctacgttgccagcttcatgaggatcattccctagtaactcttttcagacaaaaagcttcattgatttactgtaggactagcatcaaagagtctatgccacctagtctgtctccttaaaacacagaaataatcagtatgcattggggtaggagtttggcattagatctgccrtaaatcaagagctggggacagcccatgtcttaaactctgacccaagggctaaaatatcctttggtagcaacaacagctacaaactattgaacaacttgtatgtgccaagagccttacctgcattatcccattgaatcctctcaacagccctgtgaggtagtagaattgttgcctgccccttactgaggcctagaaacattaaggaatttgcccgaggccctagagccagtgagtggcaaagccagtctccagactcaggctggagatcctacagttctgtgttaccccagtgttatcctgcctctcagcacagagtcttggatgattctcctaacccctccctaggcaatgcacagggctgctccctgcacccttactcatgctctgctcttcaaccccaacagtgctggccttaggctttatccctgacacccagccccaggctccattccatctgttgacagaggcaaacactggggcaaaactgacctctgtggataccactgtgtccacctccaccagcttcagctgaagcctctgaacatctccagcatggaagaagccccaaaggatatttcctgtcccccagcatatgcttgaccctgaagccctccccatctagtcaagaagaccaaactgttaacaatcctggagtcagagtgacccatgggtgaatcttagccaagtcactcatagctgttgcatcctagtaaatcccttaactcccataggcttcagtttccctgcatataaaatgacagccttcagctcatcggccagtttcaatccatctaaagggtctagcacatcccctggcatgtggaagccacagggcacacactagttgtggtcatttgatcctggcatgctctgctgtctctcggctctccccttgcctctttccctgatgtcctggccatcagccactgcctaacaccctcccactcaccaggcccttagcctgccccttagcacaagagcacagccggtctcaagtctaccctgctgtaagcaaacacttgcaacatcatgctgacctccaggccctgttgcatcagcgtgcccacacttggtgcccagctggtactgagggtatcagggaacaggccagtggtggaagggcggacactttgggttccctggtttcctggctcccaatatctttcccaatggcatatggggtctagcagcttggctcatttaactgtgaacctctaccctttagaatctgggcctccaggcttgcttctgtgcaaaatggcagataaggctcaacctttctttttttaacttcattgttaaatattactccattaatacccatttactgcagaaaaggtaggaaatacagataagcaaaaaggaaaataaattaaaatcctcataccaccatcatcaagataattactgtcaccattttggtatatttcctcccaatacatatattatctatatcgtatatacgacaaaaatggatcatactatgtttcctgttcttcccctgtgttagtcatctattgctgtataacaaactgcctcaaaacttagtggcttcacctttccgtgtattatgatgacaagaatgtggtatgacactgtcttatatctggatcatatgctaaaagatagaaaatggtttctaaacttatttgttctgtaataacaaaattttatttcataaagtgtttttaaaaaaaaccatagtagcttgaaacaacaaacctttgttatctcacacagtttctgtaggtcaagaattcagaagcagcttagctgggtggtctggcttggtgtctctcctgaggtcagggttttggctggggctgcatcacctgaaggcttgactggggccagaggagctgcttccaaagtggtccactcacatggctggcaagttggagttgcgtattggcaagagacttcgcttcttctcaatggatcttcccagagttcttgtaggcaacctcatagcatagcagttggcttcccccagagggaacagtccaggagagaacaaggcagaaaccacagggtcttttctggcttaggctccaaagtcatactccaccatttctgcattatcatattagttacacaggctagacctattctgcatggaagrgactataccatggggtgaataccagaagcagggctaattgaaggccagcttcaagggcggctacacattccctttcaacagtatgtcatgaacatctttccatgccaatagagcagatgaatcttaccatttttaatgactacatgtaagtgtagcataatttatttaaccaacctcctgtagttgggtatgtgggttgtgtctcgttttttgatagtagaattaatcatcttgaatatccatcaccaaacttgtcatattattttcttttgatgaatgaaaaagaaaatcaagtcatgtctgtcaatcagaaccctgagcaactaagaaatgggggtaccactgggacatagagcaaggtcccttctgattctgctcttgtctttctctccccatgaaayggggagttcactatctactgagacatcctagcccacagctgcacagttctgtctttttagaaagctctaagcagaaacaatgttcatccatcctcctcgggacagcccttgagctactgaagactctaagcatgtcctggtcatcctccatgagccatcatctctgaggccctccccttcttggcccctcttctctggacaggttctggacagtcttgcccttccaaaattcctggaaagcaggaactgttcctgctacaatgactctcaactccagtgcagtacagactgttggtgtcaccccttatcctgaagaagaggcactgagacaggacaagggtgggtgcccaggagggctggcatgagtcatgagaatctggtcccggagaattagacggtgtggggaagtaggggtgttgggccgctttctggcctcatggatgccaatgaatatcagcaggtggctcccagaaaggaactctaggggatgcctgttgctctaaatagaggctagagagggcactggcagttcagtcaaccaagaaagggggcccacttgcctcagcttcaggctttgtacacatcctcagcctttcttgagaactgaatttagattctcctcccctgtgctgtgtgcttggcccagaagaagggcaagtctcgctgggtggctgcttcttggcctggctgaaccagaaggccccagtgccactccaaacctgggtgtgagccctgcccccatgagcaaacagtagctcagagctgggggctgtgggggtcagtggcctgtcacatgagatctgatgaggccatctctgctctatattgggaaagggatcaattgtatcaagggctttcttgggagtgatcactctggccattggcgagagacctggcattctgacaaggcaccctccataccctgacccacttgccagctccagctaattttagcaggctttggcaggtgccagcaagtacatagcatgtggatgtcactcccaggtgagcccaaggagaggcctgggccagagcctggaagtcatggtctatgcccatggaggcacccaaagcaagcctgaggcctggactttgcagtcacaaaattaagaatgatacccctgttttttgtttgtttttgatcagttggccaccttcctccaccaccccttccccaagttccatacagacccctggattgtatgaaatgcaaatcgaacctctctgcagatgaaaatccactggggatccccttgcctccaagagcaagtccagacctgcaccagcgcgggccaggcccccttaggaccccctccctgtccaagggcatttcagtaagtrttctgtggccaaggcagcctggtgactttctgcccgcacaaggctgaggaatggaagatgggtaggctggctctgcacaccccctcctgctgggcagcaatccctaccccatgttcacagagtgtggccggctgccccatggctctgtccccgtggccctgtcaactgttaccccacatgggcctaccctccctttctggccctgcctctgaccccatggcagggggcagagtatttgagcagccgccaggctgagccctttcagtgcagaagccctgggctgccagcctcaggcagctctccatccaagcagccgttgctgccacaggcgggccttacgctccaaggctacagcatgtgctaggcctcagcaggcaggagcatctctgcctcccaaagcatctacctcttagcccctcggagagatggcgatggatgtcacaaggagccaggcccagacagccttgactctggtaagggtcacaccaaagttagggactttgcactgggagagcagcacccagggcagggcccttggttttgcagattaccaaaactaaggctgggggcagggaaggcgagcaggcttggggcaccttggaaggaggcacatgggccttgggggtcctggctagggcagctgtgcctgccactggccctctgcccaccacccctcctcactgtggctatccagtgtccagcctctcgaggggttctagggtacttattcctggagctaacggtgacccaggacaccagtgtccggggcctggcctggggcttttatggggggagctggctggctgcccagggctgtctggctctctgggggctctgcatggcatttccaggggttggtggatcagggattctgtccctcaggagaatgtgggcactagcccaaggccactcacttctgtgtacatagccacctgagggcccaggaatggagggggccaggctacagctggacatctggcactcggatgggctctggagcccccaggcctgcagcatctgcccagggactgccctggcccttggccatttcctcagggacccacagctccaccagccggcccctcccagtgctggaatagacagttcctcagtccacatctgccaaaggcggcactagaaggcatcctgccttttttactgcgttctggaggtggggtcacaaagcactgctcactgcataaaagggacagcatcctgcccctggcagccctgcctgaccagctccgcctctcccactgctatccaacctgtacaccctggtgaccatgtccaggccagtggccttaaggactgtctctgtactgatggctccacatctacctctccagccagactctcctctgaactcgggcctcacatggccaactgctacttggaacaaatcgccccttggctggcagatgtgttaacatgcccagaccaagatcccaactcccacaacccaactcccaggtcagatggaacctcttcttcccaggcccttctgttcctctcctcagcccctcccacctcccttcagaataagtctagactcttatcgmtttcaccaagcctgcgcccagcatccctgcacagggattgttaggacagcctgacgccctgcttccaccctgccccaagatgcccctgctctgcagcccggcgcctccaggcttctcacctcctgctgctcacagctcagcctcactccctccctccccgcctctgctccagcctcagtgcaggtcccctgctcccatcttctggcagcagctgcccgacctggtccctcttcatctgtccccattccttcaccccccagcctgtccccaacttgactgaggttctttcctgcagatccccgcccttgagaggggttggtcccactgtcaactctgcttctgtgccctgtgccgcacctggcattcagtgagcatctgctgaagagatgagggtcagatgccctgcagggagtgtgggggcgtcctcaggcaagaaaagttgtacgtttggctgtgggccctgattatgtgtcctgtgacctcttgggtgaggtcagcaagagaaacctctgcaagctggctggggctgcctcccagaggctgccagggggagggacaggctctgtctgtgctcttcttccgaggctacacctggggcgccaggctctcagggctccccaggtaccaccacatttcctacactgcttgggaaagccctgtaagtttgcacagacacccagcatgaggctcgccagagagatacttgtagctggggtctgggcaccaggaacagcttggtgctgggcctgaagtcgggcaggatgcagcctggccaggtgagaggaaagcttggagccagtgcctgggttcaaactcctctgtggcctatggttctgtgggcttggggaagggtttgtacctctgtgtccagtttcctcacttataaaaaaaggagataataaaagtacccatgtcccagggtggctgtagcaataatagggaggggtgcccagagcaggtctggcacacaggaagtgtgcatcagcctcagtccctgccattgggcttgtcctgggagtctgtgaagccaacctctgctccacaatgtgacccccaggcttgtgagaccaagctgggtcagagcttcctcctctggggttgcaccaggaggggaacttctgcaggcccagatgcaccctgaggaaagggcttgttcccaccaagaacaaggctcacctttggaggatgctccccacatgagaggtgaacccccaggtctactggtgactgcagcctcggaagctgacagcatctatcctccaacccatgcccactgggaagtgtgtgaggggtcctcataggccctgcggtgtggacaatgcagagaccctgtagcatctggctagggcggggcccagataagagccctgtgccaggagagcctggccggttctgccactgtggggagacaggctcccccaccccatgtcccctgcttccctgcagcccacagagaatacagacctacttttacagaaatccagatttttgtgtaaaagtgtctctattttaartagattttaagtggtggcagcaaatttaagcttttgagaatattatacagaacaaatcagattcacaggccagatgcaactttatttacagaaatgggatcaggtcctacctcaggtcccatctcacgttttcacttatgcctatacgtctccttcacgggaaaggccacaagaggccctgcggtaagtgtcccggtgttgatttaaagtccccaacagtgaatatgagggtcctcactgttgcagcaagaggatacccccctgtgtatcttggaaatgcctgcagccctcttgctgcagaacagattcttaggagagaaactgtcagatcaaagttaaacttagagaaactccaaattgccctctgaacagacggtatcagtttgacatcatccaataccgggattcctcggggagaactttctggcctagaaggcagtagagccaggacttcacccagtcagtggcagggccacacgtgggccttgatacagagggggaagacttgagcctcctcgacaccctacagggcccagcctcccaacatgtgataagagaaacaacagccaacttgtacctagctctccttattctccaagggctgggccagttctccccacagccctgcaagggaggatcactcaagggccccaactgtctgacaatacagccacactctgatcagccacctgggcataggctccatgccattgtcctccgccaagacctcagactgaaatgttggctcctcccatgaagaacctggggccaaaggaccagagtccaggtccgtggctgccaggatgggccacttggagagaggcacaagggtggtgccaggcaggtgtgagggctggacctttgcaagagcagcatcacttttgttgagagcccacaggtatcttataattgggtcctaggacttcctgccagtagccattgtgtgcatggatttgggtgctggcctcaccatggtgtgctggctgcccatgcctgcaataatgacttctgtaagcctttcttcatctgcaagatgggtgctgctggcacctcctccccggtgctgtggtgacagggcatagtgtgtgaggctgctatgtgaagcacctaatgcagggcctggcatatggaggaattcagcaaatgacagatgccttcacagttagttcctggcatcctctacattggtgggtgtaggaaagaaagacagaggaggcaaaagttgtagctktggggcattgaggacagcctggattgttccacagagccctgaggacatctccaggggtgtgctctgcaggggcagctggattggagggttaggggtcggggagggcgtgcactcccacccatgctcacagcctcggaacagtgcctgctcagccaacatgggtgtttgattctgtgtcttttgtcacagactttatcagccccatccctttctgaccttgcctcagtttaaattttacatgtggggcctcattaagagacatggttcttaactaaagatctgtatcyattaggaatgctttgggctgcaggaagmcaaacacctgactcactgtggcataagtggtttgcgtctgytcccataagctgcacgtggagggtggatctggcattactctctcttccctacatttgcagtatgctaacagctttaacctccagccttgtttcttcatggttgcagggtggctatcacagcgctggccatcacatccttacacagctgtgtttacaaatttagggggacattgaagctcctcccctgctaaaatcaggcttcccttcacctgtcattggccagaactgggtgaaatgcccaactctagaccgatcatcagtaagaggagtatagaattgctgtgcccaccttagattaatcatggcgcaatgtgctccccataccaacaaaatctgagttctagaaactgaggaagaagaggaaaatggccgtcttgcctcctggctgggattcagagcatctccaaccctctgagcttatgtgtaagactgtgggcaaaagtgtgtgagtttttgtggaatggatccacggcttttatcagagcatctttcctttttctttttgattcaagatgaaaatattcttatgattatttttctcaccactgcccagagataaccagcacattaacatggccttttctccatgaatagcactagggtgcccagtggacagacacatagctgtccacacaccagcttgctggggatgcataggcagagtcacatctgcactcacggcctgtcctcacactgccatgtggagagccagcagccacaccatgggccgtccatgctcacgggagtggcagtatcagatctgagcttcgtgtgcccaggcgtctctcacatcagtgcatagggaccctctttgttctgtggcccagtgtgcccatgccacagatggcttcagtcagcagacacctccttctagacactcacactcactcctggctggcccttagcacacctgtgcagacaggcccatttattttcttgtgtaaatcccaagtaggaggactgggtctctctgacagcaatgccagctgcctggcaccctccagacaggtggctcaagcmccacctcgccagctctcccagttagcccctcctttccctggctctgacctgagggacraagcagggtgctacaggacgctgtgccacagggatatcgtcagggacagaagctactctgccctctgctgctcacccctccaacacgctgtgggctgcatttgttgagtggctggtaccagactctgctcttctgactttccagctggttttacctgtagtaaagtttgagaagatgggtcatcctgaccccggggtcagaagacagaaggaggcccatggcgtgtgggggagatgccccgtgaggccctcggtgtgcagatgcctggtgacagccccaccctgaggtccccagcctaccccctccccagcccgactgctcccatccccctccctgtgcaggtagagcagatcctggcagagttccagctgcaggaggaggacctgaagaaggtgatgagayggatgcmgaagragatggaccrcrrcctgaggctggagaccyrtgaagagkccagtgtgaagatgctgcccacctacgtgcgctccaccccagaaggctcargtaccacatggtaaccggctcctcatccagaagcagctgtgggctcagccctagctgggagaagcaccccaggcactcccagactcacagccagcccgagacagaatctcctggggagcaatgaagtcctcgacttgggccagttctcacccttggctcctctggtccggccctggggcactcgggctcaccctggagctggcaaacctcaggaaaactggcgttttaaatctcactcctggccaggtgcagtggctcacccctgtaacttcaacactttgggaggccaaagcaggcggatctcttgaggccaggagtttgagaccagcctgcccaacatggtgaaaycccgtctctactaaaaatacaaaaattatccaggcatggtggcacattcctgtagttccagctactcgggaggctgaggcataagaattgcttgaacccgggaggccgaggttgcagtgagccaaaatcgcgccactgcactccagcctggggtgacagggtgagacaccatctcaaaaaaaaaaaaaaaaaaaaagacctcactgctccccatgggcacttagggaactctcccagcccagttctgcagctgggccattgcactagatcctcagttggtccctgggctctcgktgactgtccagggcaggagtttcccattgacttttccctggttgacctttgaccccytccacagttgacactggtgtccccaggtgtctggtggccccttgtccagctcccttagtcccttgtgccttccctcctcctctttgtaatatccgggctcagtcacctggggcccacccagcccaaggccagcctgtgggtgtccctgaggctgacacacttctctctgtgcctttagaagtcggggrcttcctctccctggacctgggtggcactaacttcagggtgatgctggtgaaggtgggagaaggtgaggaggggyagtggagcgtgaagamcaaacaccagatgyactccatcccygaggacgccatgaccggcactgmtgagatggtgagcagcgcaggggccggggcagggggccaaggccatgcaggatctcagggcccagctagtcctgacgggaggtgccacctgtctaccaggggtggggagagcgggggctggaggaccacccagcctcagaggcagctggaggcctgggtgaacaggactggycaacatgtccccaagtcccacagtcaccatctggccagcattgagaggggaacgggctgaggaagagttagtggcaagaggaaccccagccagtcacaccttgtccagtttaccagaggaaaaaccaatgtgtaagaacagaaatgtgacccrgcagccagtgcactgcccccctctccaaaggccacccctcaccctccaccagcatgcacagaaagtggggtgacagcaatcacaatgtctacccaggcagcaaggacccctgaccatggggaggactggggtgcagggaacatagaagcagaatgaggcctagggggagttgggcaaggccagagccctrgctgcagccaagcacrtggccaaggccagctcctggaagggcagggctccgargcaggaggcaggaggctgcccgtggctacccgtcctcacacccctgcagcttgctagtctgtctgtgggctgggtgtgaatcaaggcagtgggatggtgtggggacctccctggccccagcagccagtgaggagcctggtcagtcagcagagcattcagcagtatccagttccatggagaggcccgtgtgaggggagtcggggctggtcttcagtaaggatgggtggccagggcccctagaagtagaaaaggagactccgggtgctggagacagaaatcaaggatgtgcctccatgtggagcctcaggaatagctggccaggcctgaggctgaacctcacaaggttcagctgggagggctaggctgacagagcacagccgggccagggaccagcctgccctgtgttgccttgtcccgagggccactgtcagcaggtctctggcatgggggaggcttagggcctgagcccaacaagcagcagcggaagaggagagggaaactgtggacaggcctggcattcagtggccaggtgttgcagtgtccctgaggaatagcttggcttgaggccgtggggagggctgccggccagcgcacccccccatgccagatggtcaccatggcgtgcatcttccagstcttcgactacatctctgagtgcatctccgacttcctggacaagcrtcmgatgaaacacaagaagctgcccctgggcttcaccttctcctttcctgtgaggcacraagmcatcgataaggtgggccgggtggaggggcagaaggcagatgaggggaggcacaggcaccccagaggawctctgccttcaaatgtagcccccataccntgtgctcagaagggagatctggattcaaattgtggccatgtcacctgccacctctaatgctgtggaaaagaagcatcacattagctaattctggctgtgcgccttgtgaggcaccagctatgatcaccccactccagtggaaagagcagctggcagtagggtggggctcaaactcaggcagccgggctctgggtcacctgcaggccacggtcatgtcacactgcctctagctgagtcagaaatgtgaaggaactgagattctacccttcctgcaagctagcaaagtggcctgccagttacatctgtgcatgcacacacacacacagttatatatgcacacacataaaacacgagacctttgggtcagggagaaagccagatcctcactcacggcagaagcagcagccaaagcaacatctcatgtggttttccaagccccagtccctacagagacagagagggccaggtggcacctgtgcatgcagcggggtaccttgcaggagggaaatcctgattttacacaaagctgctccccccacgccctgccttgactctgggatgacgtctcagagctgtgcagtacaacattcttaaattggctgggactcagccctgcagaaatatgatatcttcaaggagaatcrttcccaaaacctctcaaagctatggggctgctctgagcctgtttcctcagctgtaaagtagggtgcatacttttatggccctgtgcaggaggtagtgacaggccctagcaccctgcctccagtatatgttascagccacgaggcctatctctccccacagggcatccytctcaactggmccaagggcttcaaggcctcarrakcagaasggaacaatgtcgtggggcttctgcgagacrctatcaaayrgagargggtgagggggcacctgtacctgccgggggggctgccctgggccacccaccccagcactgcctgcctttctccttggcttccagcactgcagcttctgtgcttcttggcaggactttgaaatggatgtggtggcaatggtgaatgacacggtggccaygahgatctccygctactasgaagaccatcagtgmraggtcrgcaygwtsrtgkgtaagggctccttgcacccctgccccttccagactgcygaggctccctgtgtacaacaggcttcaagggccctgtggggtgaggrccaaactacttaacaaccggtgatgtcagagcagagcctggtgctacagcctgggtggtcttggggtatcaagatggaagcaccgtgtacagtaggaagcatttcaacgccatgatgccacattcctgcatcagatggtatgccagctgcatatccacctcacccatcaggattataattaaaacacttatctggtaaattgaccaactggacagattggtccaagtggaagaggataagcaaaagtggtrccatctccacccraatggtctttccacgggcctgcccctgcccctgcccccacccaaagtgaaggcaggtaccaggaaagggagcagcagtccgcccctcccagcagaggggtcttccacaccaactcggacctttctcagaagttccggaggtcattataaccagccttcactgaggagcaatccaatcagatcagttatctgctgtgcgcacagccgtgtggttctatacttctcttacttccattttcacctttcagaaggaacgttgtctttaaatccagcatctaaacgtgagccccagccatccctggctgtgatccccccagccctttccaccctatcctctggaactgcctggggctccccaagacacttccacatgaattcccaccaagccaagctgcagctgctgggcccaggcataacccctcctggggcagaggtggcaaggagtgacccaccactcacatctgccccacatccactcttgactctgctcagtgtttaaaaacatgtttataacaattaccaagatctgaaaattaggagaattcacatcaaagtctggatttctgtttgttcataaaaaactagaaggcagccaggcaaggtggctcacgccagtaatcccaacactttgggaggctaaggcaggcgggtcacttgaggtcaggatttgaagactagctggccaacaaggtgtaacctcgtctctactaaaaatacaaaaattagctgggtgtgatggcgcatgcctgtaatcccaggtactcaggagactgaggcaggagaattgcttraaccctggaggcagaggttgcagtgagccaagatcacgccactgcactccagcctgggtgatggagtgagtgagactctgtctccaaataaataaataaataaataaaaactggaagtctaagcatcactgagccctgattcctatgtggcagctcgactgaccagcatttgagttgctgtccctgacagctttgggggtgtgcagcccacacagtcatgctagcttgaggctctgctgtcagcagtttgaaactcttaataacttgtgaacaaaagactccatgttgtcactctgcacaggggccagcaaattacaaaattccatatccggaattgtctacaggagcctctgggctgctcccaagggcccacaccatgccttactcactttgggttgccatccaaacatgtctcatgacaaagaagctcaaacatgtgcatggacagtgccagaaaacaagggtcgtacatagacaaaataaaatgataacgtcccacaaccatttctttgatacacactgtttctctcagtcctcccaaccacctaggtaacaggcagggaaggtgttactgttgcctgttaggaaagaggacagccctgaaagctgtccctggccactgaagcaacccaggtcttccagccccagggagagccgcctttccattgttccagacaaagcagagacaggcatgggggagcgggagagggactcctgtgggcaggaaccaggccctactccggggcagtgcagctctcgctgacagtccccccgacctccaccccaggcaygggctgcaatgcctgctacatggaggagatgcagaatgtggagctggtggagggggackagggccgcrtryrcgtcaataccragyggggcrccttcrrggacyccrgckagctggackagttcctgctggagtatgaccgcctggtggacgagagctctgcaaaccccggtcagcagctgtaaggatgcccccctcccccacaacccaggccctgggccgctctggtgcagcggcagatgggagccgggccattgcagataatgggcttgtttttaaacaactctggggaaaagcaaactgacaatccgttcgtaagctccatcccttctgctcagtcatgacctgcccctgtgagagatgaagggttagtcccagttgtgatgtgataagcccagacctctttccttccgacaggtgatcgtgcatgcagaggaggctctgagacgcccccagcaaggttcctgggtttaacccaacattccccaaagtatgtatttggccacattcacagaaagaatattagtcttttgtggaatgctgcgggttgacagtcacagcttggaaaccaacccacagagagctcatcattaatcatggctatcacttgtttaccacctactgtgccaggcctatgctaattactttattagcgtcctctctgccgctcgcaggcctctattattataggtcagtagtattcgatttatttaaattaaatacggaaggtcatagattaagcaagaaagtgccagcaacatggtgcgtgcctctgactgggcactaaccctccaagtcttagttttcccaaccataactggccaatgaacagcagctctggatgcagctaaaggaagactgaagctgtaggtcccgtgctcggcgcagggccccctgcaaggaaggtttcggagggactggatggggtctttgaactatctgtctttccctttactgcagtgggcccaggggcaggccaaagttgctcccgtgattgacttgaacgtgcacgttcctaatccctgacatttctaaagctctggctcattaacgagggaaagacgtgaaccagctgggggagtggggatcgcagtgccccacgtggccrcctcgtgacctcagtggggagcagtggggccggctcccggcttccacctgcatgaggggccctccctcgtgcctgctgatgtaatggacctgccctatgtccaggtatgagaagctcataggtggcaagtacatgggcgagctggtgyggcytgtgctgctcaggcycgtggacgaaaacctgctcttccacrgggaggcctccgagcagctgcgcacacgcggagccttcgagacgcgcttcgtgtygcaggtggagaggtgtgcggaggaggagggtgggtgcaaagggcaggggctggggacgcccgggcactgcagacttggtctcagggcgacgctgagtcccaggcccggggcgcagggatgggaaactagggcctggggcgggattccgggcgtgggcggggcccggggcggggcacagggggcggkggagtgggcggggcccgaggccgggcgctggaggcgagggcggggcagggacgggtccaagggcaggaggctgggacaggacsgggatgcaaagggaggggcggggcccgagacggggaggagggggagsgcccaaggggaggaggcggggtccggacggggatgccaagagcagggatgggagcgagcctgcgtccgggcactggtccccatccgtgagtcccctcggtgmtccctgcccgccgtggccatcctctcacatcactcacaaccccaaggcgcggcatggttgacacccccacgttaggacggagaccctgggcttagttagagggggcagtactaaccagtccctggcggaaacgctttggctgggtgaggtgagcgggatcgcccccatttctccagagaggggtcccggctcagcgagggaaagaggccgccgctggggggacggctggccggggcccctccctggagaacgagaggccgccgctggagggggatggactgtcggagcgacactcagcgaccgccctacctcctcccgccccgcagcgacacgggcgaccgcaagcagatctacaacatcctgagcacgctggggctgygaccctmgaccaccgactgcgacatcrtgcgccscgcctgcgagagcgtgtctacgcgcgctgcgcacatgtrctygrcggkgctggcgggcgtcatcaacygcatgcgcgagagccgcagcgaggacgtaatgcgcatcactgtgggcgtggatggctycgtgtacragstgcaccccaggtgagccngccccgctctctccctggtaaagtggggcccaaaaagcgcrcgctccaaggttccttgcggttcccaagctccaagatttcgtagtcctcttctcgtcccccttggcctagatttgggggaagggtcgactgcgtgcagggcgcccggtaatgaatgtggaggatgaggtgggaggagggacggcagccctgcttctcttctgcccagcttcaaggagcggttccatgccagcgtgcgcaggctgacgcccagctrcgagatcaccttcatcgagtsggaggagggcagtggccggggcgcggccctggtctcggcgrtggcctgtaagaaggcctgtatgctgggccagtgagagcagtggccgcaagcgcagggaggatgccacagccccacagcacccaggctccatggggaagtgctccccacacgtgctcgcagcctggcggggcaggaggcctggccttgtcaggacccaggccgcctgccataccgctggggaacagagcgggcctcttccctcagtttttcggtgggacagccccagggccctaacgggggtgcggcaggagcaggaacagagactctggaagccccccacctttctcgctggaatcaatttcccagaagggagttgctcactcaggactttgatgcatttccacactgtcagagctgttggcctcgcctgggcccaggctctgggaaggggtgccctctggatcctgctgtggcctcacttccctgggaactcatcctgtgtggggaggcagctccaacagcttgaccagacctagacctgggccaaaagggcagccaggggctgctcatyacccagtcctggccattttcttgcctgaggctcaagaggcccagggagcaatgggagggggctccatggaggaggtgtcccaagctttgaatacccccagagaccttttctctcccataccatcactgagtggcttgtgattctgggatggaccctcgcagcaggtgcaagagacagagcccccaagcctctgccccaaggggcccacaaaggggagaagggccagccctacatcttcagctcccatagcgctggctcaggaagaaaccccaagcagcattcagcacaccccaagggacaaccccatcatatgacatgcyaccctctccatgcccaacctaagattgtgtgggttttttaattaaaaatgttaaaagttttaaacatggcctgtccactgttctttgacttctgtgcattaggactgtggggacaatctataaagagtctgcgtcacatgcatgaagacacttcagtatctcggcaatgccctccagacagctcctccagccatctgtgccaaggggagtgtgaggagtgacagaccaggctgtaggaacaggaatggggtgtcatgggggatggcagagcagtggacagtacactgcctggcccgggcccctgcttgcctgcccatggaatgtgtgcagagggagtgccaggccaggtgctgctctggagaagtgggggaatgaggctggtcctgctgcaggtcagtctcagcaccgtcctgtccagtcagagtcacttaggtttgccagtgagtaggggcccagatacatgttggatttctaaggtccctccagatgctcctgtcagtggaacgcctatttagagttagccaagcgtaggcataatgccatctttctgcagcataaaatacagtgacatagaaacatatttgtgtgattttcatgcattccttttttgatgagagatattacccagctaattaggaacaactgttttgtttccttcagatcataacccaaagttgtgattttgaaaagtcatgtcccccttcagatttcttgttttctgctacttctcatgtggaattgctttggctcttcttagttctcttgagtctaaattattccttataagttggtgcaagcatctgattattttgttatcattactgttatgctcaagcattcacagagtggaacacattttaatatcaattgctttctatttctcctttatattacagttcaggacattgtattaattattaaaattctattcgtaggtaggttatatgactgaattgaaatagataaaatgaatttcttttctagataacaaaggaggtgtcataaaacacttgttatgggccagtgtgatggctcatgcctataatctcagtgctttgagaggctgaggtggaggattgcttgaggccaggaatttgagaccagcctggggcaacatagcaagaccccatctcttaaaaaaaaaagggtggggcgggggggcactgctgggcgcggtggctcatgcctgtaatcccagcactttgggaagccaaagcaggtggatcaaaaggtcaggagttcgagatcagcctggccaacatggtgaaaccccaactctactaaaaatacaaaaattagccgggcatgatggcgggtgcttataatcccagctactcaggaggctgaggcagaagaattgcttgaacccaggaggcggaggttgcagtgagcagagattgcaccactgcactccagcctgggcaacagagcgaaactctgtctcaaaaatgaattaattaattaaaaaaagaaaaaaaaaacactgggcagggtggtgtgcacctgtagtcccaactactccagaggctgaggcaggaaggagcacttgagcccaggaggttgtctgcagtgagctctactcatgccactgcactccagcctgggtgacagagctcagtggcttacacctgtaatcctagcactttgggaggctgaagcaggcagatcacctaagatcaggagttcgagaccggctggccaacatgataaaaccccgtctttactaaaaataaaataaaataaaaaatatatataaaaattagctgggtgtggtggcacatgcctataatcccagctgcttgggaggctgaggaacaagaatggcttgaacccgggaggcagaggtggcagtgagctgagatcgcgccactgcactccagcctgtgcgagagtgagactctgtctcaaaaaaaaaaaagggaatttaagaaatttaaaagaaaactcttgttatataaaaagggtattgggtctgacagataagagctcctgcactctaccagccagctactgacagacataggtctggctccagtggaggggcagcagccagtgagcccagcctggggtggcccactcctgctgcctccaggatgtcccctgtttccccagcccctctgctgtgccctcggccccagaagctggcgagactgcttctctggaacagcatcacgcaggcctgcccatcggcccactgtgcaccaggccttctggggatacagatgtcaaccaggtggggtgctcaggaggggcacagaagccaggaatgacaaacacatcagccaccaggcaaatgggaaatgtgccccagaagctccctgctgaggatgttagggagagcattctgaagtagtgtggttgagatgaggcttgaggaaggcaaggctccaaacagcagggcagactgggagcaaggtagactgcatgggagggcagctgatggagctccttaaccctctggaattgccccaaagccaagcaaagtgttcttcttggggtcacagctagctcagggatgccttctgccccttggtcagaggggcaaaaggtcagagcctagggtcaccaaaacctctgggaagccccgggggtctcaggccacagaccatcctcagaactacacactgccctcccatgcctggcgggggccctggactggccctcaccagctgtcttcttgcactggccagggttctggctggactggcaaggaggggtggtcagatacaggagtaactggatcccttcatcaggacctagggtggtgagagctttgagcctgctctgctccaggcagacattgtgtctggccctgccaggatggatagacagcaggatgttacacgttgaggacatgaaggtcatcaggaatgtggctggaatctgttaggcctcccccagcccaggcgggggctgccaagtttgggcctatcctctgttcctctccttatttggaccttcaggtgataaggctgagacataaaggaggctgggccctgccaccacgacagcagccacacctctgcagagagaatggtgagtgcctgctggggaagaaaggctagcggtctcccaggtgctggcctttgggctgggggagcagagttttctgtgcttgtgttgggttgagggtggtccccagggagaggaagaggatcctggccctggctctcctgggaatgctctgggactgtgcatgatgggtggggtggggagactctgaggagttggggagaggacccctccctactcacagtgttgcaggccagcaggaaggcggggacccggggcaaggtggcagccaccaagcaggcccaacgtggttcttccaacgtcttttccatgtttgaacaagcccagatacaggagttcaaagaagtgagtgcccactcccagtagcctcagatcccatcctggcccccccaccccaccccacatacataccccccttctaccctgaccttgcctctcacaccacccaggtctctcccccacctcccaccttccctagagctgggggctgctcccacctgaaggcccccatcccacaggccttcagctgtatcgaccagaatcgtgatggcatcatctgcaaggcagacctgagggagacctactcccagctgggtgcgtgcacccacctcccaccctgcgcactggggtccctactctgagctgctgggcgggtgggagtggctggggggacaggactctgctcccctgcttcccctcctccccgtctcctcacactgcccttccccccttgtcacgccttgcttccacttcaccttcccgacccacagctgcctctgcccctccagcccctgtggccaggatggagggagggcggcctgggcccttctgggggacacccagggtccctgtgtgcacctcatgccccacccccaccagggaaggtgagtgtcccagaggaggagctggacgccatgctgcaagagggcaagggccccatcaacttcaccgtcttcctcacgctctttggggagaagctcaatggtgagcctgggacagagctgggcacccttggccaggcagggagcctgcaccctgcctgaaccccacctgaaccctgcctgaaccccacctgaaccttacatgaaccccacctgaaccctaactgaaccccacctggacccacctggactcttcctggccatgacccattccaagcacatcctctgccccagaatcccatgtgcactggtcaccccagtgctgacttggagccaggaaatgtgccttcagcccccacccccaaattccagtctcccagccaagctgcccgcctcaggaggatgaccattcccagccccactgatccccgagaaacattttatgttagggaatacccccacctcttctgggatgtgggaggctcctcatgcagcccagttcctcctgcgggggacctgggatgctggagacatggatgctcacctggctgcctcggccttccagggacagaccccgaggaagccatcctgagtgccttccgcatgtttgaccccagcggcaaaggggtggtgaacaaggatgagtaagtatgggcccagccagatgaggagcaccgtggtggaagcagagagcggggtgaggcccctagtgaggggggctgcctgtgcttcggggccttacactgctctttggggtgcagccaacccttccctgcgccatgggagcctccgtacccaccttccctgtgcagtcactcccccgcagtctcctgctcagaccctcctcaccccccaggttcaagcagcttctcctgacccaggcagacaagttctctccagctgaggtgaggctgcccagccccttcaatactcatccccagcaccttctctgggccttcacccatgacccagagcccagtaccagtgaggcagttgctggaagggtgagccgagggcccttctggaggaggtgccatctctgttgagacctagagggtaaagatgtggagtcagaaaagagggcagggtgcgccaggcagggagactgtgcacagacctggggggaagtggatagggagaggtttcgtacactcggggtgggcctgtgcctgtggctggaggggcgtcctttgccycttggcccacatttgcactgactcctcactctgcccagagtcagccaagagaaaaacattaacccagagtctggggtctagggttgaaaagctaaggcaaaaagcacagatgcagggggcagacagaaaggccacaggactcaggtgaggtctctgccgggctgggccaggagccaggggactgccactcaccagtgtccccygcaggtggagcagatgttcgccctgacacccatggacctggcggggaacatcgactacaagtcactgtgctacatcatcacccatggagacgagaaagaggaatgaggggcagggccaggcccacgggggggcacctcaataaactctgttgcaaaattggaattgctgtggtgtcttgtctgtgacagatgggttggggaccagccaagggggatcccagggtctcagtgcgcacatcaccatgatcatggccaccatctacctcctgggagctggcccctcgccagctcaccttgattcactcccatgatgccaagtgaagtgtgaactatgatcatgcctagtttacagatgaggacactgaggcccagaaagtgtgagcatcttaccaaggccagccctctagaagaggagatggtgggatttacaccacctccaccaagcccaggaatgagccacaaagtgggcactgcccagctacttggggctgtgcagagaagaggctgcttgctgggcactcagcaaactctgcccaacagcccagcgggtgggcagcagccctgggacccccacacccaaccacacagcctcccctggcccactgctcgcaccccatctcaatacactggcttgggtgcctccctgcatgggccctttgtgaaaggcagagaggtacccatttgaaacacaaccagcttctcattgcaaatacaggcaaggcactaagacatgaggaacatggacaccaaagcagr

SEQ ID NO: 93730 - DNA, 22256 bp, Homo sapiens
cactgaggtatctccccgagggacgtctagagctgaaagtgggaacaggaaacagcaagatgagattcatcttggaaaaatgcaaactcaatctgggcaaaaataatcgaaaacataagtaagggatgggcaggaatagtcatggctcggtgggagcagggagggaggttgcagcctcagggcagcggaaagggcccagcctggccggaaggtgtcccgccacgagggtggctgggcagcctcctgactttctgggaggcagtgtcagaggagggagcaggaggctgaggacttggacttctgggaatccctaagccaagtttattggaacagctcacccaaaacagagggctgaggtctctacttcctgacagcagcctgtggtacccacccacccaggccagggccctgcccactgctgcccaggcctgccttcaccctcccctctctcacagcattccctgggcctgtgctcctaggggaggccatggagcaggctgagcaggcaccgtggacatctccagagagaactccggactcagagccaggaggggaggccgggtgtgtgtcttggctctgccgctcagacagaggctcctcgtccacaaaatgagaacaaaaacttatgttccttccctccctgcctgcttccaagcaatccatgccctctgcagaaattttagaaagtacaaacaaaatgaaaaatgttcaaatcacccacaattctactaaccactgcaaccatttgcttagctttgttgcacctctattttccatgtatgacatatatatgtgtgtttttacaaaaacagcctcacattatacatacagctgtctgctttcatcaggtaaccgtgtcaaatcttctcatgccactgaatatggccataaagcaccatttttttgttgctgttgttgttgttgttgttgttttgagatggaatctcgctctgtcacccaggctggagtgcaatggcgcgatctcggctcattgcaagctccgcctcccgggttcaagcaatctcctgcctcagcctctcgagtagctgggattacaggcacccatcatcatggccggctaatttttgtatttttagtagagatacgggttctccatgttggccaggctggtcttgaactcatgacctcacctgatctgccaccccggcctcccaaagtactgggattataggcgtgagccactgcgcccagccagcaccagtttttaaaagtcaggctgagtgcggtatagttgccatactgtaaaattcacccttttcagttcataattctatgaatttgacaaacacagtcttgtaacctgtaactcccaccacagtcaagatagaggacattccatcacccccaaatgccttcaaactctttgtagtcgaccccagctcccagccttgcccatcactggtctgttttctatcctatagttttgccttttccgagttgtcatataaatgggatcagagcatatgtgtctcctgccacttagcatgaggcactgaagactcacccaagctgctgcattaccggttcccttcatctcaatgttccttagcattccatgggatgcacacaccagtgtgtgaagctgttccctgggtcaagaacatctggagtgtttacagttttgggtgattaagagtaaaacttcacagaatcatttttaatggctgcataatattccacagtatgaacacagcaacatttattccaccagctcttggtcactggatattcaggtggttctcagctctcacttttacacgcgtaagcttcttgtcagggtctccatctccctgaagggtcccctccctctagagcagtgaatctcaaccttggccacacatcagtcactggggaactttaaaaatgccaatgtcggccgggtttggtggctcatgccagtaatcccagcgctttgggagactcaggtgggaggactgcttgaggccaggagtttgagactagcctggacaacatagtgagagcccccatctctacaaaaaataacttaaaaaaattagccaggcgtgggggcacatgcctgtagtcccagccactcaggaatctgaggtagaagtaccacttgagcacaagagccaagagtgattgtgccactgcactccagcctcggtgacagagtgagaccttgtctctaaaaaattaataataataaataaaatgccaatgcccaagccatatccagaccaattaaactggattatttggggaggggcctgggcctaagtattatttggagctcttaggtgtaccctgctccactgtactctggagaggggatggtctggacctgtggggggtggccactgctgcccctgtggcagtccctctccctccccagacccactcctcactgccttcccacagtgaccaccacagacaagtacagggaaaccaggcccattgaagatggaaactcaaagacaatttccaatgtgcaggagataatctaaccatctcctttcagtgggatcttttccatagctcaagggccaccctctgggaagggcaactccttccaagtgcctcttggacacacccaagtcctaacctgccctcgcgactatgcctcttgtttaagctgcaaaagctacctccagtcctggggatattcttggccctagtatggctccccactgcgccccacccccatcttccagtgggacaccctccctcacccctcctccagcaggtatacctcccacatcctcaagcagggaccccctccccaaccatcctccagcagggacaccccctcaccatgttctccagtgggggcactgttgcagcagagaaagttttgtaattgcagggccagacaagcaaggaggatgaaagataattctcaaaaccacctcccccagaattcagaggctagtgtttttaagggtgcttcagcaagcaggggactagggagctgagacaactgattggcagtggatgaaatcacagaggtatcaaaactatcttcaagcagctgagtcagtttcttggtgtgggtcacaggtccaggtagtgtctcttggtctgctaaaattctaaatctagaaaatatctcaaagttctttaggtttcataatagtgatttttttttttttttttttgagacggagtcttgctctgtctcccaggctggagtgcagtggcatgatctcagctcactgcaaactccacctcccagcttcaagcaattctcctgcctcagcctcctgagtagctgggattacaggcatgtgtcaccactcccagctaatttttttgtatttttagggagatagagtttcaccatgttggccaggctggtctcgaactcctgacctccagtgatccacccgccttggcctccgaaagtgctggaattacaggtgtgagccactgtgcccggcctctatatgagcagctggagaagttagaaatcttgagatttccggctatgtgactccagggcagtaagcattatagaaaagcaagccaagtgagaaacggcaggtcgctgtttatgcccattctttagcaaagttcaggccccaccacaattctaaccttgtcttatgaatgtggtttcaatctccaaacaaggagggggtcagtttttcttgcctttaactatgaactaaattcctctcatagttatgttggcctctgcactacaagaagaagaagaaaaaaaaagaaataagaaaaccaatttagtctgtgaggttagatgcaagagggaggcagtcatgttagatttctctcatgacttacaattctgcaaaggtggtttcacctccacggcaggccacctctccctgggtatagggcacatcttcgtcctgcagagcaggcaagtccctctctctccccacctcctcaccccttcttgcccccactggccaatcttcatgaatccttcagccccatgttgtcctagcagacactttgcagcaaccactcagagggcctggctgatttctaagctaggcagtttcttccactgtcatttggatgagattccttgcacaaacatttttgcacagttgcccagtgttttaagtattcaggtctcatagtcttaaaaactgcctctgccttcccaggagagaacaagggctccaaggggagcccaggtgctctggccagacagaggacattaaaaggaacagaaatggttttagacagctagagggatctgctcaggggatatttgggcagagcctcctccttgagaagggtaggagccagatccacagacgaagacccttagagcctgcccatccctgctggcacaaggggaggatggggagagagggaccatacgcaggcctcctggcttctgtatgtgggtcctgaggcccaggaagctctacagccctgaagaggtagatgaattaggaggctgggagatggtgtaggaggtcaagaggatgcctgggctgagccatctcccccactcccctcagccctgtgctctgagtgcagagatggggaagagccagcccactaaagatgtcagagaggagccaaagaaaaaggataggtgctcaaggagtctggggctcaagactgaggacgatggggcagtgatgaggagaggcatgtggaagggggttgcatctgatctggtgtcccatcagttaggctgagcagtgccacactaccgtaacagaggttacaaatggagtatatctaaataagatagacagaagacttgatattatcaagacatcagatttccccagcttgatctatagattcaatgcaatcccaatcttgggaaaggaattgctggatcaatgtgtattattttgttttcattttgttggatgtggttgccacattggcttccacagtccttcctatggattgccaattacctcgcaccttcaacatgtgtggtcaatttttttgaatgtttgataaacccacaactgaagatattctcatttaggtattctgtaacgactggacaggttgggcactctggtcataaatttattgaccaggatttcttctaagaatcatctacgtgagtttttttgctaatttttctattaaattattgtctttttatctatggacaatttgataagattatcatgagataatcttaattccaaaatatctcacactttatcccagtttatcttctgactctaatttttaatcagatttaaaatttgtctgtagtccagtttatcattcttttcctttagtgtttccaagtttattgtgatatttagatcataaaaacattcaccgacttttttccagtacgttgttggtttcctttttagatggaaatgtttgacccatctggaatttattttggtgttaaggaatgaggaagggcaccaacttctatttttccaaatggcctgccagttgtcctaatgccattcgactgaaaaatcttcccgcgtgtttgaagcgaccgccccaccagcgcattggaaacccgcgtgtcggtcctgcgcccgccggcttccgtgtgacagtcccgagcgcagagggatcgggcacagcccgcacgcgtccgccccgagccgccggctcaaccctagacccagccccggcgccaaggacacagcccaccccgctccgcccgggcctaggtcccagttcaccctccctagccggggacgcccccttgaccccgcctcctccaccccctccaacaccctccccgccccgctccagcccagcctctcctcccggaggccaatggggccgaacagcgctttccgagacattaatttaaataaaaggcgggtcctctgccgttatttgcatggaggcgggtcttccggagcggccgggacacccaatcctgtaggagcccggaccctccccagcgctccgactggcccaagtagcgagccccacggagaggcctcatttgcatagggcggggccacgtcctcttccagccggcggccgcccgcccgcccacccgcttccgtcagcctcactggggcttccttccgtctcgctcggagtttccctctgcgttcgctccgcgctgctggaggctgtcgtcccaatgctccccaaacggcggcgagcgcgggtcgggtcccctagcggcgatgccgcttcctccacgccgccctcgacgcgcttcccgggagtcgccatctacctkgtcgagcctcgcatgggtcgcagccgccgggccttcctcacaggcctggcgcgctccaaaggcttccgcgtccttgacgcctgcaggtgcggggcggcgcggcgcggcgagggcttccatggcacttctggttttggattctaagtttgcagtggcacttcgtggtcttgtgacctttccctgagcctccatctcctcttctgtaaagggtgctattaattagggcgaggcgtgttttaaaggatcactgcgagaatcaaaaccagaggtcaggggtaattaataagcagtaggccgggcgcggtggctcacgcctgtaatcccagcactttgggaggccgaggcgggcagatcacgaggtcaggagatcgagaccatcctggctaacacggtgaaaccccgtctctactaaaaatacaaaaaattaaccggaggtggtggcgggcacctgtagtcccagctactcgggaggctgaggcaggagaatggcatgaacctgggaggcggagcttgcagtgagccgagatcgcgccactgcactccagcctgggcgacagagtgagactctgtctcaaaaaaaaaaaaaaaaaaagtcgtatttgctaacagcccttctgcctgggctatgtcccacctgtgagcgagactgacttctcaagaggcccggagcccgcaggctcctctgtcctcaggcctgagtaaataacacgactgagaagctcttgtaggaagggaaccaagagaagaaaaaatggcggctacagagacaacacccagagtaagggagctgggggtgccccctagtttggaggttgagagarcaaacgaacctggggctagtattcccccacagttgtgtttgattttttaacattaccagggatcagtagtgcgccagacccactcaggagaggatgatagcagcttagagtgtacaaggcactatctttgtacaacaaccccacagggtggatatgttatctctgctttacagaagaggaaatcaaagtatagacacgtggcttgcccaagagccaaacaagtatgtggcaggcagagctggggttcagacccaaacaggctcctccatctctgctgaaacccttgctcttagatgaagaccacctggtcctgaccctaaggaattcctttctttgaggtgaagagggagggagagagcacaagactgggctgtgcttgtgaacatagccagggcagagaactacggttctgagggctgagtggtggaggtgttcatctaccaggaggaggggctgggaaggctttctggaggaggtgacgtttgcaggatgaatggtcacttaccatgcagaagggacggcaagagtgaaggcttggagccaaccaggacgggctctgggcctcaycctcctccttctctcccaactccctccaccagctccgaagcgacacatgttgtgatggaagagacctcagcagaggaggccgtcagctggcaggagcgcaggatggcagctgctcccccgggttgcacccccccagctctgctggacataagctggttaacagagagcctgggagctgggcagcctgtacctgtggagtgccggcaccgcctggaggtgagctgggtggaagactaaagtgggggctacagtgaaagccccagtgtaggccattgctcagctgggacaggtgacatggcagcaatgcctcaatgtccttcagaggaggtgggcagtgaagactctacccagatcaccaggggccccctataaaccagtagaggaaccacagaaggggctgagggggccaggccatctcagcttctgttctcaccactgatgcaaattctggggtctgcttatttttaccttcttcaggcctttcttcctcaccaagtagatgacacagcaactccgagcgggatgacccatgggttagcaggagcctgtcctctggatgctataaggctcccggcctmtgacaggtgtgggcttggggccaggttgcctgccttcaaatcctggcccagcctgtgagccatggttgtggggcaagcccctagcctccaaggcctcagcatccccagcccgcttggttgtgaggattggggtgatggagtacatgcatcatgtgcagcagcaggagaagtgcccacagggctggcagatgtgattgctgctaccctggcatgaggagccccatgcacagcctgttctgcagggcggtgcctccctcagcctcatgccgctggtgttttgttgcccacctctgtcccatgagctccagagggcccgagttggacaccccaggagaaacaaagcctgagtacggcctggctctcctgccagccctgcagcctcacagtgacctgtttattgcccatccccaggtggctgggccaaggaaggggcctctgagcccagcatggatgcctgcctatgcctgccagcgccctacgcccctcacacaccacaacactggcctctccgtaagccgcttctatgagccttggccagccctgggggttggggacaagggtacagatgggtggtaggtgrgggattggagctgcccaccctgccccttacctagggcccctccctgcaggaggctctggagatactggccgaggcagcaggctttgaaggcagtgagggccgcctcctcaccttctgcagagcagcctcggtgctcaaggcccttcccagccctgtcacaaccctgagccagctgcaggggcttccccactttggagaacactcctctagggttgtccaggtaggtgcttaccatcctagcagggtgagtgggtgggtggggaggccttggggcctggtgagacagcagagggtgctgtgggggtgggtgaggacagacagtcgtgggtgctgacactgctccaaggcctcaacaagccaccctctgcgctcagattcctcctgtgcacactagccatttactcctgggtggcctagaggacccagtgaatggcgctgtgaggggcctggcagggctaggggtgacactgttgtcattgtcattagtcccaaactgccctccacagtggaatgaaagagagcaccctgagtgtgagcatctcttttcagtgccccagtgtgtttagttgtcctttagtgcactttcattgcaagaatacacagtgacagaagatgcttttaaatgaagtagtattgagttcacatgttctgaaaagcaattgtttatgtatcttgggacttatttgactgagagatgatccacgttacctggcatctcagctgctgtaactccaggcccgaaggagctttgaggctggagccctgacctcccagctgtgtggcagcaactttggtcacctccctgggcacagtctccatttccaggtcctactggaccctgacctcacaaagttgtctctgccgggtgttggaggggactgcctcagtccttgggcccccagccctgaccctaactccccgcccttctctttcttcccacgccctcaggcttagagttctgctttgttccctcccccaggagctgctggagcatgsagtgtgtgaggaggtggagagagttcggcgctcagagaggtaccagaccatgaaggtgcgcagggcagggctcggacctaccccaggaatgtcctgccctgggaatgacaacacagtccacaccatgcacggggaggcaaacaggggcagctgacccagcccaggggtcagagaaggtcttgccgaggaagtggcagctaagctgatacctgatatgcacaaggcagccaagtggagacaggcaaggaagaagcttgttttgaggacagaattttctagatcactcagcaccatctggcttttggggctttttgttttattttgtttttgagacagggtctcgctctgtcgcccaggctggagtacagtggtgcgatcacagctcacggcagccttgacttcctgggctcaaaccatcctcccacctcagtctctggagtagctgggactacaggcatgtgccaccacaccaggttaatttttaaatctttctcgtaaagatggggtcttggtaatgttgcctaagctggtctyaaacccctatgctcaaatgattctcctgccttggyccccaaaatgctgggattataggcatgagccacttcgctctgccttgactgtttttgatggaatattctcaagtagattacatgctgtggcatcttaaacagagcactgtgaaccaaatgtacccttgggtgctgccactgagcatgctgggcttgcccttgcccgccttctgcaggaccttatgtgttattttctcagtgttgtcagcctgcctgtttccatggccaccttccctctgtttctgctcactcctggtctgatagggaaatgccgtctgagttcttttggatgcctcgggtgtgcctgctttgacacccttctgccaactggctttgtggctggaggtgtcacagcggtggccacatggataactgtcagtgaagtgtggcttcctgggtggatggggccttgggaggtcacacagaatgttgtcaggattgacagggagggcttcgaagaggagagacttgagcagtgtgtgcagggcaaatgggctcaaatatgcagggaagggggcaaggggcactggcagggacaggggaccagatgagtggggccaccgtggtgagtgtgggagtgaggggcctgaagatgatgaaatccccttgaagtggtgtgaggttagtgagtactttcactgtcagcctcagccccagccctgaaggcatctaggctggcagaaaattacattagtaatgagaagtttattaacaatataattgggttaatctcatcatttttagtcaggattctttgggttgcaagtgacagtgacccaccccacaccgttggttcacaaaataaaggaaaggagggccagcagagcccaggatggggagggctgtggccggtctgcaggacaactgggctcagcgacctgggtatcaccaggccactcctcctcccctctgcccctctgcacggtggcttcgccctctcttgcgacgcaccagcttcttccatcggttggaaatgtggccacaaaaggtgctcggctgccacaggctacagcttctgccactgtgtgggcctgccctcagtctcagatccagaattcctagggagggactctagtggctgacctgaagcaggtgacttgcttgggctggggcccaccctctgtgggaagatatgtgagcaccccagccagccctgccaactctgctcctaaatccacccttttgattgttaactcctcattgttttttgctgttggctaaggaggagaaccacagaaatttgttccaccttctgttaggtgggagaggcatggtttttccagtgacttaggagcccctcgtgctgatgtgttagggtgactgttttgattatgttggaatcacaggctagagctgtgtaagtccctttcatagaggagaggagaggggtgtgcgtgggtttgttcccagagacggcaggctgggtagtcaggctccaggtttgaatccttgccctgtggtctacggcaggttgcgagtggggacggcgcctgcctggtgcatggtgctccatgggccacaccgtcccggagcgggtgatcatccgagtctagccatgagagctctgcccaaccgggctacgctccttccccacagctcttcacccagatcttcggggtcggtgtgaagactgctgaccggtggtaccgggaaggactgcgaaccttagatgacctccgagagcagccccagaaactaacccaacagcagaaagcgggtgagccctccagagaggctgggccctgggcttccctaaactgcaccctggatccctcagcatcaactccctagagggaagggagcagtctggtgcagagggtttggtggcagctttgtgtggtgggcttcctggggtctccacccagtgcagtcaggatctatcaaagccttttctcagtggacgatgctgaccacagcaacttccatgatatgccaggggcttgtgtctgcctactggttagactttgaccagtgaccagggacagcctgggccttgggcacactgcccagtgtggtgcttggtacatggaggcctgcagaggtggcactgagcagcagaaagaacatcagctttcaagtttgttaggcctgggtttgagtcttatctaccatttgccaggtaggtgaccattgcccaagaaataacctctctgagtctgttacattttctgtaaaatggagaaggaaggctgggcatggtgactcacacctgtaatcccagcactttgggaggtcaaggtgggtagatcgcttgagctcagcagttcaagaccagtctgggcaacagggtgaaaccctgtctctacgagaaatacaagagttagccaggcgtgatggtggatgcccgtagtaccagctactcatgaggccgaggtacaaggatcgctcgagcccgrgaggtcaagccttgaggccaaggtggaagttgcaatgagctgagattgagccactgcactccagcctgagtgacagagcaagaccctatctcaaaaaaaaaaaaaaaaaaaggtgggaaggaatgaattcgtaggctcccctgtgagagccggcaagtggcaggtgttgagcagatactctgttctctctgcatggcctgcctggctactctggccacaccatctgggacctcccttgggttgagggctctgctgaagcaatccccacagcccagcaggcactgccagctccactgcctcttcgcacatcttcccccgggccactgcccagttcagctgacaggaggtgagacccgcagagctggttcctcttgatcgcctctccccatggcaagagtagtcaggaatggttagcagcgtttactgagagctcactgtgccaggtgctgctgttcctcacatttaaacctctccttagctgggtgccatgactcacatctttatgtagtcccagcactttgagaggcygaggcrggtggatcacctgaggttaggagttcaagaccagcctggccaacgtggcgaaaccctgtctctactaaaaataaaaaattagctgggtgtggtggcagacacccgtaatctcagctactcgggaggctgaggcaggagaatcacttgaacctgggaggtggaggttgcagtaagctcagattgcgccactgccctccaacctgggcaacaagagcgagactccatctcaaataaataaataaacctctccttaactgcgtgtgggaggctgataggtgaggaaacagaagtaggccagagtgaggtgttcgtcatggcaaagccatcttccatccttttaccacctcttggtcccactttatgcataaggaaaaacagccatcaaaagagatagcctgtggcatgactgtatcaacatcagtatccttatatttggttgcaaaattatagttttgtaaggggttaaccttttgggggagctgggtaaaaggcacatgggatctccctctgtgctatttcttttaactgcgagtgaatctacaactgtctcaaaataaaagtttaaaatttaaagggggagagaagatagtgtcaggcttagattgggatctcactctgctccctgccctagcctcaccttcctcggaggcctctcctggtcctgcaatgacggggccccaggttgatcacctcatgctggtgagggatgggggctcggtgtggtgggcaggctgggtgagtcaggagggccggtgttgcccccagggctccagcaccaccaggacctgagcaccccagtcctgcggtccgatgtagatgccctgcagcaggtggtggaggaagctgtggggcaggccctgcctggggccaccgtcacgctgaccggcggcttccgcaggtaagaaggcccgacgtgcccctctggcttggcttcagacccctccccagtgaagggacctgagtcggggaccctgaagcgggcccactcgttggaagggatgtggcctggggctggagtgagcaggccgtgtccctgagtcagagtcagactgacgccctcagggggaagttgcagggccatgacgtggacttcctcatcacccaccccaaggagggtcaggaggcggggctgctgcctagagtgatgtgccgcctgcaggaccaggtgagggcctccctgctccccaagagccaccgctggccaatgccactgcctcctgctctctccacaccaccggrtggtctcagccacgcccgcctctccccacagggcctcatcctgtaccaccagcaccagcacagctgctgtgagtcccctacccgcctggcccaacagagccacatggacgcttttgagagaagtttctgcattttccgcctaccacaacctccaggggctgctgtggggggatccacgaggccctgcccatcctggaaggccgtgagagtggacttggtagttgcacccgtcagccagttccctttcgccctgctcggttggactggctccaaggtaggcagtgtgccgctgggccgcctgggggtggggctgggccagccctgctgaggacaatcccttccctacagcttttccagcgggagctgcgccgcttcagccggaaggagaagggcctgtggctgaacagccatgggctgtttgacccggagcaggtacattgttggggactggggacagcaaacagcacccatagtccgctccctgacccacaatctgaaatggccccagacccctccagcctgaaacccataggacccgaatctgggtctccacacacagttcctggccctcaagagcacaccccacctcggcgctgggctcttccccaccctcagtcttcctgcagggaagcagcagtggcaagactcctaggtcacggaagtcctgcttctgttgcagaagacatttttccaagcggcttcagaggaagacatcttcagacacctgggccttgagtaccttcctccagagcagagaaacgcctgagcctgcctgtgtccccmacttccactcaggaaattgggctgcccccaacctggccactgaatgtctccaggcagatatgctgccccctgacccccaccttcacccctccccgccaaggcctggctcttccggaggtcaattgtgcctgcaggatcagttgagcccctgctggtgtgctgcagggtgtgatgaggtrggagccctcagtgccagcctcatcactgtgtgaccctgggtctgctcttagcctccccatggctcacgttcctgccctggatgggatgtgagyggggcccacatcgtggagctgtggtggggcctgcagtcatgaatggcaagtggtccctgatgtgcagtgtctcattagttgcactgcagttaactgtggctcctgcagggcaccctgcccagaatgcccagaagagaaccatgcatacctgcactgcatttgagagccatgagctggaggctgtggttcgtgccagcaaggagcctactgtctggtgtgctgtaggcatctggagagggagagggcctgggtaggagctgggaggaagataattttcaactatggggcttcagtactgcagcgccccgagccaggctctgtgcttctgcctttaaggcctgttctcagcacaatgtctcaaaaataggtcatatcctgccactcccgtcgcagagccctttaatggttccaaaccctaagtccacacatagcccctggctctggcatctctccagccccactggccccgagctgcttgactcaccggcttcctatttgatgcacccaggcccccttgtggccaactccctccccttctcactgaggcagaagcactgaggtgggctggacatgggtgccctccacgtccctcatatccccaggcacactctggcctcaggttttgccctggccatgtcatctacctggagtgggccctccccttcttcaggccttgaatcaaaagccactttgttaggcgaggatttcccagaccactcatcacattaaaaaatattttgaaaacatgcagtaaagttgactcttggggtgcagtttttgcacacgtagggcacaccaggtccatccccagaacacttcccatgctgtcctattgtggtcatgtgcttctccacccccacccacttagcggtgctacatccctatagttttgctttctctagaatgtcatgtaaatagaaccaaactatatttaacctttggactggcctctccccacagcctaatgcctttgacgttcctgcaggttgctgggtatgttgagtttgtaatttgttccatgccatgggtgttctacagtttatccattcaggtgttgaatgtctgggttgtggccggatgccgtggctcatgcctgtaatcctagcactttgggaggctgagacgggtggatcacttgaggccaggagtttgagaccagcctggccaccatggcgaaaccccatctctacaaaaaatacaaaaatttgctgggcatgttggctcatacctgtattcccagctacacgggaggctgaggcataagaattgcttgaacctgggatgccaaggttgcagtgagctgagattgtgccactgcactccagcctgggcgacagagcaagagtctgcctaaaaagaaaaaaagtctgggttgtttccagggtttggagatgatgaatcgtactgctacagacatgcatgtacaggttttcgtgtaacacatgggtcttcatttctcttgggtaaataggcacaggattactgggtcatttggtaagtatatgtttatttcataagagccaagttgttgtcccgagtgcgtctgtcattttgcagtccaccagcgttgtgagcacccctgtaagttaaacaccacagtaggcagttgctctgtatccctgtcagcacttgatagttgcagtatttgttaactttagcttttctagtagtaggtacataacagtagctcactgtggttttattttcatttccctaatgcctgataacgttgaacatctgttcactggcttctatgtcctcactggtgaagtggctgttcaagtctcatttttaaaaatggaattgttggccaggcatggtgactcacacctgtaatcccagcactttgggatgccaaggtgggtggatcacctgaggtcaggagttcgagaccagcctggccaacatggcaaaacccaaagtgctaggattacaggcatgagccaccatgcccatctgttactgttcaatcttgagagttctttatgtgccactatggtgactggtaaatattttttcccagtgtgtagactatctttcttcttttagcactgtttttttcatagtaaatgtatttaatttttgtgaagtccagtttatcaatttattcagtttaccagtttttttcttatgtttttggagtcctatctctgaccccaaatcacaaagattttctttgctttcttttatagtttgtttctttgttttccccagaaacagggtcttgctctgtcacccaggctggagtgcagtagtatgatcatagctcactgcagtctcaaactcctgtgctcaagcaatcctcctgcctcagcctcccaagtagctaggactacaggcacaagccaccaagcccagctaattttttttttttgagacggagtctcgctctgtcgcccaggctggagtgcagtggtgcgatctcggctcactgcaagctctgcctcccgggttcacaccattctcctgcctcagcctcccgagtagctgggactgcaggcacccaccaccacgcccggctaattttttatatttttagtagagacggggtttcaccgtgttagccaggatggtctggatctcctgacctcgtgatctgcccacctcggccttccaaagtgctgggattacaggtgtgagccacagtgcccggccttgagttaatttttatataagtgtaaagtggggattcattgttttgcacgtggaaatccagttgtcccagcaccatttgttaaagatactattctttactcattgaattattttggcacccttgtcaaaaatcaattaaccatcgtgtgaaggatttttccctggactctcaatttttgcatatgtactcataagaggttggtctgtagtttccttaggttgtttgtctgggtttggtatcagggtaatactgccctcagagaatgagttgttaccttttacttcaacctacttgtatcctgttatatttaatgtgagttacttaaagacagcatataattaggtttttataatccaaactgataatatgtcgaattggcgtgatgaggccatttatgtttaatgcaactattgaaatgtttggctttagatctaccattatgttgttttctgtttgttccctgttttccattgctgtttcttctttccttttttccttccctcctatctctccttctccctatacacacacacacacacccccaacacacacacatagtggttgttctaggggttctaatacacatagtttttttgtgttttttttttttttttttttggagatggagtttcgctcttgtcgctcaggttggagtgcaatggcacaatctggctcactgcaacctccgcctcccgatttcaaacaattctcctgcctcagcctcccgagtagctgggattacaggcatgcaccaccacacctggctaattttgtatttttaatagagacagggttttgccatgttggtcaggctagtcccgaactcctgactttaggtgatccacccaccttggcctcccaaaatgctgggattacaggcatgagccaccctgcccggccaaatacacatactcttacagtcaatttagattaatgttttgccatttcaagtagcatgtagaaacctcactaccatctaggtcccttcacccttctcccctcatgttctagttgtcttacatctgtatacactgaagcctccatcagacagtatcatgacttaattcaaccatcacataactcttaaagaagtaaagaatagtttcatatttatgtggacttttgccatttatgatgttcttcctgcattcccaaagttttgaattgcccccagtaatctcttctgtctgaagaacttggtttaacatttttttaaagcagattctttggttatgaatttcctcagcttgccttcatttgagaatgtctttattttatttcattcttttattccagtaaaatagaaatttttactggatatagaattcttgggtgacagttatttcaaaactaaaaatgttccacttctttctggcctctatagtttctggtgaagatccagtctttcaaagaattgttcacctgaatgaaatgtatcgtttttctctggctgatcttatttttcttggtctttagttttcagaagtttctttatgatgtgtctaagcttggacttttgttgttaatttatccagttgtgtggttcactgagcttcttggtttgtaagtttatatctttttccaaactatcatctaatttatggactccatgctttgtcatttccattctgtttaagaatattcaccaatactttctgaaggctggttataaatagctgctttgaagtctgtatctgatcattccaatagttgaatcatctcaggatgggcatgtattgatcatcttcttttctcccatgttaagattttcctggttttcctacactgggttattttggataacctggatattttaaatattatgttgagactctggaccttgtttaaatcctaagcagaatgttgactgtttaaagtgtttgcactactagtcatattagtcctgtatctacaccggtcagtctgggacctgcaatgtgcatctagggtcagccctgtgcgcagcttggcagcaagccaatgacttcacatatcactttatcggatcactcacttcatctctcccttctctgtactctccctgaaacacaacagctccctgcaacatccctaccaagacctccagccacaaatctggggctctttccctacctaccctgctgcatactccctgaaactgcatccagggcccagcgcaggggggcagaaaggagctgcagaaggtggttgccccatgcttttggggccatggctcctctagacagagggtagcgttaccctctcaggtttcaagtgcgtacccagctcacactaccgtcactgtgccaccactgccacctccatgttactgcccaggagctggggtagagaagaaaagaaaaattggagggattcccccaactcactgacttcgaggggcttcacatcccactcctctgattcttcctggagctctttctgttggtgcacttgaggtttcaagccgcctgtgtgtccaggctaggcaatacttgttacctcaccacttctctgcggaactttgaatctgatctccttttcttatctgtctactgacagctgctcctgcatctgtccaggattggtggctgtcagtgggagagacatgggaagatgctccctccaccttcctgggaccaccttgttgactcagcagccttcctcgccgcccaccatgctatgccttcctggatggaggccctgagggtggcttttggttttcctacccctgtacccctccaagaaagctctggcacactgcagaggccagcaactacttgtcaaatgaatcaaaggaaagtcaagccggagccaagggtcagaagcaggggcttgcttccccgaagtccagcccttctttgggctcccctttcctttttgacacctcctgcttggttggcagtgaggtctcccaggtctgggggatccttgccactgcttctgcacccagccctggctaagcggccttgttctcatcaaagctgccgagacctgcagggtactcagcttctacttccactcctacacagctgcaagtgacttgaaaatatgaccatgcttcaaagtctccagtgattcccactgtgttgggacacaaagcccacctctctgccatgtgcccctgatggtcgctgccccagcttgtttgctttctgtagggcttgggtctttgccaacccctctacctgaattgctctccctgtaggactcatcatagctgaggcctttgcactccgctctttccactcacatgtcacctcagggctgtccccggcctctcctttcccatctctcccagtacattatggtccttccttcctagcatctggtgctatctacggtaggcatgtttagctgctggtacgatccctcctccactgaaatatgggcttcatgtctggcccctgtgggactgccagagcctggtcctcagtcatgtttagttgggctagtgaatcaactcttggtcaaagggacaaaagcagatgaggagatgtggcttcaatcaggatcagtgtggaacagtgagacctgcgcatggcactgctaggagggatgggttccacctgccagccttgggggtcctggcagccgacaggactttgcccactgggacttgtctgccaacctttgggtacagagccttagcttcacaggccccaagccaggagcccctccccaggtaggccagcagggatggagggaggcctgtcgagggtttcttgcacactcagatccaagtctcagagtggtggtccctctgctggcctctcacctacccgctcctgttatcagaagtgtcgcaggtgacagtgtggtcactggggtgggaggaaatgggaggccctggatggggcccatgcccaagggtctggccatggccccttcattagggccccaattgtgactttattgctcatagtctcttccctgccttggtggctctcatcccccaaacctgaatgcagaagtcttggtcctagactcaactccgtgccacccttcagcctacgttgtgggttcctgctaagctgagcatttacctaacaatcaagacttctgacagtcctcagtcctgcccccaaacccccttggatttctctttttcaaggtggtttcggct
